United States Patent Application Publication US 2006/0248617 A1 - sequence listing, part 2

SEQ ID NO: 287 - protein, 183 aa, Thermococcus kodakaraensis KOD1
  misc_feature (414542)..(414542): n is a or c or g or t.
  misc_feature (786890)..(786890): n is a or c or g or t.
  misc_feature (786907)..(786907): n is a or c or g or t.
  misc_feature (786944)..(786946): n is a or c or g or t.
  misc_feature (839139)..(839139): n is a or c or g or t.
  misc_feature (1128488)..(1128488): n is a or c or g or t.
  misc_feature (1128499)..(1128499): n is a or c or g or t.
  misc_feature (1128505)..(1128506): n is a or c or g or t.
  misc_feature (1128517)..(1128518): n is a or c or g or t.
  misc_feature (1128539)..(1128540): n is a or c or g or t.
  misc_feature (1561400)..(1561400): n is a or c or g or t.
  misc_feature (1561477)..(1561477): n is a or c or g or t.
  misc_feature (1561545)..(1561545): n is a or c or g or t.
  misc_feature (1767941)..(1767941): n is a or c or g or t.
MIIFAGRSNVGKSTLIFQLTGKKVKRGKRPGVTRRPIEIEWRGKRVVDLPGFGFMSGLPKEVQERIKDEIVHFIEDNADRIELAVLVVDGKAAPEIIERWEKRGEIPIDVEFYQFLRELEIPTIVAVNKIDKVKNVGAVINFLAEKFGVPYGEVNETFVPISAKFGKNLDALKALMEKKRRKS

SEQ ID NO: 288 - protein, 280 aa, Thermococcus kodakaraensis KOD1
  misc_feature (414542)..(414542): n is a or c or g or t.
  misc_feature (786890)..(786890): n is a or c or g or t.
  misc_feature (786907)..(786907): n is a or c or g or t.
  misc_feature (786944)..(786946): n is a or c or g or t.
  misc_feature (839139)..(839139): n is a or c or g or t.
  misc_feature (1128488)..(1128488): n is a or c or g or t.
  misc_feature (1128499)..(1128499): n is a or c or g or t.
  misc_feature (1128505)..(1128506): n is a or c or g or t.
  misc_feature (1128517)..(1128518): n is a or c or g or t.
  misc_feature (1128539)..(1128540): n is a or c or g or t.
  misc_feature (1561400)..(1561400): n is a or c or g or t.
  misc_feature (1561477)..(1561477): n is a or c or g or t.
  misc_feature (1561545)..(1561545): n is a or c or g or t.
  misc_feature (1767941)..(1767941): n is a or c or g or t.
VPLMEFKAFIEITRPHNCLLAGIVGVLGSIVAAGGLPELKTAILVFLVVFLGCAGGNTINDYFDYEIDKINRPERPLPRGAMSRKAALWYSVALFATGIVLAWFINIWDFLLAIVAYVTMFIYAWKLKPMPFIGNVVVASLTGATPLYGAIAVGEIGLAGTLALCAFLVNVAREVIKDIEDIEGDMAKGAKTLPILIGRKRAAYVGALFAILTVVASFLPIKAGIGLGYLAMLPVDAVILYSAFLILRSQDRETAHRAQILLKVSVFLAVVAFLIASLVR

SEQ ID NO: 289 - protein, 425 aa, Thermococcus kodakaraensis KOD1
  misc_feature (414542)..(414542): n is a or c or g or t.
  misc_feature (786890)..(786890): n is a or c or g or t.
  misc_feature (786907)..(786907): n is a or c or g or t.
  misc_feature (786944)..(786946): n is a or c or g or t.
  misc_feature (839139)..(839139): n is a or c or g or t.
  misc_feature (1128488)..(1128488): n is a or c or g or t.
  misc_feature (1128499)..(1128499): n is a or c or g or t.
  misc_feature (1128505)..(1128506): n is a or c or g or t.
  misc_feature (1128517)..(1128518): n is a or c or g or t.
  misc_feature (1128539)..(1128540): n is a or c or g or t.
  misc_feature (1561400)..(1561400): n is a or c or g or t.
  misc_feature (1561477)..(1561477): n is a or c or g or t.
  misc_feature (1561545)..(1561545): n is a or c or g or t.
  misc_feature (1767941)..(1767941): n is a or c or g or t.
MNPLEFHRDNFPGNGKIEVIPKVPVNRETLSLAYTPGVAEPSKAIANGADPDEYTVIPNTVAVVTDGSAILGLGDIGPVAGMPVMEGKAVLFKALAGVDAFPILINTKDVDEIVRTVELISPGFGGINLEDISAPRCFEIEERLRERLDIPVFHDDQHGTAVVTLAGLINALKLVGKKFSEIKVAISGAGAAGIAIAKILHSVGVKEIVTVDRKGIIHEGREDLNPYKREVAEYNVHGIEGGLKEAMEGADVFIGVSAGGIVTPDMVRAMADDAIVFAMANPIPEIMPEEAKRAGARIVATGRSDFPNQINNVLGFPGIFRGALDVKAEDITPSMKLAAAEAIASVVSDDELGEDYIIPSPLHPDVFPKEARAVAEVAMKEGVAGRKVSGEWVEEHTRRLREFYSAFIEPLNEKRKTFSGRGSSP

SEQ ID NO: 290 - protein, 235 aa, Thermococcus kodakaraensis KOD1
  misc_feature (414542)..(414542): n is a or c or g or t.
  misc_feature (786890)..(786890): n is a or c or g or t.
  misc_feature (786907)..(786907): n is a or c or g or t.
  misc_feature (786944)..(786946): n is a or c or g or t.
  misc_feature (839139)..(839139): n is a or c or g or t.
  misc_feature (1128488)..(1128488): n is a or c or g or t.
  misc_feature (1128499)..(1128499): n is a or c or g or t.
  misc_feature (1128505)..(1128506): n is a or c or g or t.
  misc_feature (1128517)..(1128518): n is a or c or g or t.
  misc_feature (1128539)..(1128540): n is a or c or g or t.
  misc_feature (1561400)..(1561400): n is a or c or g or t.
  misc_feature (1561477)..(1561477): n is a or c or g or t.
  misc_feature (1561545)..(1561545): n is a or c or g or t.
  misc_feature (1767941)..(1767941): n is a or c or g or t.
MISVVLVEPEGPANIGMIARTMKNFGFSRLVLINPNLTEESYAYAVHARDVLENALILDSFEKALELFDFTVGTTGKPGKRFIPHRAPLMPWELVGLIKDYPGEVGIFFGRESIGLKNEELDAMDVTLTIPTSEEYPVMNLAQAAAVVLYELSKKRPEPYVEALKPATREEKEALVRTWEKLLNTLDYPKDAERRDVFVKVFQRAVGRAFLYGREVHTLIGPLRKALKRLEECRC

SEQ ID NO: 291 - protein, 394 aa, Thermococcus kodakaraensis KOD1
  misc_feature (414542)..(414542): n is a or c or g or t.
  misc_feature (786890)..(786890): n is a or c or g or t.
  misc_feature (786907)..(786907): n is a or c or g or t.
  misc_feature (786944)..(786946): n is a or c or g or t.
  misc_feature (839139)..(839139): n is a or c or g or t.
  misc_feature (1128488)..(1128488): n is a or c or g or t.
  misc_feature (1128499)..(1128499): n is a or c or g or t.
  misc_feature (1128505)..(1128506): n is a or c or g or t.
  misc_feature (1128517)..(1128518): n is a or c or g or t.
  misc_feature (1128539)..(1128540): n is a or c or g or t.
  misc_feature (1561400)..(1561400): n is a or c or g or t.
  misc_feature (1561477)..(1561477): n is a or c or g or t.
  misc_feature (1561545)..(1561545): n is a or c or g or t.
  misc_feature (1767941)..(1767941): n is a or c or g or t.
MPIRTVMKANEAAAWAAKLAKPKVIAAFPITPSTLVPEKISEFVANGELDAEFIKVESEHSAISACVGASAAGVRTFTATASQGLALMHEILFIAAGMRLPIVIAVGNRALSAPINIWNDWQDTISERDTGWLQFYAENNQEALDLILIAFKVAEDERVLLPAMVGFDAFILTHTVEPVEIPDQEVVDEFLGEYEPKHAYLDPERPITQGTLAFPAHYMEARYTVWEANENAKKVIDEVFAEFEKKFGRKYQKVEEYRTEDAEIIFVTMGSLAGTLKEYVDHLREKGLKVGAAKLTVYRPFPTEEVRELAKKAKVLALLEKNVTFSVGGALFQDFSRALVNLDERPKIVDFILGLGGRDVTFKDLDEALAIAQKALNGEEFDEVNWIGLRKEIL

SEQ ID NO: 292 - protein, 327 aa, Thermococcus kodakaraensis KOD1
  misc_feature (414542)..(414542): n is a or c or g or t.
  misc_feature (786890)..(786890): n is a or c or g or t.
  misc_feature (786907)..(786907): n is a or c or g or t.
  misc_feature (786944)..(786946): n is a or c or g or t.
  misc_feature (839139)..(839139): n is a or c or g or t.
  misc_feature (1128488)..(1128488): n is a or c or g or t.
  misc_feature (1128499)..(1128499): n is a or c or g or t.
  misc_feature (1128505)..(1128506): n is a or c or g or t.
  misc_feature (1128517)..(1128518): n is a or c or g or t.
  misc_feature (1128539)..(1128540): n is a or c or g or t.
  misc_feature (1561400)..(1561400): n is a or c or g or t.
  misc_feature (1561477)..(1561477): n is a or c or g or t.
  misc_feature (1561545)..(1561545): n is a or c or g or t.
  misc_feature (1767941)..(1767941): n is a or c or g or t.
VASWVSWKKILSMLFGFLILGLAFSGASATANLVNSTVNGTVTVPSELTPEKKPGDEVRPQFGGATVVVEPFIEAFVPGVGWVVAVGSLVALIAKYLYSKPVSEFTEGFVSEIPDRITYNGQELAKGVKTNFWGTEVEIGYGYVKKKWGGLKKETVIVKSVITITRDEVKAVEDLFSPKEYGKLLAQAYLNGWDANDAKKLAEDFDREYRGFRAHFNGANLDCGVFEGGDVIIDAKGAKHIIFNHIMKKPGKDQFTHISAVDLLNEMGKVIENPDKIKCGDIISGKQRIVLVKYSPKLGKKVVVVIERIKWGMYRIVTAFPPSSRRY

SEQ ID NO: 293 - protein, 178 aa, Thermococcus kodakaraensis KOD1
  misc_feature (414542)..(414542): n is a or c or g or t.
  misc_feature (786890)..(786890): n is a or c or g or t.
  misc_feature (786907)..(786907): n is a or c or g or t.
  misc_feature (786944)..(786946): n is a or c or g or t.
  misc_feature (839139)..(839139): n is a or c or g or t.
  misc_feature (1128488)..(1128488): n is a or c or g or t.
  misc_feature (1128499)..(1128499): n is a or c or g or t.
  misc_feature (1128505)..(1128506): n is a or c or g or t.
  misc_feature (1128517)..(1128518): n is a or c or g or t.
  misc_feature (1128539)..(1128540): n is a or c or g or t.
  misc_feature (1561400)..(1561400): n is a or c or g or t.
  misc_feature (1561477)..(1561477): n is a or c or g or t.
  misc_feature (1561545)..(1561545): n is a or c or g or t.
  misc_feature (1767941)..(1767941): n is a or c or g or t.
MSASGNPMKNLPPFPTPEASEVIAESYSAIDQLLYSGDVPELGKNVLVNFGNAHSITLVGTAFLVLAAALEKRRKTMVGLNDAAVLSYTSAGGAGLPLLTKPMLRRVTVVASEYALDSLLNLAGPVLLLYHDPDVQSFVYETSGVPPGPSRKHVHKGEGAFIYRTPETVNVEWGRMPL

SEQ ID NO: 294 - protein, 386 aa, Thermococcus kodakaraensis KOD1
  misc_feature (414542)..(414542): n is a or c or g or t.
  misc_feature (786890)..(786890): n is a or c or g or t.
  misc_feature (786907)..(786907): n is a or c or g or t.
  misc_feature (786944)..(786946): n is a or c or g or t.
  misc_feature (839139)..(839139): n is a or c or g or t.
  misc_feature (1128488)..(1128488): n is a or c or g or t.
  misc_feature (1128499)..(1128499): n is a or c or g or t.
  misc_feature (1128505)..(1128506): n is a or c or g or t.
  misc_feature (1128517)..(1128518): n is a or c or g or t.
  misc_feature (1128539)..(1128540): n is a or c or g or t.
  misc_feature (1561400)..(1561400): n is a or c or g or t.
  misc_feature (1561477)..(1561477): n is a or c or g or t.
  misc_feature (1561545)..(1561545): n is a or c or g or t.
  misc_feature (1767941)..(1767941): n is a or c or g or t.
MRTYLSFSRDAYLVVIYSFFGWLGGNIAWFIVPFYFKSLGMDYSSMGVLFSLSTIAQAALLLFTGPLAVKIGYKRSIILALIFFMSGRLVQVFLPEFHFLAIASVLLGIGMALEGPALMSLLSEEASDENRHYLFSMNSAMGTFGAAFGTLLGGFLPGVLDGKNPYRDTLVVSIVFVLIQLVVISLVHPILDRKGREIKFERETVVKILKFSLPSALIGLGAGVTIPYMGLWFNRKFGTSLESIGGLFAIQQFIMGLGTFLLPALADRAGSVRTIVAFNGSATLLIAGMPFLPSFPLAALVYIIRTILMNIVNPIWDAFMMRFFSTEERSTALALRNLSWTATFGMGQYIGGVIFDRSLTMPFLITGFLYGASMATFWALFSKEEE

SEQ ID NO: 295 - protein, 248 aa, Thermococcus kodakaraensis KOD1
  misc_feature (414542)..(414542): n is a or c or g or t.
  misc_feature (786890)..(786890): n is a or c or g or t.
  misc_feature (786907)..(786907): n is a or c or g or t.
  misc_feature (786944)..(786946): n is a or c or g or t.
  misc_feature (839139)..(839139): n is a or c or g or t.
  misc_feature (1128488)..(1128488): n is a or c or g or t.
  misc_feature (1128499)..(1128499): n is a or c or g or t.
  misc_feature (1128505)..(1128506): n is a or c or g or t.
  misc_feature (1128517)..(1128518): n is a or c or g or t.
  misc_feature (1128539)..(1128540): n is a or c or g or t.
  misc_feature (1561400)..(1561400): n is a or c or g or t.
  misc_feature (1561477)..(1561477): n is a or c or g or t.
  misc_feature (1561545)..(1561545): n is a or c or g or t.
  misc_feature (1767941)..(1767941): n is a or c or g or t.
MTAVEARNLHYSYNGTEVLKGINLKIEDGEFVAILGPNGAGKSTLLKCLSGILRCNGVYISGRPIGEYSRNELARLVAYIPQRTEPGFMTVFDTVLLGRRPYMGLRPSKRDVEVVKNALKKLGIDHLALRPTRGLSGGELQKVGIARALAQEPEIFMFDEPTNNLDIRSQLEVMKLARELSSGGKTVIMVMHEINLAIRFAERFVFISEGRVVADGGREILKPSLFREVYGTEVEIGEVHGIPVVVPL

SEQ ID NO: 296 - protein, 322 aa, Thermococcus kodakaraensis KOD1
  misc_feature (414542)..(414542): n is a or c or g or t.
  misc_feature (786890)..(786890): n is a or c or g or t.
  misc_feature (786907)..(786907): n is a or c or g or t.
  misc_feature (786944)..(786946): n is a or c or g or t.
  misc_feature (839139)..(839139): n is a or c or g or t.
  misc_feature (1128488)..(1128488): n is a or c or g or t.
  misc_feature (1128499)..(1128499): n is a or c or g or t.
  misc_feature (1128505)..(1128506): n is a or c or g or t.
  misc_feature (1128517)..(1128518): n is a or c or g or t.
  misc_feature (1128539)..(1128540): n is a or c or g or t.
  misc_feature (1561400)..(1561400): n is a or c or g or t.
  misc_feature (1561477)..(1561477): n is a or c or g or t.
  misc_feature (1561545)..(1561545): n is a or c or g or t.
  misc_feature (1767941)..(1767941): n is a or c or g or t.
MKAVEVNNLRKSYPKKIPLPFRKVEWVEAVKGISFEVKRGELFGLLGPNGAGKTTTIKMLTTLLEPSGGSAKILGLDLIRDAREIRKRINLVAEGERTLYWRLSAYENLKYFARIYYVPKSEMEKRIEELLKLVGLWERRNDLVMSYSRGMKQRLAIAKALINDPEVLFLDEPTLGLDVQSALFVRDFVKRLVKEEGKTVLLTTHYMVEAEELCDRIAIIDHGRIIALDTPEGLKKLVKDEETVEIAVREFNPALLEKSPWKLAVVQSTEERTVLRGSVDEEDLPKLVEWLVKNQVKVVSVERKEPTLEDVFIKLTGRGLRD

SEQ ID NO: 297 - protein, 272 aa, Thermococcus kodakaraensis KOD1
  misc_feature (414542)..(414542): n is a or c or g or t.
  misc_feature (786890)..(786890): n is a or c or g or t.
  misc_feature (786907)..(786907): n is a or c or g or t.
  misc_feature (786944)..(786946): n is a or c or g or t.
  misc_feature (839139)..(839139): n is a or c or g or t.
  misc_feature (1128488)..(1128488): n is a or c or g or t.
  misc_feature (1128499)..(1128499): n is a or c or g or t.
  misc_feature (1128505)..(1128506): n is a or c or g or t.
  misc_feature (1128517)..(1128518): n is a or c or g or t.
  misc_feature (1128539)..(1128540): n is a or c or g or t.
  misc_feature (1561400)..(1561400): n is a or c or g or t.
  misc_feature (1561477)..(1561477): n is a or c or g or t.
  misc_feature (1561545)..(1561545): n is a or c or g or t.
  misc_feature (1767941)..(1767941): n is a or c or g or t.
MEVTELRALWGVAVKSWRVFLSYKVWFISDIGMGFLFVGQALLIGLGLTGKRNSEALQRLTGYSDYVAFAVLGLLVLGFGLTFLSGFVWSVVDELYAGTLEYSFAAPMKRITFFLGNVLVRLFLSLLYMAIYLPVFKLLFGLGIDLLVVLKALPVLLLGSLGMVGLGMAAAGIVLYLKDPGPFISILEMLVFALSGAMYPLSVLPRALQTLAKALPYAPTTEALRKVVVYGYGSSTGELWYLAVISLLYSVLGYLIYKWSEKQARIVGLKSY

SEQ ID NO: 298 - protein, 167 aa, Thermococcus kodakaraensis KOD1
  misc_feature (414542)..(414542): n is a or c or g or t.
  misc_feature (786890)..(786890): n is a or c or g or t.
  misc_feature (786907)..(786907): n is a or c or g or t.
  misc_feature (786944)..(786946): n is a or c or g or t.
  misc_feature (839139)..(839139): n is a or c or g or t.
  misc_feature (1128488)..(1128488): n is a or c or g or t.
  misc_feature (1128499)..(1128499): n is a or c or g or t.
  misc_feature (1128505)..(1128506): n is a or c or g or t.
  misc_feature (1128517)..(1128518): n is a or c or g or t.
  misc_feature (1128539)..(1128540): n is a or c or g or t.
  misc_feature (1561400)..(1561400): n is a or c or g or t.
  misc_feature (1561477)..(1561477): n is a or c or g or t.
  misc_feature (1561545)..(1561545): n is a or c or g or t.
  misc_feature (1767941)..(1767941): n is a or c or g or t.
MMLILEAYFKNYPARRKVAEFLFENGLSVKNGKIYIKNVEVPISELARAIGVNRKIIYHTIEYIEKTYPFKLVFERLNPLPSLIDVAPLMGWEVLEIDVEKDQYQMAFSDVLRLLAEDNTPIMEVFGRNLRGRNKQDLHSHRWNALNRDIWQNKDNQRLQEAHTPHT

SEQ ID NO: 299 - protein, 104 aa, Thermococcus kodakaraensis KOD1
  misc_feature (414542)..(414542): n is a or c or g or t.
  misc_feature (786890)..(786890): n is a or c or g or t.
  misc_feature (786907)..(786907): n is a or c or g or t.
  misc_feature (786944)..(786946): n is a or c or g or t.
  misc_feature (839139)..(839139): n is a or c or g or t.
  misc_feature (1128488)..(1128488): n is a or c or g or t.
  misc_feature (1128499)..(1128499): n is a or c or g or t.
  misc_feature (1128505)..(1128506): n is a or c or g or t.
  misc_feature (1128517)..(1128518): n is a or c or g or t.
  misc_feature (1128539)..(1128540): n is a or c or g or t.
  misc_feature (1561400)..(1561400): n is a or c or g or t.
  misc_feature (1561477)..(1561477): n is a or c or g or t.
  misc_feature (1561545)..(1561545): n is a or c or g or t.
  misc_feature (1767941)..(1767941): n is a or c or g or t.
MEAIIVYTTFPDWESARKVTRELLERKLIVCANLREHEAMYWWEGKIEEGKEVGAIYKTEVSKWKELRETIKELHPYDVPMIARIDLDKLNREYSEWMARVLFG

SEQ ID NO: 300 - protein, 275 aa, Thermococcus kodakaraensis KOD1
  misc_feature (414542)..(414542): n is a or c or g or t.
  misc_feature (786890)..(786890): n is a or c or g or t.
  misc_feature (786907)..(786907): n is a or c or g or t.
  misc_feature (786944)..(786946): n is a or c or g or t.
  misc_feature (839139)..(839139): n is a or c or g or t.
  misc_feature (1128488)..(1128488): n is a or c or g or t.
  misc_feature (1128499)..(1128499): n is a or c or g or t.
  misc_feature (1128505)..(1128506): n is a or c or g or t.
  misc_feature (1128517)..(1128518): n is a or c or g or t.
  misc_feature (1128539)..(1128540): n is a or c or g or t.
  misc_feature (1561400)..(1561400): n is a or c or g or t.
  misc_feature (1561477)..(1561477): n is a or c or g or t.
  misc_feature (1561545)..(1561545): n is a or c or g or t.
  misc_feature (1767941)..(1767941): n is a or c or g or t.
MSKKHAVLAVILWSTVASAFKLSLRHLTPLQLLFYASLTSLLVFGLLHSREFSLDRRDLRSVYLGLINPFLYYLVLFSAYDRLPAQEAQALNYTWPLMLVLLSIPLLGRRPEPRTVLGLLVGFAGALVIATKGELTSLTFSDPLGVALGLGSAVIWASYWLLNLRDERPLVEKMFWNFLFGFAYVSTLVLVSGEFQLPPLEGLAGAVYVGLFEMGVTFLLWYRAVEGDMAFASSIAYLVPFLSLFFISLIVGEKIAFSTILGLVLIVTGIVIGKK

SEQ ID NO: 301 - protein, 357 aa, Thermococcus kodakaraensis KOD1
  misc_feature (414542)..(414542): n is a or c or g or t.
  misc_feature (786890)..(786890): n is a or c or g or t.
  misc_feature (786907)..(786907): n is a or c or g or t.
  misc_feature (786944)..(786946): n is a or c or g or t.
  misc_feature (839139)..(839139): n is a or c or g or t.
  misc_feature (1128488)..(1128488): n is a or c or g or t.
  misc_feature (1128499)..(1128499): n is a or c or g or t.
  misc_feature (1128505)..(1128506): n is a or c or g or t.
  misc_feature (1128517)..(1128518): n is a or c or g or t.
  misc_feature (1128539)..(1128540): n is a or c or g or t.
  misc_feature (1561400)..(1561400): n is a or c or g or t.
  misc_feature (1561477)..(1561477): n is a or c or g or t.
  misc_feature (1561545)..(1561545): n is a or c or g or t.
  misc_feature (1767941)..(1767941): n is a or c or g or t.
MMSIDDILALAERGQFDEAIQRVPELYDPVEQIRALTKIALIMAEKGLGEWVWDVIEDAEYIAENSKESYVKSLGYALIGAALFKLGDQDGAEEYLDMALEEASGIEDPLEKGEVVAEIARSVAMTGDLDGAMELFDEAFDLIARAEIDYRTKVDELIKIGEIIEKTGDDLPSRTAREFYRIAFDIFDKLRVNQRAAIVEKKLLLTKTVENVGLPEIRKALLEGRYHYALALIRRKFKGVKVLMGQLEVALWMKMVNDPEYIDLTNQTLSELQNTEVLPSNAYSIALILTELEYLREALYFVRLIDDQVKRDEALRKIALAFSEQGEFEAARKVAGAISDPILRTQTLRDIEAIEIG

SEQ ID NO: 302 - protein, 206 aa, Thermococcus kodakaraensis KOD1
  misc_feature (414542)..(414542): n is a or c or g or t.
  misc_feature (786890)..(786890): n is a or c or g or t.
  misc_feature (786907)..(786907): n is a or c or g or t.
  misc_feature (786944)..(786946): n is a or c or g or t.
  misc_feature (839139)..(839139): n is a or c or g or t.
  misc_feature (1128488)..(1128488): n is a or c or g or t.
  misc_feature (1128499)..(1128499): n is a or c or g or t.
  misc_feature (1128505)..(1128506): n is a or c or g or t.
  misc_feature (1128517)..(1128518): n is a or c or g or t.
  misc_feature (1128539)..(1128540): n is a or c or g or t.
  misc_feature (1561400)..(1561400): n is a or c or g or t.
  misc_feature (1561477)..(1561477): n is a or c or g or t.
  misc_feature (1561545)..(1561545): n is a or c or g or t.
  misc_feature (1767941)..(1767941): n is a or c or g or t.
VKALKFGEYLETLRPGESVLVEHTSISPYPVLFYEIGKNSGWDNILVIDIIDSALPVLRWLKFAGLDVPEKSIARIKAGGTSEWGRIVIDVDPHKDPGIFMSKFLSNLLSYYRANKNVTTIIMNPERIIPLQDNRPSFVLYLANAAAGFLGNPHRKTFYFVNYELAHKGYLALLEEAFTRVLRIEDSSVRILKSLNLDEEGTTLQL

SEQ ID NO: 303 - protein, 108 aa, Thermococcus kodakaraensis KOD1
  misc_feature (414542)..(414542): n is a or c or g or t.
  misc_feature (786890)..(786890): n is a or c or g or t.
  misc_feature (786907)..(786907): n is a or c or g or t.
  misc_feature (786944)..(786946): n is a or c or g or t.
  misc_feature (839139)..(839139): n is a or c or g or t.
  misc_feature (1128488)..(1128488): n is a or c or g or t.
  misc_feature (1128499)..(1128499): n is a or c or g or t.
  misc_feature (1128505)..(1128506): n is a or c or g or t.
  misc_feature (1128517)..(1128518): n is a or c or g or t.
  misc_feature (1128539)..(1128540): n is a or c or g or t.
  misc_feature (1561400)..(1561400): n is a or c or g or t.
  misc_feature (1561477)..(1561477): n is a or c or g or t.
  misc_feature (1561545)..(1561545): n is a or c or g or t.
  misc_feature (1767941)..(1767941): n is a or c or g or t.
MRETTAVGIILALGVGISLVTRNYLGIAFAALGIPAYLAYTAREQNILAKSRLYDRDLFLMIVISAAVILAFNYFFDPRAGLIILALAVPLIALYADRLKTRKKAQEA

SEQ ID NO: 304 - protein, 351 aa, Thermococcus kodakaraensis KOD1
  misc_feature (414542)..(414542): n is a or c or g or t.
  misc_feature (786890)..(786890): n is a or c or g or t.
  misc_feature (786907)..(786907): n is a or c or g or t.
  misc_feature (786944)..(786946): n is a or c or g or t.
  misc_feature (839139)..(839139): n is a or c or g or t.
  misc_feature (1128488)..(1128488): n is a or c or g or t.
  misc_feature (1128499)..(1128499): n is a or c or g or t.
  misc_feature (1128505)..(1128506): n is a or c or g or t.
  misc_feature (1128517)..(1128518): n is a or c or g or t.
  misc_feature (1128539)..(1128540): n is a or c or g or t.
  misc_feature (1561400)..(1561400): n is a or c or g or t.
  misc_feature (1561477)..(1561477): n is a or c or g or t.
  misc_feature (1561545)..(1561545): n is a or c or g or t.
  misc_feature (1767941)..(1767941): n is a or c or g or t.
MEGIRFAFLCREKPEPTGKKVAVIGAGPAGLAATGYLVCQGHEVHVYDKLPEPGGLMLFGIPEFRIPIYRVREGYKELEKVYNVKFFTRTKVCFGNPKESGDEFVERRIEFEEILKNYDAVLIATGTWNAYVPTIPGSDLEGVYPALEYLFRIKSAKLGHMDWSEVPPVEGRKVLVVGAGHSAVDAALESINLGAEKVYMSYRRTIREAPAGAYEINLLQQRGVKWLERTMPVRIIGENGRVRAVELVKTELSEPDETGRRRPIPIEGSNFQIEVDYMVCAVGQMPTPPFSKEMGIALDRKGRIVVDSRHMTSREGVFAAGDVVLGPSKVGRAVKDGLYAAESIHLWLMGR

SEQ ID NO: 305 - protein, 166 aa, Thermococcus kodakaraensis KOD1
  misc_feature (414542)..(414542): n is a or c or g or t.
  misc_feature (786890)..(786890): n is a or c or g or t.
  misc_feature (786907)..(786907): n is a or c or g or t.
  misc_feature (786944)..(786946): n is a or c or g or t.
  misc_feature (839139)..(839139): n is a or c or g or t.
  misc_feature (1128488)..(1128488): n is a or c or g or t.
  misc_feature (1128499)..(1128499): n is a or c or g or t.
  misc_feature (1128505)..(1128506): n is a or c or g or t.
  misc_feature (1128517)..(1128518): n is a or c or g or t.
  misc_feature (1128539)..(1128540): n is a or c or g or t.
  misc_feature (1561400)..(1561400): n is a or c or g or t.
  misc_feature (1561477)..(1561477): n is a or c or g or t.
  misc_feature (1561545)..(1561545): n is a or c or g or t.
  misc_feature (1767941)..(1767941): n is a or c or g or t.
MARKTVFIDFSKCIECRACEVACEREHNGRSFINVFEWQEMAAMALNCRHCEKAPCLEVCPTNALYRDGDGAVLLAPQKCIGCLMCGIVCPFGIPELDSLDKIMMKCDLCAHRRAEGKLPACVETCPTDALLFGDFNDIQRMRRQKFTEKAIEIAKSGERIQFRGV

SEQ ID NO: 306 - protein, 123 aa, Thermococcus kodakaraensis KOD1
  misc_feature (414542)..(414542): n is a or c or g or t.
  misc_feature (786890)..(786890): n is a or c or g or t.
  misc_feature (786907)..(786907): n is a or c or g or t.
  misc_feature (786944)..(786946): n is a or c or g or t.
  misc_feature (839139)..(839139): n is a or c or g or t.
  misc_feature (1128488)..(1128488): n is a or c or g or t.
  misc_feature (1128499)..(1128499): n is a or c or g or t.
  misc_feature (1128505)..(1128506): n is a or c or g or t.
  misc_feature (1128517)..(1128518): n is a or c or g or t.
  misc_feature (1128539)..(1128540): n is a or c or g or t.
  misc_feature (1561400)..(1561400): n is a or c or g or t.
  misc_feature (1561477)..(1561477): n is a or c or g or t.
  misc_feature (1561545)..(1561545): n is a or c or g or t.
  misc_feature (1767941)..(1767941): n is a or c or g or t.
MNYVEVLIYVFLGISVTFNLLGSFALLRFPDVYTRLHGATKCTTFGTIFAVFAVVTHALYQLHRTGDSKYLQMALHSFIALIALLLTNPTGAHAIAKAAHLSGVKPVRAVVDAYEEKLGGGSE

SEQ ID NO: 307 - protein, 149 aa, Thermococcus kodakaraensis KOD1
  misc_feature (414542)..(414542): n is a or c or g or t.
  misc_feature (786890)..(786890): n is a or c or g or t.
  misc_feature (786907)..(786907): n is a or c or g or t.
  misc_feature (786944)..(786946): n is a or c or g or t.
  misc_feature (839139)..(839139): n is a or c or g or t.
  misc_feature (1128488)..(1128488): n is a or c or g or t.
  misc_feature (1128499)..(1128499): n is a or c or g or t.
  misc_feature (1128505)..(1128506): n is a or c or g or t.
  misc_feature (1128517)..(1128518): n is a or c or g or t.
  misc_feature (1128539)..(1128540): n is a or c or g or t.
  misc_feature (1561400)..(1561400): n is a or c or g or t.
  misc_feature (1561477)..(1561477): n is a or c or g or t.
  misc_feature (1561545)..(1561545): n is a or c or g or t.
  misc_feature (1767941)..(1767941): n is a or c or g or t.
MNDSDMGVIVRTAARATIPLIGIFGAYVVMHGHLTPGGGFQGGATIAGAGILFLIAFGLGEMKKRYNKHLYSALEGLGGLVFLGAAMLGIGTAFFYNTLWHNGPFFNGKPGTLLSAGFLPIMNLAVGLKVFTGLVSALTAIALWRRWKS

SEQ ID NO: 308 - protein, 176 aa, Thermococcus kodakaraensis KOD1
  misc_feature (414542)..(414542): n is a or c or g or t.
  misc_feature (786890)..(786890): n is a or c or g or t.
  misc_feature (786907)..(786907): n is a or c or g or t.
  misc_feature (786944)..(786946): n is a or c or g or t.
  misc_feature (839139)..(839139): n is a or c or g or t.
  misc_feature (1128488)..(1128488): n is a or c or g or t.
  misc_feature (1128499)..(1128499): n is a or c or g or t.
  misc_feature (1128505)..(1128506): n is a or c or g or t.
  misc_feature (1128517)..(1128518): n is a or c or g or t.
  misc_feature (1128539)..(1128540): n is a or c or g or t.
  misc_feature (1561400)..(1561400): n is a or c or g or t.
  misc_feature (1561477)..(1561477): n is a or c or g or t.
  misc_feature (1561545)..(1561545): n is a or c or g or t.
  misc_feature (1767941)..(1767941): n is a or c or g or t.
MAITVPANQNGQKSNPSERERLEKRIAQLCRFLGKSPWVFHVNSGSCNGCDIEIIAALTPRYDAERFGVKLVGSPRHADILVVTGPVTNQSLERVKLVYEQTPDPKIVIAVGACPTGGSVFYESPFTNAPLDRVIPVDVYVPGCPPRPEAILHGVVLALEKLARMIKGEVPEEVGE

SEQ ID NO: 309 - protein, 330 aa, Thermococcus kodakaraensis KOD1
  misc_feature (414542)..(414542): n is a or c or g or t.
  misc_feature (786890)..(786890): n is a or c or g or t.
  misc_feature (786907)..(786907): n is a or c or g or t.
  misc_feature (786944)..(786946): n is a or c or g or t.
  misc_feature (839139)..(839139): n is a or c or g or t.
  misc_feature (1128488)..(1128488): n is a or c or g or t.
  misc_feature (1128499)..(1128499): n is a or c or g or t.
  misc_feature (1128505)..(1128506): n is a or c or g or t.
  misc_feature (1128517)..(1128518): n is a or c or g or t.
  misc_feature (1128539)..(1128540): n is a or c or g or t.
  misc_feature (1561400)..(1561400): n is a or c or g or t.
  misc_feature (1561477)..(1561477): n is a or c or g or t.
  misc_feature (1561545)..(1561545): n is a or c or g or t.
  misc_feature (1767941)..(1767941): n is a or c or g or t.
MFSLGGFSRGGEYEKKTWDVLIIGAGPAGFTAAIYAARYGLETLIISKDLGGNMALTDLIENYPGFPEGISGSELTNRMHEQVKKLGVDVIFDEVVRIDPAECAYYEGPCKFTVKTANGKEYKARTIIIAVGAAPRKLRVPGEEELTGKGVSYCATCDGPLFKGKKVIVVGGGNTALQEALYLKSIGVDVTLVHRRQQFRADKILQDRFKESGIPAILDTVVTEIIGKDKVEAVRLKNVKTGEETVMEVDGVFIFIGYEPKTDFVKHLGITDEYGYIPVDMYMRTKVPGIFAAGDITNVFKQIAVAVGQGAIAANSAKEFLEEWKNKNSE

SEQ ID NO: 310 - protein, 199 aa, Thermococcus kodakaraensis KOD1
  misc_feature (414542)..(414542): n is a or c or g or t.
  misc_feature (786890)..(786890): n is a or c or g or t.
  misc_feature (786907)..(786907): n is a or c or g or t.
  misc_feature (786944)..(786946): n is a or c or g or t.
  misc_feature (839139)..(839139): n is a or c or g or t.
  misc_feature (1128488)..(1128488): n is a or c or g or t.
  misc_feature (1128499)..(1128499): n is a or c or g or t.
  misc_feature (1128505)..(1128506): n is a or c or g or t.
  misc_feature (1128517)..(1128518): n is a or c or g or t.
  misc_feature (1128539)..(1128540): n is a or c or g or t.
  misc_feature (1561400)..(1561400): n is a or c or g or t.
  misc_feature (1561477)..(1561477): n is a or c or g or t.
  misc_feature (1561545)..(1561545): n is a or c or g or t.
  misc_feature (1767941)..(1767941): n is a or c or g or t.
MTDIISELAHYTPYVFLVAIVVFLAYIWVNREKFKSVNTIAIAGIAAALVAVATNVIKVPTPATGGYINLGDTMVMFTAMLFGPVIGAFAGGVGSALGDVMGGYPGWAPITLVVKGIEGLVVGYVAKRMQGNSGLIVGGTIGGLLMVTGYFLFEAYAFGVPAALEEVPGNLLQAVTGIIVGTLLTNAIKKRYPEVEALI

SEQ ID NO: 311 - protein, 1130 aa, Thermococcus kodakaraensis KOD1
  misc_feature (414542)..(414542): n is a or c or g or t.
  misc_feature (786890)..(786890): n is a or c or g or t.
  misc_feature (786907)..(786907): n is a or c or g or t.
  misc_feature (786944)..(786946): n is a or c or g or t.
  misc_feature (839139)..(839139): n is a or c or g or t.
  misc_feature (1128488)..(1128488): n is a or c or g or t.
  misc_feature (1128499)..(1128499): n is a or c or g or t.
  misc_feature (1128505)..(1128506): n is a or c or g or t.
  misc_feature (1128517)..(1128518): n is a or c or g or t.
  misc_feature (1128539)..(1128540): n is a or c or g or t.
  misc_feature (1561400)..(1561400): n is a or c or g or t.
  misc_feature (1561477)..(1561477): n is a or c or g or t.
  misc_feature (1561545)..(1561545): n is a or c or g or t.
  misc_feature (1767941)..(1767941): n is a or c or g or t.
VVAMAWNDWIAKHPKIVLAAWIVIIVLMAPLAGKLSELTDYSTEQMVSHEIESIKVQDLMAQEFTGAQNDNLTYLLITNINVNDENARKAYYSFKDRVEGKYASNVTSYYDALDMLWEMDYELTLNVTRMTANITGLLYTSVKGAHDGYGMALNQVLLLKNTTDMVKTSLVGTARGYVALKNNLTSLYTQLNATAGLLQMADGIYVQLCAQNPNMTAQERAQALQNELMVKVPESQQAIVPAVVQAVVSADPYCTGTLLSDEGLLENTTVELVYGMITNAGAPLPFEIPKEVLFQLYESGGSETVIDTMAGNMLRAQIAEQMGGLAPNPEALAEVILSEVVKDPYGIISGEKLEDATVSVVLALSPQKTEDTEKLVRALYNGADPKELARELFLKGMQEQMAGQEIPEEFAGVMNNLIEQVIQNYPMSEEELEKLVKDAVKSMVSEYAKNNPYGVEFNFDQDLLVDIAFKFKDNPQAISKDDVKPLAEQLWPIVKEKAGTYLSMLKSDDNTTLLITFIPFGRPGPSGDEFRYLAQNATEVKKVALEEFGKYFPEVKGALGGTPVQMHEMTKYGQEDNQKTSQASIIGALIVLFILMGGALLATFLPFTGVATSALTALGIAYLLAKGGILNVGSWAQMLTITTALGLGIDYSTYYVHRFKEYIAEGYDHEKAVAEALRRAKDAVLASAFTDIIAFASFVLAWEFPIFQQIGIIAPLAVVTVLVASLTFIPAITALIGDKSWFWWPRHIKHIETMDVHERSRIAEWVVKHAKVVLLIGLLIAVPATYTFFTFEGTHDISLFLPEGSETLTFMELSQEKLGASITSPNYVIIDIGHKITDDDLKLIDEITAHIAGMEGVKAVYSPTRPYGEPVSNLTLSAIKALGGDRFISKGGTMVMIQIDPVYAPTDEKAKELVEGLRSYMAELEKEGKIREGLVGGGAALSMDLTDRINDIFWHRIIPVALVLMFLSLIPTLKGLPAVVSTMITIFMGVMTSIWVSTWLFGKVFNQEVMWFLPLMVFVVLMGVGIDYNSFYLVKARDEFERRKPEEALIVAAGTMDMLVIGLAVVLASTYGALMLSSTWGTREMGFALSAGILLTAVMAVYFIGPAFMSLFGEKAWWPLFKSQKGAKKE

SEQ ID NO: 312 - protein, 15 aa, Thermococcus kodakaraensis KOD1
  misc_feature (414542)..(414542): n is a or c or g or t.
  misc_feature (786890)..(786890): n is a or c or g or t.
  misc_feature (786907)..(786907): n is a or c or g or t.
  misc_feature (786944)..(786946): n is a or c or g or t.
  misc_feature (839139)..(839139): n is a or c or g or t.
  misc_feature (1128488)..(1128488): n is a or c or g or t.
  misc_feature (1128499)..(1128499): n is a or c or g or t.
  misc_feature (1128505)..(1128506): n is a or c or g or t.
  misc_feature (1128517)..(1128518): n is a or c or g or t.
  misc_feature (1128539)..(1128540): n is a or c or g or t.
  misc_feature (1561400)..(1561400): n is a or c or g or t.
  misc_feature (1561477)..(1561477): n is a or c or g or t.
  misc_feature (1561545)..(1561545): n is a or c or g or t.
  misc_feature (1767941)..(1767941): n is a or c or g or t.
MAEPKKKLKIYIPRN

SEQ ID NO: 313 - protein, 306 aa, Thermococcus kodakaraensis KOD1
  misc_feature (414542)..(414542): n is a or c or g or t.
  misc_feature (786890)..(786890): n is a or c or g or t.
  misc_feature (786907)..(786907): n is a or c or g or t.
  misc_feature (786944)..(786946): n is a or c or g or t.
  misc_feature (839139)..(839139): n is a or c or g or t.
  misc_feature (1128488)..(1128488): n is a or c or g or t.
  misc_feature (1128499)..(1128499): n is a or c or g or t.
  misc_feature (1128505)..(1128506): n is a or c or g or t.
  misc_feature (1128517)..(1128518): n is a or c or g or t.
  misc_feature (1128539)..(1128540): n is a or c or g or t.
  misc_feature (1561400)..(1561400): n is a or c or g or t.
  misc_feature (1561477)..(1561477): n is a or c or g or t.
  misc_feature (1561545)..(1561545): n is a or c or g or t.
  misc_feature (1767941)..(1767941): n is a or c or g or t.
MGEVKLEEIEFLVELLSKYPLESLRSIAREEGLDYYKLKRIYDKYYGKYLTVSARYNIRIIGLKSFVAFLAVSPESLLETAIQLTKNPFIKYVNPAFGFKNGLSLYFQVPHDQVDLIDEMLGKYSDDFEYYEVRAYTKGELPDEWGDWDLGYEYAILMDILKWDARTPITEIAEKLGKSRPTVRYMINRLKEKGILINFVPLPDMNVSDRGIIGIAKELDEEVLKRFNDYEITVGVLPGEGYILEWFFSSKEDMGSKILEFSRYVEKILVEYFDPTFKELNDRNSRMAFQRMVKKDGSGYRSILEF

SEQ ID NO: 314 - protein, 343 aa, Thermococcus kodakaraensis KOD1
  misc_feature (414542)..(414542): n is a or c or g or t.
  misc_feature (786890)..(786890): n is a or c or g or t.
  misc_feature (786907)..(786907): n is a or c or g or t.
  misc_feature (786944)..(786946): n is a or c or g or t.
  misc_feature (839139)..(839139): n is a or c or g or t.
  misc_feature (1128488)..(1128488): n is a or c or g or t.
  misc_feature (1128499)..(1128499): n is a or c or g or t.
  misc_feature (1128505)..(1128506): n is a or c or g or t.
  misc_feature (1128517)..(1128518): n is a or c or g or t.
  misc_feature (1128539)..(1128540): n is a or c or g or t.
  misc_feature (1561400)..(1561400): n is a or c or g or t.
  misc_feature (1561477)..(1561477): n is a or c or g or t.
  misc_feature (1561545)..(1561545): n is a or c or g or t.
  misc_feature (1767941)..(1767941): n is a or c or g or t.
VRMDWKKVSLFGVAMGIIAALLWWAGVDEVIAILKGARIKYLVLAFFVYILGLLAWAMRWKVLIDALNMDAPFSKVLMALMAGIFVNNATPGARGGGEPVRTYFLAKEIEMPYGPVFATVMMDRILDLIPVVGMLAVATAYVYSLGSRSLAIILIFLDVVFFGLVAFTLGILLSERKTKGALRWFFRLVERFLPLVAEKYREKFERVVEVDVPRFQNDFRFLMTHKRAFLLATVYSTLSWLTVVVRGYYAFLAIGYSIKFADVVVVQMVGMVVGMLSVIPGGAGLIETVNSATYVLLGIEKEHAVTATLLDRLISYWIPTAVGALATTHLGAKIRRKKKGLIR

SEQ ID NO: 315 - protein, 234 aa, Thermococcus kodakaraensis KOD1
  misc_feature (414542)..(414542): n is a or c or g or t.
  misc_feature (786890)..(786890): n is a or c or g or t.
  misc_feature (786907)..(786907): n is a or c or g or t.
  misc_feature (786944)..(786946): n is a or c or g or t.
  misc_feature (839139)..(839139): n is a or c or g or t.
  misc_feature (1128488)..(1128488): n is a or c or g or t.
  misc_feature (1128499)..(1128499): n is a or c or g or t.
  misc_feature (1128505)..(1128506): n is a or c or g or t.
  misc_feature (1128517)..(1128518): n is a or c or g or t.
  misc_feature (1128539)..(1128540): n is a or c or g or t.
  misc_feature (1561400)..(1561400): n is a or c or g or t.
  misc_feature (1561477)..(1561477): n is a or c or g or t.
  misc_feature (1561545)..(1561545): n is a or c or g or t.
  misc_feature (1767941)..(1767941): n is a or c or g or t.
VITLTVIPMAKLKEPIIAINFKTYIEATGKRALEIAKAAERVWKETGITIVVAPQLADLRMIAESVEIPVFAQHIDPIKPGSHTGHVLPEAVKEVGAVGTLLNHSENRMILADLEAAIRRAEEVGLMTMVCSNNPAVSAAVAALGPDYVAVEPPELIGTGIPVSKAKPEVVTNTVELVKKVNPDVGVLTGAGISTGEDVKKALELGSVGVLLASGVTKAKDPENAIRDLVSLII

SEQ ID NO: 316 - protein, 83 aa, Thermococcus kodakaraensis KOD1
  misc_feature (414542)..(414542): n is a or c or g or t.
  misc_feature (786890)..(786890): n is a or c or g or t.
  misc_feature (786907)..(786907): n is a or c or g or t.
  misc_feature (786944)..(786946): n is a or c or g or t.
  misc_feature (839139)..(839139): n is a or c or g or t.
  misc_feature (1128488)..(1128488): n is a or c or g or t.
  misc_feature (1128499)..(1128499): n is a or c or g or t.
  misc_feature (1128505)..(1128506): n is a or c or g or t.
  misc_feature (1128517)..(1128518): n is a or c or g or t.
  misc_feature (1128539)..(1128540): n is a or c or g or t.
  misc_feature (1561400)..(1561400): n is a or c or g or t.
  misc_feature (1561477)..(1561477): n is a or c or g or t.
  misc_feature (1561545)..(1561545): n is a or c or g or t.
  misc_feature (1767941)..(1767941): n is a or c or g or t.
MSELIQQIVQVLKEQVVQDTVVPRNIRRAAEQAIEVLLDESRDPAVRAADAIAILEEISEDPNMPMHTRTIIWEVLGALEQVK

SEQ ID NO: 317 - protein, 276 aa, Thermococcus kodakaraensis KOD1
  misc_feature (414542)..(414542): n is a or c or g or t.
  misc_feature (786890)..(786890): n is a or c or g or t.
  misc_feature (786907)..(786907): n is a or c or g or t.
  misc_feature (786944)..(786946): n is a or c or g or t.
  misc_feature (839139)..(839139): n is a or c or g or t.
  misc_feature (1128488)..(1128488): n is a or c or g or t.
  misc_feature (1128499)..(1128499): n is a or c or g or t.
  misc_feature (1128505)..(1128506): n is a or c or g or t.
  misc_feature (1128517)..(1128518): n is a or c or g or t.
  misc_feature (1128539)..(1128540): n is a or c or g or t.
  misc_feature (1561400)..(1561400): n is a or c or g or t.
  misc_feature (1561477)..(1561477): n is a or c or g or t.
  misc_feature (1561545)..(1561545): n is a or c or g or t.
  misc_feature (1767941)..(1767941): n is a or c or g or t.
MVAVVVTGRGGAGKTTMSANLSTYFSLNGYKTLVIDGDLYLPKLAFHFGIYNPVTNLHTLLSTPDARLKDAIYHDVKTGVDVLPGSSKLFDILTMDEKRLRDIVRDAAENYDVTFIDSPVGIPFDTISTFRLAQYQLIIVELGRCPVHSFRKMVENEVDKLKALGEAYGLKVGVILNKVREEKPIVDDIVEYLEESVGVPVVGIVSFDPAVPASQNRGIPVVVNVPHSHAARDIRMAGDVLREWIFGVEMKRSLLDSFLDTLRSLFLRLFPSGKKL

SEQ ID NO: 318 - protein, 115 aa, Thermococcus kodakaraensis KOD1
  misc_feature (414542)..(414542): n is a or c or g or t.
  misc_feature (786890)..(786890): n is a or c or g or t.
  misc_feature (786907)..(786907): n is a or c or g or t.
  misc_feature (786944)..(786946): n is a or c or g or t.
  misc_feature (839139)..(839139): n is a or c or g or t.
  misc_feature (1128488)..(1128488): n is a or c or g or t.
  misc_feature (1128499)..(1128499): n is a or c or g or t.
  misc_feature (1128505)..(1128506): n is a or c or g or t.
  misc_feature (1128517)..(1128518): n is a or c or g or t.
  misc_feature (1128539)..(1128540): n is a or c or g or t.
  misc_feature (1561400)..(1561400): n is a or c or g or t.
  misc_feature (1561477)..(1561477): n is a or c or g or t.
  misc_feature (1561545)..(1561545): n is a or c or g or t.
  misc_feature (1767941)..(1767941): n is a or c or g or t.
MNAYRGLAIIFGFYALGEFTSSAFNLPIPGSVLGMLFLLAALTAGIVRLEWVENEAELFVKNMSVMFIPPGVGIILYISLLKSQLIPVVGAIVVSFLVTLITTAKVVELLRREGR

SEQ ID NO: 319 - protein, 244 aa, Thermococcus kodakaraensis KOD1
  misc_feature (414542)..(414542): n is a or c or g or t.
  misc_feature (786890)..(786890): n is a or c or g or t.
  misc_feature (786907)..(786907): n is a or c or g or t.
  misc_feature (786944)..(786946): n is a or c or g or t.
  misc_feature (839139)..(839139): n is a or c or g or t.
  misc_feature (1128488)..(1128488): n is a or c or g or t.
  misc_feature (1128499)..(1128499): n is a or c or g or t.
  misc_feature (1128505)..(1128506): n is a or c or g or t.
  misc_feature (1128517)..(1128518): n is a or c or g or t.
  misc_feature (1128539)..(1128540): n is a or c or g or t.
  misc_feature (1561400)..(1561400): n is a or c or g or t.
  misc_feature (1561477)..(1561477): n is a or c or g or t.
  misc_feature (1561545)..(1561545): n is a or c or g or t.
  misc_feature (1767941)..(1767941): n is a or c or g or t.
VRQDFVSFPSTKFSNRPNGRVFKSPAESPSVVSMPYLIIEHLEDISDWLWLEYSHVAQWWGDKLIFTNVREDERERLAKLGSVITESVTKFPFDRSKLIVLDLQAEEELKPEDIEEDTMIVVGGILGDAVPRGRTREFITSKMEGVKVRHIGKPQYSIDGASIVAKLIADGKRLEEIEYEEHPTIKLDEFSEITLHYAVPKLDGKLLLTPGLIDLQKRELGYTEADDEISDEELIEFFEGKREL

SEQ ID NO: 320 - protein, 90 aa, Thermococcus kodakaraensis KOD1
  misc_feature (414542)..(414542): n is a or c or g or t.
  misc_feature (786890)..(786890): n is a or c or g or t.
  misc_feature (786907)..(786907): n is a or c or g or t.
  misc_feature (786944)..(786946): n is a or c or g or t.
  misc_feature (839139)..(839139): n is a or c or g or t.
  misc_feature (1128488)..(1128488): n is a or c or g or t.
  misc_feature (1128499)..(1128499): n is a or c or g or t.
  misc_feature (1128505)..(1128506): n is a or c or g or t.
  misc_feature (1128517)..(1128518): n is a or c or g or t.
  misc_feature (1128539)..(1128540): n is a or c or g or t.
  misc_feature (1561400)..(1561400): n is a or c or g or t.
  misc_feature (1561477)..(1561477): n is a or c or g or t.
  misc_feature (1561545)..(1561545): n is a or c or g or t.
  misc_feature (1767941)..(1767941): n is a or c or g or t.
MEEVWILKEFEKVAQLMPKRAVSLIKQDRELFMEIVISAYIDGLISLGKAAEVLGVTREEVIEEFKRRGIPIRTPDRDDVASEVEAIECL

SEQ ID NO: 321 - protein, 372 aa, Thermococcus kodakaraensis KOD1
  misc_feature (414542)..(414542): n is a or c or g or t.
  misc_feature (786890)..(786890): n is a or c or g or t.
  misc_feature (786907)..(786907): n is a or c or g or t.
  misc_feature (786944)..(786946): n is a or c or g or t.
  misc_feature (839139)..(839139): n is a or c or g or t.
  misc_feature (1128488)..(1128488): n is a or c or g or t.
  misc_feature (1128499)..(1128499): n is a or c or g or t.
  misc_feature (1128505)..(1128506): n is a or c or g or t.
  misc_feature (1128517)..(1128518): n is a or c or g or t.
  misc_feature (1128539)..(1128540): n is a or c or g or t.
  misc_feature (1561400)..(1561400): n is a or c or g or t.
  misc_feature (1561477)..(1561477): n is a or c or g or t.
  misc_feature (1561545)..(1561545): n is a or c or g or t.
  misc_feature (1767941)..(1767941): n is a or c or g or t.
MDEFELLKRLVSIKSPFGEEHEISEFIASLLEENGIPVETVPVEGFGDDVVAYLKGKGPTVVLNGHMDTVHLSQGWTKNPWGELDGDRFYGLGSADMKGGLAALLSAFLELSELPKNERPNVIFTAVSDEEGFSRGSWELIKSGRLDKADLVLVGEPTNEKLMLGARGRFVIEVGAKGKKAHAARPYLGINAIEELAKLVSNLNRIRMKKHPKLGKGSYCTLYFSGSADGLSVPDEAIAIIDRHVVVGEDWEKVRGELYRLAERVGVRAELEIEKYRRPTPEMLPYVVKENNRFVRRFKEAYREVERKSVEITYGASVGDFNYFGTYLSKPTLVFGPIGGNWHSADEWVSVSSVRRVKGIYLRFLRALAGLR

SEQ ID NO: 322 - protein, 455 aa, Thermococcus kodakaraensis KOD1
  misc_feature (414542)..(414542): n is a or c or g or t.
  misc_feature (786890)..(786890): n is a or c or g or t.
  misc_feature (786907)..(786907): n is a or c or g or t.
  misc_feature (786944)..(786946): n is a or c or g or t.
  misc_feature (839139)..(839139): n is a or c or g or t.
  misc_feature (1128488)..(1128488): n is a or c or g or t.
  misc_feature (1128499)..(1128499): n is a or c or g or t.
  misc_feature (1128505)..(1128506): n is a or c or g or t.
  misc_feature (1128517)..(1128518): n is a or c or g or t.
  misc_feature (1128539)..(1128540): n is a or c or g or t.
  misc_feature (1561400)..(1561400): n is a or c or g or t.
  misc_feature (1561477)..(1561477): n is a or c or g or t.
  misc_feature (1561545)..(1561545): n is a or c or g or t.
  misc_feature (1767941)..(1767941): n is a or c or g or t.
MEVERLIRSAEELARKHGIGYYEIRISRVVMTEVSMSNGQLRGLSSNSETGIGARAFNGAWGFSSANDFERFEKAIETAMKIAKLSRGESKIYTGDPVVDDAEMPVKRPFSDINIEEKVALVKETDSMLTGERIVNRNVSYRDTVVETFYFNSLGSEIRTVVPRIRFGFSVTAKENGEMQQYWKSFGGTLGWEMVEGIDISHWTSLVVEKARALLKASSPPSGEFQVIADPELTGLFIHEALGHAVEADLVKNGDSILAGKLGQKIAVDGLTVVDDPTLPGKFGSYIYDDEGIRAKRVEIIRDGVLVNYLNDRETAQYFGLEPNGHGRAQSYAHQPLVRMGNTYVEAGDWSFEEMLEEVKYGLYMIGDKGGQVDTANGTFTFGAREGYIIENGELRKMVRDVALSGKILDVLKSIRAIGKDVRIEYPGYCGKGQSVPVDDGGPHLLTKALVGGLK

SEQ ID NO: 323 - protein, 222 aa, Thermococcus kodakaraensis KOD1
  misc_feature (414542)..(414542): n is a or c or g or t.
  misc_feature (786890)..(786890): n is a or c or g or t.
  misc_feature (786907)..(786907): n is a or c or g or t.
  misc_feature (786944)..(786946): n is a or c or g or t.
  misc_feature (839139)..(839139): n is a or c or g or t.
  misc_feature (1128488)..(1128488): n is a or c or g or t.
  misc_feature (1128499)..(1128499): n is a or c or g or t.
  misc_feature (1128505)..(1128506): n is a or c or g or t.
  misc_feature (1128517)..(1128518): n is a or c or g or t.
  misc_feature (1128539)..(1128540): n is a or c or g or t.
  misc_feature (1561400)..(1561400): n is a or c or g or t.
  misc_feature (1561477)..(1561477): n is a or c or g or t.
  misc_feature (1561545)..(1561545): n is a or c or g or t.
  misc_feature (1767941)..(1767941): n is a or c or g or t.
VVDVSVLNLREFLSAFYPGETVMIEYDTVSMPEVLFYLIYLNRENRPVLIDDVADTLCETLTKLEFMGFDVSGFNDVPVIKIGGGERNCGNVLGEVDVDRYSLDISYYGRIVEKASFNDVVLNPVLGVHKLFLALERRGALRLVKNIATFEGDKRRIAFYFINRDVVEMSYPELLPLLEEIASTVMNWSFEGEEFVLYVSKSANLNIMGKGISFTLDEISSL

SEQ ID NO: 324 - protein, 44 aa, Thermococcus kodakaraensis KOD1
  misc_feature (414542)..(414542): n is a or c or g or t.
  misc_feature (786890)..(786890): n is a or c or g or t.
  misc_feature (786907)..(786907): n is a or c or g or t.
  misc_feature (786944)..(786946): n is a or c or g or t.
  misc_feature (839139)..(839139): n is a or c or g or t.
  misc_feature (1128488)..(1128488): n is a or c or g or t.
  misc_feature (1128499)..(1128499): n is a or c or g or t.
  misc_feature (1128505)..(1128506): n is a or c or g or t.
  misc_feature (1128517)..(1128518): n is a or c or g or t.
  misc_feature (1128539)..(1128540): n is a or c or g or t.
  misc_feature (1561400)..(1561400): n is a or c or g or t.
  misc_feature (1561477)..(1561477): n is a or c or g or t.
  misc_feature (1561545)..(1561545): n is a or c or g or t.
  misc_feature (1767941)..(1767941): n is a or c or g or t.
MGWYFSEPHFESIHFIIFDTIVISAFYIKILIIKPKYVVSQFVP

SEQ ID NO: 325 - protein, 418 aa, Thermococcus kodakaraensis KOD1
  misc_feature (414542)..(414542): n is a or c or g or t.
  misc_feature (786890)..(786890): n is a or c or g or t.
  misc_feature (786907)..(786907): n is a or c or g or t.
  misc_feature (786944)..(786946): n is a or c or g or t.
  misc_feature (839139)..(839139): n is a or c or g or t.
  misc_feature (1128488)..(1128488): n is a or c or g or t.
  misc_feature (1128499)..(1128499): n is a or c or g or t.
  misc_feature (1128505)..(1128506): n is a or c or g or t.
  misc_feature (1128517)..(1128518): n is a or c or g or t.
  misc_feature (1128539)..(1128540): n is a or c or g or t.
  misc_feature (1561400)..(1561400): n is a or c or g or t.
  misc_feature (1561477)..(1561477): n is a or c or g or t.
  misc_feature (1561545)..(1561545): n is a or c or g or t.
  misc_feature (1767941)..(1767941): n is a or c or g or t.
MSKFTGLLLILILLGAAYIYYTNPHIIEDLTKMKDSFPNGFDSGGTTTHSSGGSGFSETSSGNHSESFPGEKGWVDSDNDGRKDVYIGDDYAEVPTTNGSVLFVDRNKDGKIDAIYLDTTGDGSYDTAYLDEDYNGKTDTWRTTFNGVDSYAWDITGDGIPDVYDSNGDGKVDAWDTNSDGIIDERDVDYDGTPDLHDYDFDGVFDEFERNVTLYPPESANGTSGAFLCPDNKDDAYRLFVQAYNNVTSLQSSGASDEEIQEAYAKYQKARACYESFLTSTTSAASSSGMREIKTVTLDTEGTAGVKFSTGELKGYNEISDNVWEDVDLVAEPWCVEYPALLGHWIDLGEGNLDTLDPSEIPTSGYPTGEIAEEIKMGHVYVNLNSDGTLTAFELVSHEKTGDCSHRITIRYSNLGGS

SEQ ID NO: 326 - protein, 114 aa, Thermococcus kodakaraensis KOD1
  misc_feature (414542)..(414542): n is a or c or g or t.
  misc_feature (786890)..(786890): n is a or c or g or t.
  misc_feature (786907)..(786907): n is a or c or g or t.
  misc_feature (786944)..(786946): n is a or c or g or t.
  misc_feature (839139)..(839139): n is a or c or g or t.
  misc_feature (1128488)..(1128488): n is a or c or g or t.
  misc_feature (1128499)..(1128499): n is a or c or g or t.
  misc_feature (1128505)..(1128506): n is a or c or g or t.
  misc_feature (1128517)..(1128518): n is a or c or g or t.
  misc_feature (1128539)..(1128540): n is a or c or g or t.
  misc_feature (1561400)..(1561400): n is a or c or g or t.
  misc_feature (1561477)..(1561477): n is a or c or g or t.
  misc_feature (1561545)..(1561545): n is a or c or g or t.
  misc_feature (1767941)..(1767941): n is a or c or g or t.
VLGIVAAFGMQYYYETFYDKVPVEVKSDTVTGDVFYLSHTLEPGTYKIEAGGTGVVKGIKILDPDTNEVVSSYEDSTSMIYGSAKPFVVRVDYAPPNPDESYTAKVGIYRLVKK

SEQ ID NO: 327 - protein, 237 aa, Thermococcus kodakaraensis KOD1
  misc_feature (414542)..(414542): n is a or c or g or t.
  misc_feature (786890)..(786890): n is a or c or g or t.
  misc_feature (786907)..(786907): n is a or c or g or t.
  misc_feature (786944)..(786946): n is a or c or g or t.
  misc_feature (839139)..(839139): n is a or c or g or t.
  misc_feature (1128488)..(1128488): n is a or c or g or t.
  misc_feature (1128499)..(1128499): n is a or c or g or t.
  misc_feature (1128505)..(1128506): n is a or c or g or t.
  misc_feature (1128517)..(1128518): n is a or c or g or t.
  misc_feature (1128539)..(1128540): n is a or c or g or t.
  misc_feature (1561400)..(1561400): n is a or c or g or t.
  misc_feature (1561477)..(1561477): n is a or c or g or t.
  misc_feature (1561545)..(1561545): n is a or c or g or t.
  misc_feature (1767941)..(1767941): n is a or c or g or t.
MRKVYALSALLLVVFVLTSGCVESPDVNVESEKTLSVNGVTVHYSGKVSTDQAKALINLINAELNPNEIDVYVKKDNGYVVGLTSTYTSSSEMEDSLKFYLIFLASKMSQDVFSGEKVLLQILDDEKNVLYQVESKYRYVSSSGINVWYRVASEEEARKALDYLVEFAGQGPWDVILEKSGSTYHVRAMSSFTTADEANSAKDAYTELVSGLEERLNGDVVVHVLDPNGIELTTFGP

SEQ ID NO: 328 - protein, 207 aa, Thermococcus kodakaraensis KOD1
  misc_feature (414542)..(414542): n is a or c or g or t.
  misc_feature (786890)..(786890): n is a or c or g or t.
  misc_feature (786907)..(786907): n is a or c or g or t.
  misc_feature (786944)..(786946): n is a or c or g or t.
  misc_feature (839139)..(839139): n is a or c or g or t.
  misc_feature (1128488)..(1128488): n is a or c or g or t.
  misc_feature (1128499)..(1128499): n is a or c or g or t.
  misc_feature (1128505)..(1128506): n is a or c or g or t.
  misc_feature (1128517)..(1128518): n is a or c or g or t.
  misc_feature (1128539)..(1128540): n is a or c or g or t.
  misc_feature (1561400)..(1561400): n is a or c or g or t.
  misc_feature (1561477)..(1561477): n is a or c or g or t.
  misc_feature (1561545)..(1561545): n is a or c or g or t.
  misc_feature (1767941)..(1767941): n is a or c or g or t.
MKISSKEIAIIGLMLALALALDVMPVEMPTVWGMKIDLVAVPIIVAYFILGFWGGLIALAMLFLGLSVVSSASWLGAMMKTLATFGVLVGLEVARRTLGFDYSDKKRLFVFGLAAYIVGILLRIPLMIALNYYVALPIWLGLPREQVISAVEDWTGVPFWFAIALPNAIQSVIDVFISLLVTVPVLKRVPHVVVETSEPQRIIEKEL

SEQ ID NO: 329 - protein, 866 aa, Thermococcus kodakaraensis KOD1
  misc_feature (414542)..(414542): n is a or c or g or t.
  misc_feature (786890)..(786890): n is a or c or g or t.
  misc_feature (786907)..(786907): n is a or c or g or t.
  misc_feature (786944)..(786946): n is a or c or g or t.
  misc_feature (839139)..(839139): n is a or c or g or t.
  misc_feature (1128488)..(1128488): n is a or c or g or t.
  misc_feature (1128499)..(1128499): n is a or c or g or t.
  misc_feature (1128505)..(1128506): n is a or c or g or t.
  misc_feature (1128517)..(1128518): n is a or c or g or t.
  misc_feature (1128539)..(1128540): n is a or c or g or t.
  misc_feature (1561400)..(1561400): n is a or c or g or t.
  misc_feature (1561477)..(1561477): n is a or c or g or t.
  misc_feature (1561545)..(1561545): n is a or c or g or t.
  misc_feature (1767941)..(1767941): n is a or c or g or t.
MSEEVKEVKILEKPWVEKYRPQRLEDIVGQDHIVKRLKHYVKTGSMPHLLFAGPPGVGKCLTGDAKVIANGRLFELGELVEKVSKGRFGPTPVEGLKVLGIDEDGKLREFEVQYVYKDRAERLIKVRTRLGRELKVTPYHPLLVNRKNGEIMWVKAEELRPGDRLAVPRFLPAIAEEDPLAEWLGYFIGDGHADSKNKVITFTNTDPSLRQRFMELTERLFPDAKIRERIHKNRAPDVYVNSRRAWELVSSLGLAGRKADKVYIPEKGWEGIRSFLRAYFDCDAGVDKNAVVLATASREMAEQVTYALAGFGITSKIREKKVRGKTYYHVTISGSENLERFLSEIGFSHREKLERTLKLVKKPNPNLDSLNVNYELISYVRDRLKLNFSDDKRSWSHRKARKISWELMKEIYYRLDELERLKESLSRSILIDWNEMAERRKEIAEKTGIRADRLLEYIKGKRKPSLRNYIKIAKALGIDLEPTINAMRVFARKYSSYAEIGRKLGTWNSSVRIILESNTEKIKELEEIRKIELELIGEILSDEKLKEGVAYLIFLSQNELYWDEITEVKELKGDFVIYDLHVPGYHNFIAGNMPTVVHNTTAALALARELFGENWRHNFLELNASDERGINVIREKVKEFARTKPIGGASFKIIFLDEADALTQDAQQALRRTMEMFSNNVRFILSCNYSSKIIEPIQSRCAIFRFRPLRDEDIAKRIRYIAENEGLELTEEGLQAILYVAEGDLRRAINVLQAAAALDTKITDENVFLVASRARPEDVREMMTLALEGNFLKAREKLRDILLRQGLSGEDVLIQMHKEVFNLPIPEDKKVALADKIGEYNFRLVEGANEMIQLEALLAQFTIMGK

SEQ ID NO: 330 - protein, 438 aa, Thermococcus kodakaraensis KOD1
  misc_feature (414542)..(414542): n is a or c or g or t.
  misc_feature (786890)..(786890): n is a or c or g or t.
  misc_feature (786907)..(786907): n is a or c or g or t.
  misc_feature (786944)..(786946): n is a or c or g or t.
  misc_feature (839139)..(839139): n is a or c or g or t.
  misc_feature (1128488)..(1128488): n is a or c or g or t.
  misc_feature (1128499)..(1128499): n is a or c or g or t.
  misc_feature (1128505)..(1128506): n is a or c or g or t.
  misc_feature (1128517)..(1128518): n is a or c or g or t.
  misc_feature (1128539)..(1128540): n is a or c or g or t.
  misc_feature (1561400)..(1561400): n is a or c or g or t.
  misc_feature (1561477)..(1561477): n is a or c or g or t.
  misc_feature (1561545)..(1561545): n is a or c or g or t.
  misc_feature (1767941)..(1767941): n is a or c or g or t.
MLSREELIEVLAPYNFWGREQDTGITRGDYLKDIRRKLSTGNALALVGVRRAGKTTLARQYLRFLIEKGLPPEETLYVNLEEPRFYPDLSLELLEEIFSAFKTYISRGARPVVVLDEVQNVEGWERWVRKVLDLGEAEVIVTGSSSSLLRSELATLLTGRVLVTEVYPLSFREFLSFKGLPIELPALLGRRGEVERALREYLEFGGFPQVVLTDDEGLKRELLRELFEGIILRDVAYRHGFRDARLVKLVAELALSRFSSLVSASRLRNEVSGIVGRKVSPNLVDSVLDAMEEAYLIHRVPILSPKVKDVRRYPKKLYAVDTGLANVMITRFTENIGRLAENAVARHLVQRHGRENVFYYRNGHEVDFVVRENLKISRLVQVSWDVDESWEREVEGLVEAAKHFGLSEGILVTGWKSCEERVKGINVRCLPLWRFLLS

SEQ ID NO: 331 - protein, 474 aa, Thermococcus kodakaraensis KOD1
  misc_feature (414542)..(414542): n is a or c or g or t.
  misc_feature (786890)..(786890): n is a or c or g or t.
  misc_feature (786907)..(786907): n is a or c or g or t.
  misc_feature (786944)..(786946): n is a or c or g or t.
  misc_feature (839139)..(839139): n is a or c or g or t.
  misc_feature (1128488)..(1128488): n is a or c or g or t.
  misc_feature (1128499)..(1128499): n is a or c or g or t.
  misc_feature (1128505)..(1128506): n is a or c or g or t.
  misc_feature (1128517)..(1128518): n is a or c or g or t.
  misc_feature (1128539)..(1128540): n is a or c or g or t.
  misc_feature (1561400)..(1561400): n is a or c or g or t.
  misc_feature (1561477)..(1561477): n is a or c or g or t.
  misc_feature (1561545)..(1561545): n is a or c or g or t.
  misc_feature (1767941)..(1767941): n is a or c or g or t.
VVKVSTDTRPTVRIRGIYSTALTKLFLDRGFGISQPSNKIVERFGLEKTYDDFDVDIYDKKDRHGVVLVGDAVEEAKKVLEEELIDVFFRRLPYQLYGIYKGLVVKIDEKYVYVDLGSAIGTIPRKDLPKAVEGDEILVQVKKHNLLPHLSTTLTIPGDYAVLIPKPIGAQRHVKISRKIRDNQERERLRILGLSIDLGKWGVLWRTAAAYKDWNLLRDEIVRLSKLADRLAKADTYFAPSLIIEGRNIYEVEFGGGAKRKLDEIRNKVVPTVDGHHQLKAKDPELGFAVEIAEGILSKVPGQRVKVNQGFWEALVENKGPKKGWLFTLEHVKPDGQRIRLGPGEVLEVSHNPLRVTIKRHLKPGKFYDGLELPIEFGDYAITELEAGKWWFVHRYYDKNGNLKGEYYNINTPVEIYPDGARYVDLEVDIVKWPDGKKEIIDQEELKEHYEEGIISEKLYRAVLRITQEVFERV

SEQ ID NO: 332 - protein, 25 aa, Thermococcus kodakaraensis KOD1
  misc_feature (414542)..(414542): n is a or c or g or t.
  misc_feature (786890)..(786890): n is a or c or g or t.
  misc_feature (786907)..(786907): n is a or c or g or t.
  misc_feature (786944)..(786946): n is a or c or g or t.
  misc_feature (839139)..(839139): n is a or c or g or t.
  misc_feature (1128488)..(1128488): n is a or c or g or t.
  misc_feature (1128499)..(1128499): n is a or c or g or t.
  misc_feature (1128505)..(1128506): n is a or c or g or t.
  misc_feature (1128517)..(1128518): n is a or c or g or t.
  misc_feature (1128539)..(1128540): n is a or c or g or t.
  misc_feature (1561400)..(1561400): n is a or c or g or t.
  misc_feature (1561477)..(1561477): n is a or c or g or t.
  misc_feature (1561545)..(1561545): n is a or c or g or t.
  misc_feature (1767941)..(1767941): n is a or c or g or t.
MPEWDLPRLLPHSQSGGGTRGIETS

SEQ ID NO: 333 - protein, 93 aa, Thermococcus kodakaraensis KOD1
  misc_feature (414542)..(414542): n is a or c or g or t.
  misc_feature (786890)..(786890): n is a or c or g or t.
  misc_feature (786907)..(786907): n is a or c or g or t.
  misc_feature (786944)..(786946): n is a or c or g or t.
  misc_feature (839139)..(839139): n is a or c or g or t.
  misc_feature (1128488)..(1128488): n is a or c or g or t.
  misc_feature (1128499)..(1128499): n is a or c or g or t.
  misc_feature (1128505)..(1128506): n is a or c or g or t.
  misc_feature (1128517)..(1128518): n is a or c or g or t.
  misc_feature (1128539)..(1128540): n is a or c or g or t.
  misc_feature (1561400)..(1561400): n is a or c or g or t.
  misc_feature (1561477)..(1561477): n is a or c or g or t.
  misc_feature (1561545)..(1561545): n is a or c or g or t.
  misc_feature (1767941)..(1767941): n is a or c or g or t.
VEEKVRPILEGFGLWDYFLFPKIEGHPNKADMIRRTIEELESIGYTIDDVIYVDDRAIHVDKIKQELPDVDFIHMWVDVKSFEELKQLLEKLD

SEQ ID NO: 334 - protein, 391 aa, Thermococcus kodakaraensis KOD1
  misc_feature (414542)..(414542): n is a or c or g or t.
  misc_feature (786890)..(786890): n is a or c or g or t.
  misc_feature (786907)..(786907): n is a or c or g or t.
  misc_feature (786944)..(786946): n is a or c or g or t.
  misc_feature (839139)..(839139): n is a or c or g or t.
  misc_feature (1128488)..(1128488): n is a or c or g or t.
  misc_feature (1128499)..(1128499): n is a or c or g or t.
  misc_feature (1128505)..(1128506): n is a or c or g or t.
  misc_feature (1128517)..(1128518): n is a or c or g or t.
  misc_feature (1128539)..(1128540): n is a or c or g or t.
  misc_feature (1561400)..(1561400): n is a or c or g or t.
  misc_feature (1561477)..(1561477): n is a or c or g or t.
  misc_feature (1561545)..(1561545): n is a or c or g or t.
  misc_feature (1767941)..(1767941): n is a or c or g or t.
VEKTLRNIWLLNLSTFFFFLGISLTNPIVSPFAITLGASPFLVGLVAGVTSFVSLVSKPVGGLIGDRGYRLEMMIAGNVLSLISGLLYVVSAYTSNIVLFAFSRALHGFSMGIFFPSSLSTAVDLAPPGRVGETLGWRGMMFSLGNIIGPALGGYLSDYLGFAGAFSFVSLFSLLGAGFVIPVWKEVGRITGDEESSGGSVSYRALLKVSFVFTSLALLFFSASYSGITTYLPAFYKYLGFPQRTFGLYMMVVGASSFATRLVGGKTADRIGPVPVSFGGILVVITGYVFLNYRILPPESYISAVLIGAGFGLSVPAMQMMALAPLPGKIRAMGSSIYTMFFDLGTLGGQVALGYVADLRGYEAVFPLLPFIAGVALISILITKVKGEGNA

SEQ ID NO: 335 - protein, 239 aa, Thermococcus kodakaraensis KOD1
  misc_feature (414542)..(414542): n is a or c or g or t.
  misc_feature (786890)..(786890): n is a or c or g or t.
  misc_feature (786907)..(786907): n is a or c or g or t.
  misc_feature (786944)..(786946): n is a or c or g or t.
  misc_feature (839139)..(839139): n is a or c or g or t.
  misc_feature (1128488)..(1128488): n is a or c or g or t.
  misc_feature (1128499)..(1128499): n is a or c or g or t.
  misc_feature (1128505)..(1128506): n is a or c or g or t.
  misc_feature (1128517)..(1128518): n is a or c or g or t.
  misc_feature (1128539)..(1128540): n is a or c or g or t.
  misc_feature (1561400)..(1561400): n is a or c or g or t.
  misc_feature (1561477)..(1561477): n is a or c or g or t.
  misc_feature (1561545)..(1561545): n is a or c or g or t.
  misc_feature (1767941)..(1767941): n is a or c or g or t.
MKRAVVLFSGGLDSTACLYWAKKNYDEVIMLTVNYGSNEEKVTNKVAEFFSKELDVPLKIVRLDFLEEFSKLRGTTLVGGETPKVTGEELENIEVAQETAKSVWVPARNVVLIAVAASLLDALGGGDIVVGFNAEEGATFPDNTPEFVEKMNEMLKYGTMAEVRVVAPLINLDKRGIAKLLKELGAKYEYSNSCYMPKGFTEDGKPIHCGECESCVRRHRGLIEGIGEDKTVYAVEPKI

SEQ ID NO: 336 - protein, 231 aa, Thermococcus kodakaraensis KOD1
  misc_feature (414542)..(414542): n is a or c or g or t.
  misc_feature (786890)..(786890): n is a or c or g or t.
  misc_feature (786907)..(786907): n is a or c or g or t.
  misc_feature (786944)..(786946): n is a or c or g or t.
  misc_feature (839139)..(839139): n is a or c or g or t.
  misc_feature (1128488)..(1128488): n is a or c or g or t.
  misc_feature (1128499)..(1128499): n is a or c or g or t.
  misc_feature (1128505)..(1128506): n is a or c or g or t.
  misc_feature (1128517)..(1128518): n is a or c or g or t.
  misc_feature (1128539)..(1128540): n is a or c or g or t.
  misc_feature (1561400)..(1561400): n is a or c or g or t.
  misc_feature (1561477)..(1561477): n is a or c or g or t.
  misc_feature (1561545)..(1561545): n is a or c or g or t.
  misc_feature (1767941)..(1767941): n is a or c or g or t.
VSKMRVAVLYSGGKDSNYALYWALKQGFEVKYLVSMVSESDESYMYHVPNIHLTELQARAIGIPLVKGFTSGEKEKEVEDMKAVLEGLKIDGVVVGALASEYQKQRVDRVAKELGIESFAPAWHRDPVDYMREIIGIFDVVIVGTAAYGLDQNWLGRRIDEKALEELIKLNEKYKVHVAGEGGEFETFVRDAPFFRARVVFDEVEKKWNECSYSGVLEVRSAHLEPKGSSW

SEQ ID NO: 337 - protein, 484 aa, Thermococcus kodakaraensis KOD1
  misc_feature (414542)..(414542): n is a or c or g or t.
  misc_feature (786890)..(786890): n is a or c or g or t.
  misc_feature (786907)..(786907): n is a or c or g or t.
  misc_feature (786944)..(786946): n is a or c or g or t.
  misc_feature (839139)..(839139): n is a or c or g or t.
  misc_feature (1128488)..(1128488): n is a or c or g or t.
  misc_feature (1128499)..(1128499): n is a or c or g or t.
  misc_feature (1128505)..(1128506): n is a or c or g or t.
  misc_feature (1128517)..(1128518): n is a or c or g or t.
  misc_feature (1128539)..(1128540): n is a or c or g or t.
  misc_feature (1561400)..(1561400): n is a or c or g or t.
  misc_feature (1561477)..(1561477): n is a or c or g or t.
  misc_feature (1561545)..(1561545): n is a or c or g or t.
  misc_feature (1767941)..(1767941): n is a or c or g or t.
MKVLEVLYREVVYRRMKDNPRSAGKISLGLGSSGDLKKTLLFQTAMYAVFGLMLFPSLKGERDAVLVMASTYAILPFIIAFYATVTNSSYIASLDLFKPLLPLPIKLGGRYMSVLLLLESLPVMAFMVPGAVRIGMVVSATSGLLVLLWSAVGLMLGHVFGLLVYYSFGKTSSGRFADLKSLAKALGVILIFGLFYGFSYFQDYVLQNYTSIKESLGGYEFIYPLSVLSVDRPSFSAPLAGIYIAILGVAYYVLISRLWVRISEGSYTSGRRRRAGGLGVYPPELALMVKDFKTALRNTPVLTGLLVPIVIPIINVAGIFSNPDIGAFGGRLATITFVAALGWVSAVSVETLTKIEVKSFELLLSLPLERGRFLRGKLLTMAAIPSAVGVLALLGLSLKGFSSPIYLPMAVLVPLATCGIALHVYYHGTEGLALPQGGILKSLAVWILNAVVVGIIAGSWYLSYPIALLLTAAIDALLLWSLNR

SEQ ID NO: 338 - protein, 470 aa, Thermococcus kodakaraensis KOD1
  misc_feature (414542)..(414542): n is a or c or g or t.
  misc_feature (786890)..(786890): n is a or c or g or t.
  misc_feature (786907)..(786907): n is a or c or g or t.
  misc_feature (786944)..(786946): n is a or c or g or t.
  misc_feature (839139)..(839139): n is a or c or g or t.
  misc_feature (1128488)..(1128488): n is a or c or g or t.
  misc_feature (1128499)..(1128499): n is a or c or g or t.
  misc_feature (1128505)..(1128506): n is a or c or g or t.
  misc_feature (1128517)..(1128518): n is a or c or g or t.
  misc_feature (1128539)..(1128540): n is a or c or g or t.
  misc_feature (1561400)..(1561400): n is a or c or g or t.
  misc_feature (1561477)..(1561477): n is a or c or g or t.
  misc_feature (1561545)..(1561545): n is a or c or g or t.
  misc_feature (1767941)..(1767941): n is a or c or g or t.
VLRWPNLSRKLFMCVNVTLNLPGVKGMVEKFDTIYDYYVDKGYEPSKKRDIIAVFRVTPAEGYTIEQAAGAVAAESSTGTWTTLYPWYEQERWADLSAKAYDFHDMGDGSWIVRIAYPFHAFEEANLPGLLASIAGNIFGMKRVKGLRLEDLYFPEKLIREFDGPAFGIEGVRKMLEIKDRPIYGVVPKPKVGYSPEEFEKLAYDLLSNGADYMKDDENLTSPWYNRFEERAEIMAKIIDKVENETGEKKTWFANITADLLEMEQRLEVLADLGLKHAMVDVVITGWGALRYIRDLAADYGLAIHGHRAMHAAFTRNPYHGISMFVLAKLYRLIGIDQLHVGTAGAGKLEGGKWDVIQNARILRESHYKPDENDVFHLEQKFYSIKAAFPTSSGGLHPGNIQPVIEALGTDIVLQLGGGTLGHPDGPAAGARAVRQAIDAIMQGIPLDEYAKTHKELARALEKWGHVTPV

SEQ ID NO: 339 - protein, 201 aa, Thermococcus kodakaraensis KOD1
  misc_feature (414542)..(414542): n is a or c or g or t.
  misc_feature (786890)..(786890): n is a or c or g or t.
  misc_feature (786907)..(786907): n is a or c or g or t.
  misc_feature (786944)..(786946): n is a or c or g or t.
  misc_feature (839139)..(839139): n is a or c or g or t.
  misc_feature (1128488)..(1128488): n is a or c or g or t.
  misc_feature (1128499)..(1128499): n is a or c or g or t.
  misc_feature (1128505)..(1128506): n is a or c or g or t.
  misc_feature (1128517)..(1128518): n is a or c or g or t.
  misc_feature (1128539)..(1128540): n is a or c or g or t.
  misc_feature (1561400)..(1561400): n is a or c or g or t.
  misc_feature (1561477)..(1561477): n is a or c or g or t.
  misc_feature (1561545)..(1561545): n is a or c or g or t.
  misc_feature (1767941)..(1767941): n is a or c or g or t.
VRAMESNRDLGRLLDILGNETRRRILLLLTKRPYFVSELSQELGVGQKAVLEHLRILESAGLIEGRTEKIPRGRPRKYYTIKRGFRLEVLLTPYTFGTDIYEPKKPRATAEYQQARELIKSTEPIETKVDELVQFLDEVQRRIDEAMRMKQELEEVRLLVETYIENLMRRIAQENEAEFERLLKELRPKLPKKILEDLESF

SEQ ID NO: 340 - protein, 173 aa, Thermococcus kodakaraensis KOD1
  misc_feature (414542)..(414542): n is a or c or g or t.
  misc_feature (786890)..(786890): n is a or c or g or t.
  misc_feature (786907)..(786907): n is a or c or g or t.
  misc_feature (786944)..(786946): n is a or c or g or t.
  misc_feature (839139)..(839139): n is a or c or g or t.
  misc_feature (1128488)..(1128488): n is a or c or g or t.
  misc_feature (1128499)..(1128499): n is a or c or g or t.
  misc_feature (1128505)..(1128506): n is a or c or g or t.
  misc_feature (1128517)..(1128518): n is a or c or g or t.
  misc_feature (1128539)..(1128540): n is a or c or g or t.
  misc_feature (1561400)..(1561400): n is a or c or g or t.
  misc_feature (1561477)..(1561477): n is a or c or g or t.
  misc_feature (1561545)..(1561545): n is a or c or g or t.
  misc_feature (1767941)..(1767941): n is a or c or g or t.
VDYFHITGGEPLMQWAELSSLLAEAKELLPISLNTNLTLLKPLERLLKAELVDHIATDLKAPPAELYGLPGEASKRLWELFLMGLELISDYGIPLELRIPVARGLDQWPWIEEGLKHVDTDFYAVLNPLVGPPLTSPRNGAWCSEHCWPEREVEGLKERLGEIGIRTYVNRFA

SEQ ID NO: 341 - protein, 83 aa, Thermococcus kodakaraensis KOD1
  misc_feature (414542)..(414542): n is a or c or g or t.
  misc_feature (786890)..(786890): n is a or c or g or t.
  misc_feature (786907)..(786907): n is a or c or g or t.
  misc_feature (786944)..(786946): n is a or c or g or t.
  misc_feature (839139)..(839139): n is a or c or g or t.
  misc_feature (1128488)..(1128488): n is a or c or g or t.
  misc_feature (1128499)..(1128499): n is a or c or g or t.
  misc_feature (1128505)..(1128506): n is a or c or g or t.
  misc_feature (1128517)..(1128518): n is a or c or g or t.
  misc_feature (1128539)..(1128540): n is a or c or g or t.
  misc_feature (1561400)..(1561400): n is a or c or g or t.
  misc_feature (1561477)..(1561477): n is a or c or g or t.
  misc_feature (1561545)..(1561545): n is a or c or g or t.
  misc_feature (1767941)..(1767941): n is a or c or g or t.
VFSFPLFKDYREKERFLKVVGLLVSHQITFEKAAQLLGIKLEELSFLLDKLGVEYSFLDEEEAELEIEEIRRVREELKREGRL

SEQ ID NO: 342 - DNA, 2089378 bp, Thermococcus kodakaraensis KOD1; identical to SEQ ID NO: 1
  CDS (8843)..(10093): Predicted N-acetylglucosaminyl transferase
  CDS (10376)..(10807): Uncharacterized ACR
  CDS (11723)..(12286): Predicted hydrolases of HD superfamily
  CDS (12338)..(13411): ABC-type molybdate transport system
  CDS (14153)..(14896): ABC-type sulfate/molybdate transport systems
  CDS (15239)..(15964): Predicted ATPases
  CDS (16151)..(16699): Predicted ATPases of PP-loop superfamily
  CDS (35048)..(35824): Archaeal flagellins
  CDS (35882)..(36541): Archaeal flagellins
  CDS (37394)..(37870): Putative archaeal flagellar protein C
  CDS (37874)..(39298): Putative archaeal flagellar protein D/E
  CDS (41072)..(42694): Predicted ATPases involved in pili and flagella biosynthesis
  CDS (44441)..(46435): Predicted helicases
  CDS (47171)..(47416): Phosphoserine phosphatase
  CDS (50693)..(51412): Predicted hydrolases of the HAD superfamily
  CDS (55058)..(55606): Predicted nucleotidyltransferases
  CDS (56132)..(56263)
  CDS (64226)..(65992): Beta-xylosidase
  CDS (71117)..(71245): Glycine cleavage system protein P (pyridoxal-binding)
  CDS (72764)..(73339): Predicted transcriptional regulator
  CDS (74603)..(75760)
  CDS (76022)..(77458): Uncharacterized BCR
  CDS (77735)..(79045): 5'-nucleotidase/2'
  CDS (80246)..(80428): Acyl-CoA synthetases (AMP-forming)/AMP-acid ligases II COG0318 Ca iC
  CDS (80432)..(83176): Predicted ATPase involved in replication control
  CDS (84461)..(85018)
  CDS (85421)..(85948): Integrase
  CDS (91178)..(91366): Chorismate synthase
  CDS (96185)..(97636): Uncharacterized NAD(FAD)-dependent dehydrogenases
  CDS (98417)..(99583): Glycine/D-amino acid oxidases (deaminating)
  CDS (114668)..(115351): Predicted Zn-dependent hydrolases of the beta-lactamase fold
  CDS (115397)..(116401): Putative cell wall-binding domain
  CDS (141335)..(141856): Predicted transcriptional regulators
  CDS (145334)..(145951): Uncharacterized ACR
  CDS (152417)..(152743): Uncharacterized ACR
  CDS (156044)..(157309): Transcriptional regulators containing a DNA-binding HTH domain an d an aminotransferase domain (MocR family) and their eukaryotic o rthologs COG1167 ARO8
  CDS (174404)..(174601): DNA polymerase elongation subunit (family B)
  CDS (178184)..(178348): Orotidine-5'-phosphate decarboxylase
  CDS (179195)..(180553): Glutamine phosphoribosylpyrophosphate amidotransferase
  CDS (190253)..(190621): Predicted nucleotidyltransferases
  CDS (192971)..(193486): ATPase involved in DNA repair
  CDS (195995)..(196111)
  CDS (197747)..(198367): SAM-dependent methyltransferases COG0500 SmtA
  CDS (201692)..(202102): EMAP domain
  CDS (202103)..(202924): Arginase/agmatinase/formimionoglutamate hydrolase
  CDS (203585)..(204475): Histidyl-tRNA synthetase
  CDS (205070)..(206200): Histidinol dehydrogenase
  CDS (206810)..(207397): Glutamine amidotransferase
  CDS (208082)..(208840): Imidazoleglycerol-phosphate synthase
  CDS (208850)..(209479): Phosphoribosyl-AMP cyclohydrolase
  CDS (210470)..(211198): Predicted phosphatases
  CDS (211979)..(212956): Anthranilate phosphoribosyltransferase
  CDS (215426)..(216595): Tryptophan synthase beta chain
  CDS (228257)..(228718): Pyrroline-5-carboxylate reductase
  CDS (239489)..(239686): Predicted ATPase of the AAA superfamily
  CDS (240560)..(243028): Pyruvate-formate lyase
  CDS (243977)..(244525): Ankyrin repeat proteins
  CDS (269297)..(270064): Zn-dependent hydrolases
  CDS (271361)..(272119): Mg-dependent DNase
  CDS (274244)..(274963): Uncharacterized ACR
  CDS (278969)..(279736): ABC-type multidrug transport system
  CDS (291353)..(292696): Membrane-bound serine protease (ClpP class) COG1030 -
  CDS (292703)..(293509): Membrane protease subunits
  CDS (293627)..(294415): ATPases involved in chromosome partitioning
  CDS (295115)..(296626): Thymidine phosphorylase
  CDS (297773)..(298702): ABC-type multidrug transport system
  CDS (305339)..(306193): Ketopantoate hydroxymethyltransferase
  CDS (312953)..(313306): ATPases of the PilT family
  CDS (314429)..(315589): Zn-dependent hydrolases
  CDS (321374)..(321511)
  CDS (322265)..(324256): Predicted membrane protein
  CDS (326552)..(326935): Ammonia permeases
  CDS (327284)..(327514): ADP-ribosylglycohydrolase
  CDS (327518)..(328321): Dethiobiotin synthetase
  CDS (330224)..(331687): Predicted glycosyltransferases
  CDS (331691)..(332452): N-acetylglucosamine-1-phosphate uridyltransferase (contains nucle otidyltransferase and I-patch acetyltransferase domains)
  CDS (334175)..(334945): Outer membrane receptor proteins
  CDS (341558)..(341995): Regulators of stationary/sporulation gene expression
  CDS (343454)..(343891): Uncharacterized BCR
  CDS (344090)..(344401)
  CDS (345281)..(345472): Membrane proteins related to metalloendopeptidases
  CDS (347138)..(348463): Uncharacterized ACR
  CDS (350537)..(351598): Pyrimidine deaminase
  CDS (370634)..(371449): Acyl-CoA dehydrogenases
  CDS (393449)..(394750): Nucleoside-diphosphate-sugar epimerases COG0451 WcaG
  CDS (399050)..(404185): Reverse gyrase
  CDS (406835)..(408055): 3-hexulose-6-phosphate synthase and related proteins
  CDS (408809)..(409462): Predicted hydrolases of the HAD superfamily
  CDS (411176)..(411688): Transcription terminator
  CDS (411878)..(413293): Predicted transcriptional regulators
  misc_feature (414542)..(414542): n is a or c or g or t.
  CDS (422333)..(422719)
  CDS (427799)..(429064): Uncharacterized ATPases of the AAA superfamily
  CDS (441887)..(442267): Uncharacterized ACR
  CDS (442358)..(442873): 2-Phosphoglycerate kinase
  CDS (442922)..(444142): Phosphopantothenoylcysteine synthetase/decarboxylase
  CDS (451250)..(451597): Desulfoferrodoxin
  CDS (454835)..(455341): Large extracellular alpha-helical protein
  CDS (456623)..(456835): Histone acetyltransferase HPA2 and related acetyltransferases COG 0454 WecD
  CDS (474239)..(475240): Lactate dehydrogenase and related dehydrogenases COG1052 LdhA
  CDS (475250)..(475708): Cellulase M and related proteins
  CDS (486065)..(486484): Predicted DNA-binding proteins with PD1-like DNA-binding motif
  CDS (495410)..(496480): ABC-type sugar/spermidine/putrescine/iron/thiamine transport syst ems
  CDS (497090)..(499186): Predicted phosphohydrolases
  CDS (504971)..(505099): Transcriptional regulators
  CDS (507506)..(507592)
  CDS (513104)..(513481): ATPases with chaperone activity
  CDS (529214)..(529528): Multisubunit Na+/H+ antiporter
  CDS (529736)..(529981): Multisubunit Na+/H+ antiporter
  CDS (533789)..(534916): Chromosome segregation ATPases
  CDS (540986)..(541681): Chemotaxis protein histidine kinase and related kinases
  CDS (542291)..(542914): Chemotaxis protein CheC
  CDS (547499)..(547759): Uncharacterized ArCR
  CDS (548531)..(549514): Exopolyphosphatase-related proteins
  CDS (549515)..(549850): Phosphatidylserine/phosphatidylglycerophosphate/cardioli pin synt hases and related enzymes
  CDS (551249)..(552460): TPR-repeat-containing proteins
  CDS (553133)..(553699): Uncharacterized ACR
  CDS (554855)..(555676): Predicted divalent heavy-metal cations transporter
  CDS (562361)..(563395): Uncharacterized ABC-type transport system
  CDS (565409)..(567541): Pyruvate dehydrogenase
  CDS (571031)..(571738): Diadenosine tetraphosphatase and related serine/threonine protein phosphatases
  CDS (578612)..(579025): Predicted nucleotidyltransferases
  CDS (579392)..(579454)
  CDS (592190)..(593191): NAD-dependent protein deacetylases
  CDS (595427)..(597550): Anaerobic dehydrogenases
  CDS (601388)..(601828): Predicted nucleic acid-binding protein
  CDS (608720)..(609349): SAM-dependent methyltransferases COG0500 SmtA
  CDS (609665)..(611200): NAD-dependent aldehyde dehydrogenases
  CDS (621554)..(622366): ABC-type sulfate/molybdate transport systems
  CDS (625223)..(625891): Uncharacterized ACR
  CDS (625916)..(626170)
  CDS (631871)..(632350): Uncharacterized ACR
  CDS (637487)..(638062): Predicted membrane protein
  CDS (641972)..(642490): Uncharacterized ACR
  CDS (647573)..(650017): Predicted P-loop ATPase fused to an acetyltransferase
  CDS (650078)..(650584): Uncharacterized ACR
  CDS (665627)..(665995): Homoserine dehydrogenase
  CDS (674033)..(674911): Predicted permeases
  CDS (674957)..(675970): Cellulase M and related proteins
  CDS (679850)..(679924)
  CDS (680156)..(680470): Predicted DNA-binding proteins with PD1-like DNA-binding motif
  CDS (680606)..(681754): Cellulase M and related proteins
  CDS (702356)..(703177): ABC-type Mn2+/Zn2+ transport systems
  CDS (706739)..(708556): Glucosamine 6-phosphate synthetase
  CDS (719507)..(719788): PLP-dependent aminotransferases
  CDS (726458)..(726643): RecA-superfamily ATPases implicated in signal transduction
  CDS (730961)..(731485): Phosphoribosylcarboxyaminoimidazole (NCAIR) mutase
  CDS (735215)..(735760): Nitroreductase
  CDS (737210)..(737683): Protein-tyrosine-phosphatase
  CDS (741329)..(741541): Uncharacterized conserved protein containing a ferredoxin-like do main
  CDS (741920)..(742084): Predicted secreted protein containing a PDZ domain
  CDS (744560)..(745372): Pyruvate-formate lyase-activating enzyme
  CDS (766685)..(767974): Na+/H+ antiporter NhaD and related arsenite permeases
  CDS (773543)..(774817): Uncharacterized ACR
  CDS (775493)..(776422): Thiamine monophosphate kinase
  CDS (776480)..(777643): Predicted glycosyltransferases
  CDS (779336)..(780247): Uncharacterized protein
  misc_feature (786890)..(786890): n is a or c or g or t.
  misc_feature (786907)..(786907): n is a or c or g or t.
  misc_feature (786944)..(786946): n is a or c or g or t.
  CDS (788975)..(789268): Uncharacterized ArCR
  CDS (791117)..(792469): L-asparaginase/archaeal Glu-tRNAGln amidotransferase subunit D CO G0252 AnsB
  CDS (792665)..(793114): Predicted nucleic acid-binding protein
  CDS (795038)..(795544): Bacterial cell division membrane protein
  CDS (798473)..(799534): Threonine dehydrogenase and related Zn-dependent dehydrogenases C OG1063 Tdh
  CDS (799610)..(799858): Uncharacterized ACR
  CDS (802436)..(802672): Predicted ATPase of the AAA superfamily
  CDS (803294)..(805027): Phenylalanyl-tRNA synthetase beta subunit
  CDS (805220)..(806068): Pseudouridylate synthase (tRNA psi55)
  CDS (811367)..(811606): Uncharacterized ACR
  CDS (832337)..(833035): Nucleotide-binding protein implicated in inhibition of septum for mation
  misc_feature (839139)..(839139): n is a or c or g or t.
  CDS (840503)..(841321): Predicted ATPase of the PP-loop superfamily implicated in cell cy cle control
  CDS (846422)..(846727): Ribosomal protein L35AE/L33A
  CDS (846773)..(847903): N2
  CDS (851738)..(854035): Glycosidases
  CDS (854126)..(855841): Glycyl-tRNA synthetase
  CDS (858728)..(858934)
  CDS (870263)..(870547): Response regulators consisting of a CheY-like receiver domain and a HTH DNA-binding domain COG0745 OmpR
  CDS (870842)..(871846): Arsenite transporting ATPase
  CDS (873524)..(874306): Lysophospholipase
  CDS (877271)..(878197): Nucleoside-diphosphate-sugar epimerases COG0451 WcaG
  CDS (887717)..(887920): Predicted nucleic acid-binding protein
  CDS (887924)..(890701): Lhr-like helicases
  CDS (891434)..(895009): Chromosome segregation ATPases
  CDS (895013)..(895678): Uncharacterized ACR
  CDS (900134)..(900385): ABC-type sugar (aldose) transport system
  CDS (904610)..(905026): Transcription initiation factor IIE
  CDS (905105)..(906898): RNase L inhibitor homolog
  CDS (910097)..(910516): CBS domains
  CDS (914711)..(915121): Predicted transcriptional regulators
  CDS (916589)..(917257): Uncharacterized BCR
  CDS (917348)..(918352)
  CDS (925010)..(927244): Methionyl-tRNA synthetase
  CDS (931103)..(931576): Peroxiredoxin
  CDS (933128)..(933430): Uncharacterized ACR
  CDS (933728)..(933904): Uncharacterized ACR
  CDS (938954)..(940192): Uncharacterized ACR
  CDS (940934)..(942055): Uncharacterized proteins of the AP superfamily
  CDS (962372)..(962575): Sulfur transfer protein involved in thiamine biosynthesis
  CDS (965603)..(965896): Ribosomal protein L44E
  CDS (967184)..(967987): Uncharacterized proteins of the ATP-grasp superfamily
  CDS (978776)..(979747): TPR-repeat-containing proteins
  CDS (979826)..(981100): SAM-dependent methyltransferases related to tRNA (uracil-5-)-meth yltransferase
  CDS (982136)..(982483): 6-pyruvoyl-tetrahydropterin synthase
  CDS (983483)..(983821): Prefoldin
  CDS (994241)..(995020): Survival protein
  CDS (997037)..(998464): Seryl-tRNA synthetase
  CDS (1000226)..(1001212): ABC-type multidrug transport system
  CDS (1003253)..(1005466): Restriction endonuclease
  CDS (1012013)..(1012879): Predicted exonuclease of the beta-lactamase fold involved in RNA processing
  CDS (1012961)..(1013278): ABC-type multidrug/protein/lipid transport system
  CDS (1021424)..(1022338): Dihydropteroate synthase
  CDS (1024877)..(1025692): Sugar phosphate isomerases/epimerases
  CDS (1039796)..(1040683): Methionine aminopeptidase
  CDS (1042133)..(1042384): Predicted nucleic acid-binding protein
  CDS (1042526)..(1043701): CBS domains
  CDS (1048718)..(1049599): Hydrogenase maturation factor
  CDS (1052192)..(1052701): Phosphoenolpyruvate-protein kinase (PTS system EI component in ba cteria)
  CDS (1052753)..(1053022): Methyl-accepting chemotaxis protein
  CDS (1053032)..(1053793): Organic radical activating enzymes
  CDS (1058495)..(1059043): Phospholipid-binding protein
  CDS (1063298)..(1064599): Xanthine/uracil permeases
  CDS (1070858)..(1070965)
  CDS (1082285)..(1084639): Arginyl-tRNA synthetase
  CDS (1098281)..(1098538): Phycocyanin alpha-subunit phycocyanobilin lyase and related prote ins
  CDS (1098554)..(1099156): Ribosomal protein S3AE
  CDS (1099220)..(1099486): Molecular chaperone
  CDS (1110347)..(1111819): Exopolyphosphatase-related proteins
  CDS (1117577)..(1118029): Ribosomal protein S19E (S16A)
  CDS (1120172)..(1120504): NAD-dependent DNA ligase (contains BRCT domain type II)
  CDS (1120505)..(1121407): Transcription initiation factor IIB
  misc_feature (1128488)..(1128488): n is a or c or g or t.
  misc_feature (1128499)..(1128499): n is a or c or g or t.
  misc_feature (1128505)..(1128506): n is a or c or g or t.
  misc_feature (1128517)..(1128518): n is a or c or g or t.
  misc_feature (1128539)..(1128540): n is a or c or g or t.
  CDS (1135154)..(1135213)
  CDS (1138634)..(1138867)
  CDS (1139159)..(1142494): Superfamily II DNA and RNA helicases COG0513 SrmB
  CDS (1142537)..(1142836): Uncharacterized ACR
  CDS (1142873)..(1144054): NMD protein affecting ribosome stability and mRNA decay
  CDS (1145177)..(1146514): Uncharacterized NAD(FAD)-dependent dehydrogenases
  CDS (1165121)..(1165714): Thymidine kinase
  CDS (1165724)..(1165948): Ribosomal protein L39E
  CDS (1174493)..(1177870): Predicted helicases
  CDS (1178840)..(1179322): Uncharacterized ArCR
  CDS (1182899)..(1183855): Uncharacterized BCR
  CDS (1198775)..(1198969): Regulators of stationary/sporulation gene expression
  CDS (1207790)..(1208482): Predicted hydrolases of the HAD superfamily
  CDS (1209464)..(1210141): Predicted ICC-like phosphoesterases
  CDS (1228622)..(1230493): Phosphoenolpyruvate carboxykinase (GTP)
  CDS (1233236)..(1234546): Na+-dependent transporters of the SNF family
  CDS (1294892)..(1295722): SAM-dependent methyltransferases COG0500 SmtA
  CDS (1309106)..(1309948): Uridine phosphorylase
  CDS (1317998)..(1318528): Predicted Fe-S-cluster oxidoreductase
  CDS (1330058)..(1330213)
  CDS (1354574)..(1355740): Serine-pyruvate aminotransferase/archaeal aspartate aminotransfer ase
  CDS (1362449)..(1362523): Glycosyltransferases
  CDS (1367357)..(1368481): Kef-type K+ transport systems
  CDS (1372322)..(1373752): Phenylalanyl-tRNA synthetase alpha subunit
  CDS (1376921)..(1378402): Na+/proline
  CDS (1387922)..(1388011)
  CDS (1396169)..(1396951): RecA-superfamily ATPases implicated in signal transduction
  CDS (1400690)..(1401382): K+ transport systems
  CDS (1401815)..(1403806): Archaeal/vacuolar-type H+-ATPase subunit I
  CDS (1406057)..(1406365): Archaeal/vacuolar-type H+-ATPase subunit F
  CDS (1406372)..(1407382): Archaeal/vacuolar-type H+-ATPase subunit A
  CDS (1410413)..(1411189): Uncharacterized flavoproteins
  CDS (1411199)..(1411954): Methyl-accepting chemotaxis protein
  CDS (1413935)..(1414642): Asparagine synthase (glutamine-hydrolyzing)
  CDS (1414943)..(1415797): Predicted metal-dependent hydrolases of the urease superfamily
  CDS (1428842)..(1430410): Acetyl-CoA carboxylase alpha subunit
  CDS (1430801)..(1431283): Biotin carboxyl carrier protein
  CDS (1431290)..(1432483): Na+-transporting methylmalonyl-CoA/oxaloacetate decarboxylase
  CDS (1432547)..(1433398): CBS domains
  CDS (1433432)..(1434445): Homoserine dehydrogenase
  CDS (1441115)..(1441582): Diadenosine tetraphosphate (Ap4A) hydrolase and other HIT family hydrolases COG0537 Hit
  CDS (1449764)..(1450072): Predicted transcriptional regulators
  CDS (1450076)..(1451272)
  CDS (1453739)..(1453954): Chemotaxis protein histidine kinase and related kinases
  CDS (1480088)..(1480873): Uncharacterized ArCR
  CDS (1486448)..(1488211): Squalene cyclase
  CDS (1508513)..(1509250): Glycosyltransferases involved in cell wall biogenesis
  CDS (1512986)..(1513759): Glycosyltransferases involved in cell wall biogenesis
  CDS (1523210)..(1524667): Uncharacterized membrane-associated protein/domain
  CDS (1529489)..(1530295): Predicted sugar phosphatases of the HAD superfamily
  CDS (1530296)..(1530733): Uncharacterized ACR
  CDS (1543754)..(1544062): Diphthamide synthase subunit DPH2
  CDS (1544093)..(1544920): Permeases of the drug/metabolite transporter (DMT) superfamily CO G0697 RhaT
  misc_feature (1561400)..(1561400): n is a or c or g or t.
  misc_feature (1561477)..(1561477): n is a or c or g or t.
  misc_feature (1561545)..(1561545): n is a or c or g or t.
  CDS (1577138)..(1578040): ABC-type sugar transport systems
  CDS (1583858)..(1584259): Uncharacterized ArCR
  CDS (1588919)..(1590214): Acetylornithine deacetylase/Succinyl-diaminopimelate desuccinylas e and related deacylases
  CDS (1603727)..(1603786)
  CDS (1604708)..(1606048): Glutamine synthase
  CDS (1622735)..(1622920): Uncharacterized archaeal membrane protein
  CDS (1624133)..(1625287): Glutamate decarboxylase and related PLP-dependent proteins
  CDS (1625321)..(1625563): Predicted transcriptional regulators containing the CopG/Arc/MetJ DNA-binding domain
  CDS (1625816)..(1625929)
  CDS (1627793)..(1629337): Membrane protein involved in the export of O-antigen and teichoic acid
  CDS (1634744)..(1635046): Transcriptional regulators
  CDS (1636376)..(1637356): Galactose-1-phosphate uridylyltransferase
  CDS (1653443)..(1654624): Predicted transposases
  CDS (1654676)..(1655512): Sugar kinases
  CDS (1675448)..(1676545): Predicted N6-adenine-specific DNA methylases
  CDS (1676630)..(1677790): ABC-type phosphate transport system
  CDS (1677812)..(1678636): Sugar phosphate isomerases/epimerases
  CDS (1679540)..(1680370): ABC-type phosphate transport system
  CDS (1684439)..(1684564): ATP-dependent Lon protease
  CDS (1686869)..(1687045): Uncharacterized ArCR
  CDS (1692515)..(1693180): Predicted transcriptional regulators
  CDS (1693184)..(1693489): Uncharacterized ArCR
  CDS (1693499)..(1694056): Predicted transcriptional regulators
  CDS (1697807)..(1698145): Na+/melibiose symporter and related transporters
  CDS (1703531)..(1704163): Predicted transglutaminase-like proteases
  CDS (1714040)..(1716247): DNA polymerase small subunit
  CDS (1716248)..(1721644): Novel archaeal DNA polymerase (contains Zn-fingers)
  CDS (1721669)..(1722406): Phosphomannomutase
  CDS (1729784)..(1730227): Aspartate racemase
  CDS (1730270)..(1731955): Predicted aminopeptidases
  CDS (1736456)..(1736896): Predicted transcriptional regulator
  CDS (1762676)..(1762846): K+ transporter
  CDS (1764704)..(1765804): Predicted GTPase or GTP-binding protein
  misc_feature (1767941)..(1767941): n is a or c or g or t.
  CDS (1777799)..(1778830): TPR-repeat-containing proteins
  CDS (1781597)..(1782928): GTPases
  CDS (1784774)..(1784953): Pyruvate:ferredoxin oxidoreductase and related 2-oxoacid:ferredox in oxidoreductases
  CDS (1786148)..(1787092): Pyruvate:ferredoxin oxidoreductase and related 2-oxoacid:ferredox in oxidoreductases
  CDS (1787147)..(1787473): Pyruvate:ferredoxin oxidoreductase and related 2-oxoacid:ferredox in oxidoreductases
  CDS (1788671)..(1789675): Pyruvate:ferredoxin oxidoreductase and related 2-oxoacid:ferredox in oxidoreductases
  CDS (1790705)..(1791568): Uroporphyrinogen-III decarboxylase
  CDS (1801592)..(1802125): Ferritin-like protein
  CDS (1808249)..(1808404): Uncharacterized ACR
  CDS (1811744)..(1812487): Predicted permeases
  CDS (1815959)..(1817002): ABC-type cobalamin/Fe3+-siderophores transport systems
  CDS (1817756)..(1818715): ATPases involved in chromosome partitioning
  CDS (1828493)..(1829698): Glycine cleavage system T protein (aminomethyltransferase)
  CDS (1832777)..(1833709): Zn-dependent dipeptidase
  CDS (1836239)..(1837111): Predicted archaeal methyltransferase
  CDS (1845932)..(1846168): Transcriptional regulators
  CDS (1857656)..(1858012): Uncharacterized ACR
  CDS (1868696)..(1869637): Anaerobic dehydrogenases
  CDS (1872533)..(1872811): Multisubunit Na+/H+ antiporter
  CDS (1873439)..(1873735): Multisubunit Na+/H+ antiporter
  CDS (1874534)..(1876078): Formate hydrogenlyase subunit 3/Multisubunit Na+/H+ antiporter
  CDS (1877558)..(1878838): Ni
  CDS (1879832)..(1880263): Formate hydrogenlyase subunit 6/NADH:ubiquinone oxidoreductase 23 kD subunit (chain I)
  CDS (1882334)..(1883542): ATPase involved in DNA replication
  CDS (1883543)..(1884076): Predicted membrane-bound metal-dependent hydrolases
  CDS (1888724)..(1890025): Enolase
  CDS (1894442)..(1895158): Uncharacterized ACR
  CDS (1901783)..(1902706): Sensory transduction histidine kinases
  CDS (1902746)..(1903273): Predicted methyltransferase
  CDS (1903277)..(1904434): tRNA and rRNA cytosine-C5-methylases
  CDS (1909517)..(1910014): Predicted nucleotidyltransferase
  CDS (1912010)..(1912546): ATP:corrinoid adenosyltransferase
  CDS (1916252)..(1916479): Transcriptional regulators
  CDS (1924478)..(1926250): Predicted Fe-S oxidoreductases
  CDS (1926707)..(1929025): Methyl-accepting chemotaxis protein
  CDS (1942184)..(1942507): Carbon starvation protein
  CDS (1964567)..(1964629)
  CDS (1970804)..(1971262): Predicted pyrophosphatase
  CDS (1972493)..(1973851): Phosphomannomutase
  CDS (1982894)..(1983307): Uncharacterized ACR
  CDS (1985942)..(1987522): Tellurite resistance protein and related permeases
  CDS (2003696)..(2004217): tRNA splicing endonuclease
  CDS (2004890)..(2004943)
  CDS (2012072)..(2012314): Uncharacterized ACR
  CDS (2021495)..(2022214): Putative effector of murein hydrolase
  CDS (2022269)..(2023111): Phosphoribosylpyrophosphate synthetase COG0462 PrsA
  CDS (2028914)..(2029489): Uncharacterized ACR
  CDS (2033501)..(2034466): Predicted archaeal sugar kinases
  CDS (2035637)..(2036254): Pyruvate:ferredoxin oxidoreductase and related 2-oxoacid:ferredox in oxidoreductases
  CDS (2036609)..(2037244): Phosphate uptake regulator
  CDS (2037290)..(2038219): Asparaginase
  CDS (2039429)..(2040040): Biotin synthase-related enzyme
  CDS (2044340)..(2045170): Uncharacterized ACR
  CDS (2046077)..(2047399): Glycosyltransferases involved in cell wall biogenesis
  CDS (2047406)..(2047780): Uncharacterized ACR
  CDS (2050697)..(2051614): Dihydroorotate dehydrogenase
  CDS (2051888)..(2052298): Uncharacterized proteins of PilT N-term./Vapc superfamily
  CDS (2059310)..(2059501): Predicted transcriptional regulators containing the CopG/Arc/MetJ DNA-binding domain
  CDS (2060819)..(2061598): ATPases involved in chromosome partitioning
  CDS (2067623)..(2068384): ABC-type multidrug transport system
  CDS (2072066)..(2072986): Transcription initiation factor IIB
  CDS (2073002)..(2073490): Predicted phosphoesterase
  CDS (2076986)..(2077663): Uncharacterized ACR
  CDS (2077703)..(2078152): ABC-type transport system involved in cytochrome c biogenesis
  CDS (2080319)..(2082169): Oxygen-sensitive ribonucleoside-triphosphate reductase
  CDS (2085470)..(2087110): Chaperonin GroEL (HSP60 family)
  CDS (2088905)..(2089378): Predicted nucleic acid-binding protein

SEQ ID NO: 343 - protein, 416 aa, Thermococcus kodakaraensis KOD1
  misc_feature (414542)..(414542): n is a or c or g or t.
  misc_feature (786890)..(786890): n is a or c or g or t.
  misc_feature (786907)..(786907): n is a or c or g or t.
  misc_feature (786944)..(786946): n is a or c or g or t.
  misc_feature (839139)..(839139): n is a or c or g or t.
  misc_feature (1128488)..(1128488): n is a or c or g or t.
  misc_feature (1128499)..(1128499): n is a or c or g or t.
  misc_feature (1128505)..(1128506): n is a or c or g or t.
  misc_feature (1128517)..(1128518): n is a or c or g or t.
  misc_feature (1128539)..(1128540): n is a or c or g or t.
  misc_feature (1561400)..(1561400): n is a or c or g or t.
  misc_feature (1561477)..(1561477): n is a or c or g or t.
  misc_feature (1561545)..(1561545): n is a or c or g or t.
  misc_feature (1767941)..(1767941): n is a or c or g or t.
MLTVEVLKSADIIPDPYTRAVTYARLGETLVRRKDPLYKEAFLKAFDALNDINDPELLLRATLAIGYHMGKAGIKAYYKVFLRVVEDSSALSPPVRDEILALAVRYLVSLGNLGQAVTLATEISDKKLAQATLFSIVRAGSRLIQDSSLKAAYKLRKIKLALEYITDEPYRSKALIELAKAFIAVGSYERALATIREIESPDWAKVAFKELTFSLGRMGVIDKFISGLSELADDFSSRFGADFVVELAEAFLLAGKPDIAVGMLRNLDDSVQVISEVALEVLDKNPAVIPGFLEVLSDDEARIVGKLLMDKILEHPTKALEEVVKAVARRVRSEAMWVKVARYYTLLGDVETARNIGVVLQNPKLRSIVLADVARSYLKQNKIEEAIDAALEVRDRKFASLLMSEILVRALSVGGT

SEQ ID NO: 344 - protein, 143 aa, Thermococcus kodakaraensis KOD1
  misc_feature (414542)..(414542): n is a or c or g or t.
  misc_feature (786890)..(786890): n is a or c or g or t.
  misc_feature (786907)..(786907): n is a or c or g or t.
  misc_feature (786944)..(786946): n is a or c or g or t.
  misc_feature (839139)..(839139): n is a or c or g or t.
  misc_feature (1128488)..(1128488): n is a or c or g or t.
  misc_feature (1128499)..(1128499): n is a or c or g or t.
  misc_feature (1128505)..(1128506): n is a or c or g or t.
  misc_feature (1128517)..(1128518): n is a or c or g or t.
  misc_feature (1128539)..(1128540): n is a or c or g or t.
  misc_feature (1561400)..(1561400): n is a or c or g or t.
  misc_feature (1561477)..(1561477): n is a or c or g or t.
  misc_feature (1561545)..(1561545): n is a or c or g or t.
  misc_feature (1767941)..(1767941): n is a or c or g or t.
VIEMLYEIPISTRERLQIIDITDEIQKMVYKSKVKHGIAVVFTHHTTTGLMINEYESGLIEDFKAKMKELIPKGAGYSHDRIDSNAHAHLRASLLLNPEVVIPIDQAELQLGTWQRILFVELDGPRHRRVYVMVCPCPEFPEE

SEQ ID NO: 345 - protein, 187 aa, Thermococcus kodakaraensis KOD1
  misc_feature (414542)..(414542): n is a or c or g or t.
  misc_feature (786890)..(786890): n is a or c or g or t.
  misc_feature (786907)..(786907): n is a or c or g or t.
  misc_feature (786944)..(786946): n is a or c or g or t.
  misc_feature (839139)..(839139): n is a or c or g or t.
  misc_feature (1128488)..(1128488): n is a or c or g or t.
  misc_feature (1128499)..(1128499): n is a or c or g or t.
  misc_feature (1128505)..(1128506): n is a or c or g or t.
  misc_feature (1128517)..(1128518): n is a or c or g or t.
  misc_feature (1128539)..(1128540): n is a or c or g or t.
  misc_feature (1561400)..(1561400): n is a or c or g or t.
  misc_feature (1561477)..(1561477): n is a or c or g or t.
  misc_feature (1561545)..(1561545): n is a or c or g or t.
  misc_feature (1767941)..(1767941): n is a or c or g or t.
MTMLGLFIELGNLKKLKRTGWVLRGVPNPESIADHSFRVALITFFLADELKKRGVEINPDKAVRIALLHDIGEARITDIPQPALKYVDKSEAERKAVEDLLKTSPLPEEYYQLWLEYEEGSTLEGRLVRFADKLEMLIQALEYESAGASGLDEFWNVLENLRSSEFYGHFKDIVDGLEDMRKQKRLL

SEQ ID NO: 346 - protein, 357 aa, Thermococcus kodakaraensis KOD1
  misc_feature (414542)..(414542): n is a or c or g or t.
  misc_feature (786890)..(786890): n is a or c or g or t.
  misc_feature (786907)..(786907): n is a or c or g or t.
  misc_feature (786944)..(786946): n is a or c or g or t.
  misc_feature (839139)..(839139): n is a or c or g or t.
  misc_feature (1128488)..(1128488): n is a or c or g or t.
  misc_feature (1128499)..(1128499): n is a or c or g or t.
  misc_feature (1128505)..(1128506): n is a or c or g or t.
  misc_feature (1128517)..(1128518): n is a or c or g or t.
  misc_feature (1128539)..(1128540): n is a or c or g or t.
  misc_feature (1561400)..(1561400): n is a or c or g or t.
  misc_feature (1561477)..(1561477): n is a or c or g or t.
  misc_feature (1561545)..(1561545): n is a or c or g or t.
  misc_feature (1767941)..(1767941): n is a or c or g or t.
VVQMRKVGLLLTAVLLLAVFSAGCISSSSENANTSEKETTLIVFHAGSLSIPFQGLENEFSAYAEKNLGLKVKFQDEASGSVMAVRKVTDLHRKADIVATADYTLIPQMLVPNYTDFYVLFATNEIVIAFTEESKYADEMKAHPEKWYEILARDDVSFGFSDPNQDPCGYRSVMVMKLADLYYGKPIFETLVEKNTNIYANGTHIYAPKEIQVKNNRIVIRPKETDLTGLVESGSLDYFFIYKSVAEQHNLSYITLPDEINLKDFSKADYYGQVEITLGSTGKTIKAKPIVYGVTVLKDAPNRELAIEFLKFLLGEEGKKVFMENHQDFLNPPVAFGNVPEEIKGLVEVRELTLGQP

SEQ ID NO: 347 - protein, 247 aa, Thermococcus kodakaraensis KOD1
  misc_feature (414542)..(414542): n is a or c or g or t.
  misc_feature (786890)..(786890): n is a or c or g or t.
  misc_feature (786907)..(786907): n is a or c or g or t.
  misc_feature (786944)..(786946): n is a or c or g or t.
  misc_feature (839139)..(839139): n is a or c or g or t.
  misc_feature (1128488)..(1128488): n is a or c or g or t.
  misc_feature (1128499)..(1128499): n is a or c or g or t.
  misc_feature (1128505)..(1128506): n is a or c or g or t.
  misc_feature (1128517)..(1128518): n is a or c or g or t.
  misc_feature (1128539)..(1128540): n is a or c or g or t.
  misc_feature (1561400)..(1561400): n is a or c or g or t.
  misc_feature (1561477)..(1561477): n is a or c or g or t.
  misc_feature (1561545)..(1561545): n is a or c or g or t.
  misc_feature (1767941)..(1767941): n is a or c or g or t.
MRRDYTLYLFAALGTFLIAYIAVPIAVIFLKQASDVEMLVKTLHDPYVIEAIRNSLLTATATALIALLFGVPLGYVLARKDFPGKSAVQALVDVPIVIPHSVVGIMLLVTFSNSILDSYKGIVAAMLFVSAPFTINAARDGFLAVDEKLEAVARTLGASRWRAFLSISLPMAFPSIASGAIMTWARAISEVGAILIVAYYPKTAQVLILEYFNNYGLRASRPIAVIMVSLSLGIFVILRWLVGRKNA

SEQ ID NO: 348 - protein, 241 aa, Thermococcus kodakaraensis KOD1
  misc_feature (414542)..(414542): n is a or c or g or t.
  misc_feature (786890)..(786890): n is a or c or g or t.
  misc_feature (786907)..(786907): n is a or c or g or t.
  misc_feature (786944)..(786946): n is a or c or g or t.
  misc_feature (839139)..(839139): n is a or c or g or t.
  misc_feature (1128488)..(1128488): n is a or c or g or t.
  misc_feature (1128499)..(1128499): n is a or c or g or t.
  misc_feature (1128505)..(1128506): n is a or c or g or t.
  misc_feature (1128517)..(1128518): n is a or c or g or t.
  misc_feature (1128539)..(1128540): n is a or c or g or t.
  misc_feature (1561400)..(1561400): n is a or c or g or t.
  misc_feature (1561477)..(1561477): n is a or c or g or t.
  misc_feature (1561545)..(1561545): n is a or c or g or t.
  misc_feature (1767941)..(1767941): n is a or c or g or t.
VLKKEMSGLNALPTLKVTLKQIDEEHPKFSAGFQIHNLVDNNVLSISLLSSKFDPSLNFEFITPLTLRKFGYVESLYSIGYERKVVKESINILNEAYPEVEGFSPLFKANKWILHVETKYGVYPYYLMGEGFKNAMIIAFLASLLKGGYLLIDSAEAFHHPKSLRVMSKTLVKGAKQNDVQVFLTTHSIELIDMLIKYGLESKVDGRVIYMKRENGNVKASIETFEESQELRETLGLDLRG

SEQ ID NO: 349 - protein, 182 aa, Thermococcus kodakaraensis KOD1
  misc_feature (414542)..(414542): n is a or c or g or t.
  misc_feature (786890)..(786890): n is a or c or g or t.
  misc_feature (786907)..(786907): n is a or c or g or t.
  misc_feature (786944)..(786946): n is a or c or g or t.
  misc_feature (839139)..(839139): n is a or c or g or t.
  misc_feature (1128488)..(1128488): n is a or c or g or t.
  misc_feature (1128499)..(1128499): n is a or c or g or t.
  misc_feature (1128505)..(1128506): n is a or c or g or t.
  misc_feature (1128517)..(1128518): n is a or c or g or t.
  misc_feature (1128539)..(1128540): n is a or c or g or t.
  misc_feature (1561400)..(1561400): n is a or c or g or t.
  misc_feature (1561477)..(1561477): n is a or c or g or t.
  misc_feature (1561545)..(1561545): n is a or c or g or t.
  misc_feature (1767941)..(1767941): n is a or c or g or t.
VWHANGKDNLKNALKLIFKAIERLEDTPAIIGIARDVDTEESILNWAKSTLQSGGFEPDVKDGYLMINGIKVIPFGIGEVDFDARDIDLKKELELLMALLAKKESSLSKLEGSISQLRKDLGRKLTPKDIMHLLAIARNYGGDSMSGLYRNFIEKLIRENRELVEEFLNESGLKEFLNAIAR

SEQ ID NO: 350 - protein, 258 aa, Thermococcus kodakaraensis KOD1
  misc_feature (414542)..(414542): n is a or c or g or t.
  misc_feature (786890)..(786890): n is a or c or g or t.
  misc_feature (786907)..(786907): n is a or c or g or t.
  misc_feature (786944)..(786946): n is a or c or g or t.
  misc_feature (839139)..(839139): n is a or c or g or t.
  misc_feature (1128488)..(1128488): n is a or c or g or t.
  misc_feature (1128499)..(1128499): n is a or c or g or t.
  misc_feature (1128505)..(1128506): n is a or c or g or t.
  misc_feature (1128517)..(1128518): n is a or c or g or t.
  misc_feature (1128539)..(1128540): n is a or c or g or t.
  misc_feature (1561400)..(1561400): n is a or c or g or t.
  misc_feature (1561477)..(1561477): n is a or c or g or t.
  misc_feature (1561545)..(1561545): n is a or c or g or t.
  misc_feature (1767941)..(1767941): n is a or c or g or t.
MRFLKKRGAVGIGTLIVFIAMVLVAAVAAAVLINTSGYLQQKSQSTGRQTTEEVASGIKVTSIVGYAPYDDSNKVYKPISKLAIYVSPNAGSAGIDMKKVRVILSDGSIEAVLKYDNSDADSDGTLDKDVFAVGMPDNVFEDDTGTTAYDGDQYITWSELNDKTFGIIVVQDSDGSLKPLTPTLNKGDIAIIAVRVGNYYVDSNGNLQAYSPTPDGVFGEGIKPNTHITGQVVPEHGAPGVIDFTTPSTYTQSVMELQ

SEQ ID NO: 351 - protein, 219 aa, Thermococcus kodakaraensis KOD1
  misc_feature (414542)..(414542): n is a or c or g or t.
  misc_feature (786890)..(786890): n is a or c or g or t.
  misc_feature (786907)..(786907): n is a or c or g or t.
  misc_feature (786944)..(786946): n is a or c or g or t.
  misc_feature (839139)..(839139): n is a or c or g or t.
  misc_feature (1128488)..(1128488): n is a or c or g or t.
  misc_feature (1128499)..(1128499): n is a or c or g or t.
  misc_feature (1128505)..(1128506): n is a or c or g or t.
  misc_feature (1128517)..(1128518): n is a or c or g or t.
  misc_feature (1128539)..(1128540): n is a or c or g or t.
  misc_feature (1561400)..(1561400): n is a or c or g or t.
  misc_feature (1561477)..(1561477): n is a or c or g or t.
  misc_feature (1561545)..(1561545): n is a or c or g or t.
  misc_feature (1767941)..(1767941): n is a or c or g or t.
MRRRGAIGIGTLIVFIAMVLVAAVAAGVIIGTAGYLEQKAQAAGRQTTQEVASGIKVLNVYGYTNATPPSNGTIERMAIFITPNAGSEGIDLSNVKIVLSDGRRLVVYNYSGSFQNAESVKDLFNMTYVGVWNSTNGTASFGIAVINDIGSEMQGTHPTLEFGDMVALCVWTTMFEYEDKDGIGPSTRITGKVIPERGAAGVLDFTTPATFSYNVMVLQ

SEQ ID NO: 352 - protein, 158 aa, Thermococcus kodakaraensis KOD1
  misc_feature (414542)..(414542): n is a or c or g or t.
  misc_feature (786890)..(786890): n is a or c or g or t.
  misc_feature (786907)..(786907): n is a or c or g or t.
  misc_feature (786944)..(786946): n is a or c or g or t.
  misc_feature (839139)..(839139): n is a or c or g or t.
  misc_feature (1128488)..(1128488): n is a or c or g or t.
  misc_feature (1128499)..(1128499): n is a or c or g or t.
  misc_feature (1128505)..(1128506): n is a or c or g or t.
  misc_feature (1128517)..(1128518): n is a or c or g or t.
  misc_feature (1128539)..(1128540): n is a or c or g or t.
  misc_feature (1561400)..(1561400): n is a or c or g or t.
  misc_feature (1561477)..(1561477): n is a or c or g or t.
  misc_feature (1561545)..(1561545): n is a or c or g or t.
  misc_feature (1767941)..(1767941): n is a or c or g or t.
MALDFLSSLFKKKKTESPAPEEEHIDLEELEEAVENREENEQLNQLMERVNEIENDLPRIKIGIDTLKKQMQELRDEIDRLDKTIKDVMMLYEVISQEINPFKEQMSQENPLSSEIQDIRKELEDLKLEIAQIKNDIKVLAGYGVDLDSIIYEVLAEV

SEQ ID NO: 353 - protein, 474 aa, Thermococcus kodakaraensis KOD1
  misc_feature (414542)..(414542): n is a or c or g or t.
  misc_feature (786890)..(786890): n is a or c or g or t.
  misc_feature (786907)..(786907): n is a or c or g or t.
  misc_feature (786944)..(786946): n is a or c or g or t.
  misc_feature (839139)..(839139): n is a or c or g or t.
  misc_feature (1128488)..(1128488): n is a or c or g or t.
  misc_feature (1128499)..(1128499): n is a or c or g or t.
  misc_feature (1128505)..(1128506): n is a or c or g or t.
  misc_feature (1128517)..(1128518): n is a or c or g or t.
  misc_feature (1128539)..(1128540): n is a or c or g or t.
  misc_feature (1561400)..(1561400): n is a or c or g or t.
  misc_feature (1561477)..(1561477): n is a or c or g or t.
  misc_feature (1561545)..(1561545): n is a or c or g or t.
  misc_feature (1767941)..(1767941): n is a or c or g or t.
MEMARLVTEADINAKLSELKGKVPSVIINELREKLIARKDNLTYEQLEKIVKKVLETYGNQVTKYEELSKRVDELGKRLTDLSMQLTRLVETLETAKFDVHEKKAEKVSEKVEEVHEKIGKLEEILEGGEEKEEVPSEVVQKLEELHKKIEELEEKVEAKTAAEKLEEAQERLEELQEKIRAGEEVSEEELAEAERAVAEAQEEVARAEEQEIEEAPIPAEESEEVSIPAEIEEVPTEETVEVPAEVVPEEAQPEAVEEVPEVGVEEVAPEAEEAPLEVQPEEVVPAEEAAPEMEMEVEALPQEEAPEEVSVEEVPAHEVVEEEKKEEGGVEMASQLQIPEDIASLLFEEEPRKARLEKLPEDIVSTMIALKWLGFLIDRVGIQNLERVLEFYYEIGWISEEVLNQLLNYARGTRPHHRDPEWKPAEKLTVQDHLISLLFIERLRGLKINRAVLDKLEREIKMLEKTLDEFYGI

SEQ ID NO: 354 - protein, 540 aa, Thermococcus kodakaraensis KOD1
  misc_feature (414542)..(414542): n is a or c or g or t.
  misc_feature (786890)..(786890): n is a or c or g or t.
  misc_feature (786907)..(786907): n is a or c or g or t.
  misc_feature (786944)..(786946): n is a or c or g or t.
  misc_feature (839139)..(839139): n is a or c or g or t.
  misc_feature (1128488)..(1128488): n is a or c or g or t.
  misc_feature (1128499)..(1128499): n is a or c or g or t.
  misc_feature (1128505)..(1128506): n is a or c or g or t.
  misc_feature (1128517)..(1128518): n is a or c or g or t.
  misc_feature (1128539)..(1128540): n is a or c or g or t.
  misc_feature (1561400)..(1561400): n is a or c or g or t.
  misc_feature (1561477)..(1561477): n is a or c or g or t.
  misc_feature (1561545)..(1561545): n is a or c or g or t.
  misc_feature (1767941)..(1767941): n is a or c or g or t.
MAQAVISDTLEDAMARNPHLRRYIEQFRKKYGKMPEFHAQLSRDMKDIPYPNILYPVGDPIFVHIYTDPATAEKRYIVIEPRIESAEEEEKYKLIKDKILELAPTRDIPEDQEEFERFLDALFDEAVLSLAKGRRAKFTITKDEMEKFRYLIKRDIIGIGPLEPIARDPYIEDIHIIGAHNVSLVHKIFEMMQTNIDFGDDVKLADYFKNMAERIGRPVSDRTPIVDGALPDGSRINIIYSPDISIKGPSATIRKFSATPISIVQLIGWGTLSAEVAAYLWIALEYGMSVFVCGETASGKTTLLNAIIPFIKPGSKIYTAEDTPEVQVPHPVWQRLITRERGPEESRVTLFDLLKAALRSRPNYIIVGEIRGAEGAIAFQAMQTGHPVMATFHAGDIKKMIQRFTGHPINVPITFIDNLNIAVFQQAVYVKGKFLRRTISVVEIEGYYEELGGVATRNVFEWDSVSDRHIFRGFNNSYILERKIAEIAGYEDPKDIYNELFLRARILQRMVELGITNYWDVYREIKAFYLKGIEGLSFRI

SEQ ID NO: 355 - protein, 664 aa, Thermococcus kodakaraensis KOD1
  misc_feature (414542)..(414542): n is a or c or g or t.
  misc_feature (786890)..(786890): n is a or c or g or t.
  misc_feature (786907)..(786907): n is a or c or g or t.
  misc_feature (786944)..(786946): n is a or c or g or t.
  misc_feature (839139)..(839139): n is a or c or g or t.
  misc_feature (1128488)..(1128488): n is a or c or g or t.
  misc_feature (1128499)..(1128499): n is a or c or g or t.
  misc_feature (1128505)..(1128506): n is a or c or g or t.
  misc_feature (1128517)..(1128518): n is a or c or g or t.
  misc_feature (1128539)..(1128540): n is a or c or g or t.
  misc_feature (1561400)..(1561400): n is a or c or g or t.
  misc_feature (1561477)..(1561477): n is a or c or g or t.
  misc_feature (1561545)..(1561545): n is a or c or g or t.
  misc_feature (1767941)..(1767941): n is a or c or g or t.
MKKVLLFLTLFFLVSTSVPVSSLSAEAMVKLPGSVTVDGINLRFGDLSIDGKLMVDVYVDGSHYRSLTLSPGENVSINDLKFKYEGAYIGSESFAVISLQYSYLLAGDKLVIGDYRFRVLSVDQKGFKINATYKGESKIFTQSSFKIGHLQVKVNSTPNVFDGILNPGENVTVGDHYVKLVKIWASKSGEKVVSGAVFEIDGNSYTLESGKSQTVGSFVVDLKSATIVGELGEEDCDNCKGYAEVSINLLAVSIDAETVPDAQIKLSPGQTASVGPYILRYDYPLGDAVKASLLNNCGQKLAEGRLRLGEISYVLAYPGAIIGLESISDESAEFIVFLDPSEFPDVTKTANLLMSLEVKDTKIKQYVPFDVVLRVKNTGSVALKNALITFEPSKGLKLVSDNTVSIDSIAPGKEAAFTFKVVPIQNGTVELGKAYATVLAPFELACGQCTILTFTSNTANVTVEPSTIKYNVSPTGPESVPVGTPFNLSITVENKGDVSIPANLSIRIPPGVGVELSKDMALKDGAVVVPLSLGPGDKETLVLELVPSSPGNYSITALVETPYGEYSPVKFFFTVISSKTTVITKTEHVTETVSPVETSQGNKTTVTATITNVTTTTEYKTETTTSTVEVPYTPLTTKLLWFGVGVAIGVGVIIGIAWYMSRSS

SEQ ID NO: 356 - protein, 81 aa, Thermococcus kodakaraensis KOD1
  misc_feature (414542)..(414542): n is a or c or g or t.
  misc_feature (786890)..(786890): n is a or c or g or t.
  misc_feature (786907)..(786907): n is a or c or g or t.
  misc_feature (786944)..(786946): n is a or c or g or t.
  misc_feature (839139)..(839139): n is a or c or g or t.
  misc_feature (1128488)..(1128488): n is a or c or g or t.
  misc_feature (1128499)..(1128499): n is a or c or g or t.
  misc_feature (1128505)..(1128506): n is a or c or g or t.
  misc_feature (1128517)..(1128518): n is a or c or g or t.
  misc_feature (1128539)..(1128540): n is a or c or g or t.
  misc_feature (1561400)..(1561400): n is a or c or g or t.
  misc_feature (1561477)..(1561477): n is a or c or g or t.
  misc_feature (1561545)..(1561545): n is a or c or g or t.
  misc_feature (1767941)..(1767941): n is a or c or g or t.
MVRLIAFDLEGTLVRSVSGWVELHKRFGTWEKGKEYAEAFFKGEIDYATWRDWMLPSGKGIPKTRYWSGSAPLSTWRVRRS

SEQ ID NO: 357 - protein, 239 aa, Thermococcus kodakaraensis KOD1
  misc_feature (414542)..(414542): n is a or c or g or t.
  misc_feature (786890)..(786890): n is a or c or g or t.
  misc_feature (786907)..(786907): n is a or c or g or t.
  misc_feature (786944)..(786946): n is a or c or g or t.
  misc_feature (839139)..(839139): n is a or c or g or t.
  misc_feature (1128488)..(1128488): n is a or c or g or t.
  misc_feature (1128499)..(1128499): n is a or c or g or t.
  misc_feature (1128505)..(1128506): n is a or c or g or t.
  misc_feature (1128517)..(1128518): n is a or c or g or t.
  misc_feature (1128539)..(1128540): n is a or c or g or t.
  misc_feature (1561400)..(1561400): n is a or c or g or t.
  misc_feature (1561477)..(1561477): n is a or c or g or t.
  misc_feature (1561545)..(1561545): n is a or c or g or t.
  misc_feature (1767941)..(1767941): n is a or c or g or t.
VLVILMKAVFFDFVGTLITKAGENVTHLNIVREVLKKAGRGDLDAEEVWRAYEEESSALFSELAGKEAVKIRDVDTEAMRRVAERYGFTVPKDFWEISIRMHEKYGQLFPDAVDTIKALKGMGLHVGIITDSDNDYITAHLKALGIYDLFDSITTSEEAGFFKPHPRPFQLALEKAGVKPEEALYVGDNPKKDCVGAKNIGMTSVLLDPNGEKRELWENCDFIVSRLSEVVGIIKGLKG

SEQ ID NO: 358 - protein, 182 aa, Thermococcus kodakaraensis KOD1
  misc_feature (414542)..(414542): n is a or c or g or t.
  misc_feature (786890)..(786890): n is a or c or g or t.
  misc_feature (786907)..(786907): n is a or c or g or t.
  misc_feature (786944)..(786946): n is a or c or g or t.
  misc_feature (839139)..(839139): n is a or c or g or t.
  misc_feature (1128488)..(1128488): n is a or c or g or t.
  misc_feature (1128499)..(1128499): n is a or c or g or t.
  misc_feature (1128505)..(1128506): n is a or c or g or t.
  misc_feature (1128517)..(1128518): n is a or c or g or t.
  misc_feature (1128539)..(1128540): n is a or c or g or t.
  misc_feature (1561400)..(1561400): n is a or c or g or t.
  misc_feature (1561477)..(1561477): n is a or c or g or t.
  misc_feature (1561545)..(1561545): n is a or c or g or t.
  misc_feature (1767941)..(1767941): n is a or c or g or t.
VFTMIHRIASTEKRERILEYILEKEEFGVEEVSGALGISKGLVSLYLKELLGLGLLEKKGRKFFLKSGAELRETKRFLNFWMLRDKILPLREEWMLALGVYGSFARGENGPESDLDIWVLVEKNDPLRIMEFKEELETVTEREIDLLVLTREKLARLKEENPYLYWGIKLSSLVLWGELGEV

SEQ ID NO: 359 - protein, 43 aa, Thermococcus kodakaraensis KOD1
  misc_feature (414542)..(414542): n is a or c or g or t.
  misc_feature (786890)..(786890): n is a or c or g or t.
  misc_feature (786907)..(786907): n is a or c or g or t.
  misc_feature (786944)..(786946): n is a or c or g or t.
  misc_feature (839139)..(839139): n is a or c or g or t.
  misc_feature (1128488)..(1128488): n is a or c or g or t.
  misc_feature (1128499)..(1128499): n is a or c or g or t.
  misc_feature (1128505)..(1128506): n is a or c or g or t.
  misc_feature (1128517)..(1128518): n is a or c or g or t.
  misc_feature (1128539)..(1128540): n is a or c or g or t.
  misc_feature (1561400)..(1561400): n is a or c or g or t.
  misc_feature (1561477)..(1561477): n is a or c or g or t.
  misc_feature (1561545)..(1561545): n is a or c or g or t.
  misc_feature (1767941)..(1767941): n is a or c or g or t.
VLLEALWKAKKKPRVKVKDIFGMMPSEKSAKELRMEFYEEVFG

SEQ ID NO: 360 - protein, 588 aa, Thermococcus kodakaraensis KOD1
  misc_feature (414542)..(414542): n is a or c or g or t.
  misc_feature (786890)..(786890): n is a or c or g or t.
  misc_feature (786907)..(786907): n is a or c or g or t.
  misc_feature (786944)..(786946): n is a or c or g or t.
  misc_feature (839139)..(839139): n is a or c or g or t.
  misc_feature (1128488)..(1128488): n is a or c or g or t.
  misc_feature (1128499)..(1128499): n is a or c or g or t.
  misc_feature (1128505)..(1128506): n is a or c or g or t.
  misc_feature (1128517)..(1128518): n is a or c or g or t.
  misc_feature (1128539)..(1128540): n is a or c or g or t.
  misc_feature (1561400)..(1561400): n is a or c or g or t.
  misc_feature (1561477)..(1561477): n is a or c or g or t.
  misc_feature (1561545)..(1561545): n is a or c or g or t.
  misc_feature (1767941)..(1767941): n is a or c or g or t.
VDVRFRKALGVLVVALFLAALAGTASAAETHVPKIDLPKWVIVPEDSSFSDVTLFCGLDAYDASTNTTPCYYSGTLTNATIVFNTTTGYPKLVTGKIGNAFEFKTGAGVSGSATLSSQQITIALWFKVIDDSDRNYIRLFDIGDLAIVWRSSDNKIYAQWISESGEGKAFISQSSLELGKWYFATFVLSFDTGESYIYIDADVDASTSITGGYTLTSSTFKIHPDTNGGDVIVDEVRVYDGKALSQDEVNLLYLAGRKKLSEPASFRQIFSPLIDLTRDRATFYAGLEVSTTDPSGYVPVPESAVNMSITSAEKLKSDYTNADFYYQGHYWYRADKIQFNLPIQFETIRTNGDFDDVIILDEDQKTYVYEREFKVTNPTGAKLNIVYSLDPTALGFSVLQYPQFELDGVRMVSWRPDENSSQLYLIRTDTLEPGEISTHWIRSIWTLSKEELNFPAKLEDFRNILDWQTAQKMAENAVKGKADTWVKVIKVSSNADVSNVTIYVPLKDVEDTNDVIEAVALTGSRETLQVEELEDGTIAVKVPADAFVSGEAEIKVFYNKETSWWKSILDRIMGMVKMIKSFFGFGGG

SEQ ID NO: 361 - protein, 42 aa, Thermococcus kodakaraensis KOD1
  misc_feature (414542)..(414542): n is a or c or g or t.
  misc_feature (786890)..(786890): n is a or c or g or t.
  misc_feature (786907)..(786907): n is a or c or g or t.
  misc_feature (786944)..(786946): n is a or c or g or t.
  misc_feature (839139)..(839139): n is a or c or g or t.
  misc_feature (1128488)..(1128488): n is a or c or g or t.
  misc_feature (1128499)..(1128499): n is a or c or g or t.
  misc_feature (1128505)..(1128506): n is a or c or g or t.
  misc_feature (1128517)..(1128518): n is a or c or g or t.
  misc_feature (1128539)..(1128540): n is a or c or g or t.
  misc_feature (1561400)..(1561400): n is a or c or g or t.
  misc_feature (1561477)..(1561477): n is a or c or g or t.
  misc_feature (1561545)..(1561545): n is a or c or g or t.
  misc_feature (1767941)..(1767941): n is a or c or g or t.
MFGLTFLNLSPEAAFALGMIVGLLLMWAIEEDLGNHRKEVSA

SEQ ID NO: 362 - protein, 191 aa, Thermococcus kodakaraensis KOD1
  misc_feature (414542)..(414542): n is a or c or g or t.
  misc_feature (786890)..(786890): n is a or c or g or t.
  misc_feature (786907)..(786907): n is a or c or g or t.
  misc_feature (786944)..(786946): n is a or c or g or t.
  misc_feature (839139)..(839139): n is a or c or g or t.
  misc_feature (1128488)..(1128488): n is a or c or g or t.
  misc_feature (1128499)..(1128499): n is a or c or g or t.
  misc_feature (1128505)..(1128506): n is a or c or g or t.
  misc_feature (1128517)..(1128518): n is a or c or g or t.
  misc_feature (1128539)..(1128540): n is a or c or g or t.
  misc_feature (1561400)..(1561400): n is a or c or g or t.
  misc_feature (1561477)..(1561477): n is a or c or g or t.
  misc_feature (1561545)..(1561545): n is a or c or g or t.
  misc_feature (1767941)..(1767941): n is a or c or g or t.
VVVGNSSKGLVESIDVIIERSKNAKLTPEKKYIDIAKTVAKKAEATEKEARGLPNIYVTRKLELAFETIERLKEALEYAFKGIYSGEDVEEKINSMRRVFGRKAHLRTKILMTLLIHGEMKSQDIAKILRKDESTISKAMKFLLLEGYVVRGENGLKLRPGIEDALWELFDDIFGQLEEILLEQTLEGADE

SEQ ID NO: 363 - protein, 385 aa, Thermococcus kodakaraensis KOD1
  misc_feature (414542)..(414542): n is a or c or g or t.
  misc_feature (786890)..(786890): n is a or c or g or t.
  misc_feature (786907)..(786907): n is a or c or g or t.
  misc_feature (786944)..(786946): n is a or c or g or t.
  misc_feature (839139)..(839139): n is a or c or g or t.
  misc_feature (1128488)..(1128488): n is a or c or g or t.
  misc_feature (1128499)..(1128499): n is a or c or g or t.
  misc_feature (1128505)..(1128506): n is a or c or g or t.
  misc_feature (1128517)..(1128518): n is a or c or g or t.
  misc_feature (1128539)..(1128540): n is a or c or g or t.
  misc_feature (1561400)..(1561400): n is a or c or g or t.
  misc_feature (1561477)..(1561477): n is a or c or g or t.
  misc_feature (1561545)..(1561545): n is a or c or g or t.
  misc_feature (1767941)..(1767941): n is a or c or g or t.
MLMRGGRMRKLTFSLIFILYIMGTLGYVAAYSQAIKLHVGDEVYIDDMHIFIDKSRVDNRTAAVIEYQNSTFLVFEGQNKTIGNYTIEVIPFKDYVYLMISAPFNFTARFPEEENLTASNVTVANQTNTTAPAPANLTNSTTSEPANITANYTCSSVEECQAIIAKLENELEKEKQERAELEKQIEYLRQQATFCNMTQVENEQLKKQLRILEQALEEKNQRIRELERQIEELQAQQWSWETFREKSEEQYLLWTPYLFPVVLGGLVVYYRRYKTTKKYAEVMIDQKARELKEELLSEYLKKDLLRAKIETIVDDPNLLVILRTIIPQITGSTEITKGDILNIDIDQVAELARKKFLLKENRVEYLKKKLAELKEAIKEEVGENV

SEQ ID NO: 364 - protein, 478 aa, Thermococcus kodakaraensis KOD1
  misc_feature (414542)..(414542): n is a or c or g or t.
  misc_feature (786890)..(786890): n is a or c or g or t.
  misc_feature (786907)..(786907): n is a or c or g or t.
  misc_feature (786944)..(786946): n is a or c or g or t.
  misc_feature (839139)..(839139): n is a or c or g or t.
  misc_feature (1128488)..(1128488): n is a or c or g or t.
  misc_feature (1128499)..(1128499): n is a or c or g or t.
  misc_feature (1128505)..(1128506): n is a or c or g or t.
  misc_feature (1128517)..(1128518): n is a or c or g or t.
  misc_feature (1128539)..(1128540): n is a or c or g or t.
  misc_feature (1561400)..(1561400): n is a or c or g or t.
  misc_feature (1561477)..(1561477): n is a or c or g or t.
  misc_feature (1561545)..(1561545): n is a or c or g or t.
  misc_feature (1767941)..(1767941): n is a or c or g or t.
MKRLAAFLLFLLAGTMVPAGIVGAEQQLVTTFQVTAGKTWTKEIPGAIVNWTGTFDYSKRDGWEAAFSVYFTETGNTHGVAATENGFVDADGKYIWFLKNVQTEDNPETRELGVLESWHELVVKFIDPLSGKVVIDNDYNGETYTLYVGDEIDISGELADAWREKTILELRSIETSLFGSKAVLILQHITAVSGTVEIYPYQEQTSEPNSPNENQTNETTPQKPLIDPAKVPAVMIVVGEHAAGADVAAGAKVGIAVQKWIDIIKEKGAEFAIPGLGHLGGLIAKAVTAPVQNLNADAMLDSEVKDPDRIAPIVYTVGGPVANEYTKLILEKNADRLPVKFIKENGKWYIKDRKGNKWDNGYGIILIIPASENPAELQIRLMNGKIKMADVVVAGTDRVGTYAACELLQGEFLKPLLGEKPKPELEYFLQLQGRMLLLFGQNPLEAFDVNLDPTNPFKFQVTAVIVDKDGRIVKVIVG

SEQ ID NO: 365 - protein, 436 aa, Thermococcus kodakaraensis KOD1
  misc_feature (414542)..(414542): n is a or c or g or t.
  misc_feature (786890)..(786890): n is a or c or g or t.
  misc_feature (786907)..(786907): n is a or c or g or t.
  misc_feature (786944)..(786946): n is a or c or g or t.
  misc_feature (839139)..(839139): n is a or c or g or t.
  misc_feature (1128488)..(1128488): n is a or c or g or t.
  misc_feature (1128499)..(1128499): n is a or c or g or t.
  misc_feature (1128505)..(1128506): n is a or c or g or t.
  misc_feature (1128517)..(1128518): n is a or c or g or t.
  misc_feature (1128539)..(1128540): n is a or c or g or t.
  misc_feature (1561400)..(1561400): n is a or c or g or t.
  misc_feature (1561477)..(1561477): n is a or c or g or t.
  misc_feature (1561545)..(1561545): n is a or c or g or t.
  misc_feature (1767941)..(1767941): n is a or c or g or t.
VGLFLLFVLVVMPATASHVQSATITIQDTPEGEGLVLVPNTTTEVTFSIVSSSGDPFTSATFPTADVISVTAEFVDDYGNALDIDNDGTADIWNCTEDPNVPGLWKANITLGANAEPGVYSLKIKAIAKNSTTNEIIDQGELSIETLILGGQYAIQFFNVKDDDHFELDPLDIRIGALSDLGSIVSIGNLTNTLALRDNNTDGVWGQRIDLNNDGNLDGWLTFIKNEDSYDMIIFTNNQSLIDSLMPEESFRIRGDEITFTNRLLRDTRDYHHFNYYTQILWDNSFLANLGLKATDYYIIPYKGAENWKITQFSNGRILSAVMRVKIVKRTTFLGIFTSEEVPLDGNIWTVSTKNVDRLSLSPKVVRWSWYPSRGYGIIWTAAVDITAPKGYSIKQRQDYNVEFRGDNPLDGLNPISSFFSKDSVDWYGLLGGDEE

SEQ ID NO: 366 - protein, 60 aa, Thermococcus kodakaraensis KOD1
  misc_feature (414542)..(414542): n is a or c or g or t.
  misc_feature (786890)..(786890): n is a or c or g or t.
  misc_feature (786907)..(786907): n is a or c or g or t.
  misc_feature (786944)..(786946): n is a or c or g or t.
  misc_feature (839139)..(839139): n is a or c or g or t.
  misc_feature (1128488)..(1128488): n is a or c or g or t.
  misc_feature (1128499)..(1128499): n is a or c or g or t.
  misc_feature (1128505)..(1128506): n is a or c or g or t.
  misc_feature (1128517)..(1128518): n is a or c or g or t.
  misc_feature (1128539)..(1128540): n is a or c or g or t.
  misc_feature (1561400)..(1561400): n is a or c or g or t.
  misc_feature (1561477)..(1561477): n is a or c or g or t.
  misc_feature (1561545)..(1561545): n is a or c or g or t.
  misc_feature (1767941)..(1767941): n is a or c or g or t.
VVGMGREDWEYLPVKKATRTTVEKLRALLILQRGEKLTYDDTIRYLLQFLPSEIKAQIEG

SEQ ID NO: 367 - protein, 914 aa, Thermococcus kodakaraensis KOD1
  misc_feature (414542)..(414542): n is a or c or g or t.
  misc_feature (786890)..(786890): n is a or c or g or t.
  misc_feature (786907)..(786907): n is a or c or g or t.
  misc_feature (786944)..(786946): n is a or c or g or t.
  misc_feature (839139)..(839139): n is a or c or g or t.
  misc_feature (1128488)..(1128488): n is a or c or g or t.
  misc_feature (1128499)..(1128499): n is a or c or g or t.
  misc_feature (1128505)..(1128506): n is a or c or g or t.
  misc_feature (1128517)..(1128518): n is a or c or g or t.
  misc_feature (1128539)..(1128540): n is a or c or g or t.
  misc_feature (1561400)..(1561400): n is a or c or g or t.
  misc_feature (1561477)..(1561477): n is a or c or g or t.
  misc_feature (1561545)..(1561545): n is a or c or g or t.
  misc_feature (1767941)..(1767941): n is a or c or g or t.
MSEDINFDFAWKFLIGLIQNGKTEMKVSTLPNSLQKVAKSIGYEDDDTVPLLTLKEYLEKTWGHISPNPQVPKSPQEGWGQLEPESPSPQEDSPVDESLGDSDESIISEITPYLEAIQRVVTDADRTEKRLAIYLLLKNGEMYDPDLRKELAPLGQYFSKNKEPYKVKTIKNVISFVRNSPHVWSSKDPTTGMFVYRLKDETVKAILQELQMVLQEREVLQKQEELKQADEEKLVRAFFDFFMNYVEDGKHVFLDQLRNLLVLGEDRGLRVDWHVLDAVNPSLAERLINEPDVVISAAEKAVLEVLNEPEFMLYEERPRIHVRFVNLPKTISPRAVRSEHIGRLVQARGVVSAIAEGEKSNGVKGFIEKAVFVCPKCGYEVSLLQKPYENFVVPKECPACGARLSADNLSVEKSTVIDMREIFVQDPSDALHAAGTASYVRVILLDDNARMDVNPGDEVLITGVVRGIMRKKNGKPALGWVLEANSLTKLTKDIEDLEITPEDVQKFQDMVKDPEFDSKLIRSLAPAITGREVEKKAVLLALFSGEDYDITGTHVRKRSHVLLFGDASTGKSEIIRHAAQIAPGGVHSTGTHSSGVGLTAAIDSMDGVRVLRAGVLVLADRGVAALDELDKMREEDYDKMLDALEQGWFPYNKAGFNTRLMARAVVIAAANPPGGEFDRHNYKPFDELKRLFDQPFYSRFDLIIPTFRNTEDSVLEEIADAVLDKHEGKIEPPYDSELLTKFIAYARREIPRVVLPQALRGVMKKYMVDLAKAIGSAAPRAMEAIIRLTEAHARMHLRKEATLADFLAAKELFDEMITRLAGSSDEEEKEEVMKGLAGVIWTEEKKRKVDKLWSILKYYEALDERGEGVHINDIIEEAEQQGIERSEVLVLLEDMERANMVEQSKPGFYRLRRR

SEQ ID NO: 368 - protein, 185 aa, Thermococcus kodakaraensis KOD1
  misc_feature (414542)..(414542): n is a or c or g or t.
  misc_feature (786890)..(786890): n is a or c or g or t.
  misc_feature (786907)..(786907): n is a or c or g or t.
  misc_feature (786944)..(786946): n is a or c or g or t.
  misc_feature (839139)..(839139): n is a or c or g or t.
  misc_feature (1128488)..(1128488): n is a or c or g or t.
  misc_feature (1128499)..(1128499): n is a or c or g or t.
  misc_feature (1128505)..(1128506): n is a or c or g or t.
  misc_feature (1128517)..(1128518): n is a or c or g or t.
  misc_feature (1128539)..(1128540): n is a or c or g or t.
  misc_feature (1561400)..(1561400): n is a or c or g or t.
  misc_feature (1561477)..(1561477): n is a or c or g or t.
  misc_feature (1561545)..(1561545): n is a or c or g or t.
  misc_feature (1767941)..(1767941): n is a or c or g or t.
MIRQAAKYGRHVYRPFFDYMQREIRSAENRYIFSTLVEDAFPGKFSLYDLDELVFRKNSNEPLAAFELKFISWRVIKDAWAQGELEINGWQFQRLRRLSELLAVPLYYFIQIGNEEQFVMFNVQQVEPSFEYRRGGSARDYYAVISLDDVIVSRSFEEFVDDLGLLLGVNLAKPAQIPAYAVGGR

SEQ ID NO: 369 - protein, 175 aa, Thermococcus kodakaraensis KOD1
  misc_feature (414542)..(414542): n is a or c or g or t.
  misc_feature (786890)..(786890): n is a or c or g or t.
  misc_feature (786907)..(786907): n is a or c or g or t.
  misc_feature (786944)..(786946): n is a or c or g or t.
  misc_feature (839139)..(839139): n is a or c or g or t.
  misc_feature (1128488)..(1128488): n is a or c or g or t.
  misc_feature (1128499)..(1128499): n is a or c or g or t.
  misc_feature (1128505)..(1128506): n is a or c or g or t.
  misc_feature (1128517)..(1128518): n is a or c or g or t.
  misc_feature (1128539)..(1128540): n is a or c or g or t.
  misc_feature (1561400)..(1561400): n is a or c or g or t.
  misc_feature (1561477)..(1561477): n is a or c or g or t.
  misc_feature (1561545)..(1561545): n is a or c or g or t.
  misc_feature (1767941)..(1767941): n is a or c or g or t.
VRNVVKPFAWDKGLDYEKTYRQILNHYRQATRDTSKAYDIILLTQLRNGSRLTEAINFLKKLIEEKPFKRQKYIKVEKRKDGYERLMVLPEEIDKKELMRVSYVIKEANKWKVSTYCKRTYGFNTHALRYALISYLSQKGVAPQLIAKITGHKTLDYILYYTQQQKAEELLKDLR

SEQ ID NO: 370 - protein, 62 aa, Thermococcus kodakaraensis KOD1
  misc_feature (414542)..(414542): n is a or c or g or t.
  misc_feature (786890)..(786890): n is a or c or g or t.
  misc_feature (786907)..(786907): n is a or c or g or t.
  misc_feature (786944)..(786946): n is a or c or g or t.
  misc_feature (839139)..(839139): n is a or c or g or t.
  misc_feature (1128488)..(1128488): n is a or c or g or t.
  misc_feature (1128499)..(1128499): n is a or c or g or t.
  misc_feature (1128505)..(1128506): n is a or c or g or t.
  misc_feature (1128517)..(1128518): n is a or c or g or t.
  misc_feature (1128539)..(1128540): n is a or c or g or t.
  misc_feature (1561400)..(1561400): n is a or c or g or t.
  misc_feature (1561477)..(1561477): n is a or c or g or t.
  misc_feature (1561545)..(1561545): n is a or c or g or t.
  misc_feature (1767941)..(1767941): n is a or c or g or t.
VINMGLGAEGWALLLVPTILGFLVMVLYGYWDKITGKEYYVDADILAYDEDLIEELKKEGKA

SEQ ID NO: 371 - protein, 483 aa, Thermococcus kodakaraensis KOD1
  misc_feature (414542)..(414542): n is a or c or g or t.
  misc_feature (786890)..(786890): n is a or c or g or t.
  misc_feature (786907)..(786907): n is a or c or g or t.
  misc_feature (786944)..(786946): n is a or c or g or t.
  misc_feature (839139)..(839139): n is a or c or g or t.
  misc_feature (1128488)..(1128488): n is a or c or g or t.
  misc_feature (1128499)..(1128499): n is a or c or g or t.
  misc_feature (1128505)..(1128506): n is a or c or g or t.
  misc_feature (1128517)..(1128518): n is a or c or g or t.
  misc_feature (1128539)..(1128540): n is a or c or g or t.
  misc_feature (1561400)..(1561400): n is a or c or g or t.
  misc_feature (1561477)..(1561477): n is a or c or g or t.
  misc_feature (1561545)..(1561545): n is a or c or g or t.
  misc_feature (1767941)..(1767941): n is a or c or g or t.
MRITEHPVLRFERGRKVTIYFEGRPIEAYEGETIAMALHAAGIRVLSHSGEKHRPRGLFCAIGKCSSCLVKVNGIPNVRSCITLVEDGMRIEMQKGKEILPRTAKPPEWKDATRYEADVVVIGGGPAGLMAAIHAADAGASVILIDEQPKLGGQLVKQTHKFFGKREQFAGVRGVEIARILTEEVRKREKIRVFTETSAVGIFQDGDEKLVIGVRKNRELVEFSGKALVVATGAMEKMIPFENNDLPGIYGAGAIQTLMNTYGVKPGDRVLIVGAGNVGLILAYQLIQAGVEVKAIVEAMPKVGGYFVHAAKVRRLGVPILTRHTILRAEGTDRVERAVVAQLDENWRPIPGTEKVFEVDTIALAVGLRPSIELLHQAGCQIKFVRELGGHVAVRDERMETTVQGIFVAGDSAGIEEATTAMLEGKIAGIAAALKAGVATPEWLGEIEKAQRDLEEFRSGPFGKHIVEGIKKALLPAGGGSNV

SEQ ID NO: 372 - protein, 388 aa, Thermococcus kodakaraensis KOD1
  misc_feature (414542)..(414542): n is a or c or g or t.
  misc_feature (786890)..(786890): n is a or c or g or t.
  misc_feature (786907)..(786907): n is a or c or g or t.
  misc_feature (786944)..(786946): n is a or c or g or t.
  misc_feature (839139)..(839139): n is a or c or g or t.
  misc_feature (1128488)..(1128488): n is a or c or g or t.
  misc_feature (1128499)..(1128499): n is a or c or g or t.
  misc_feature (1128505)..(1128506): n is a or c or g or t.
  misc_feature (1128517)..(1128518): n is a or c or g or t.
  misc_feature (1128539)..(1128540): n is a or c or g or t.
  misc_feature (1561400)..(1561400): n is a or c or g or t.
  misc_feature (1561477)..(1561477): n is a or c or g or t.
  misc_feature (1561545)..(1561545): n is a or c or g or t.
  misc_feature (1767941)..(1767941): n is a or c or g or t.
VMTMKSEAKTVIIGGGIIGLSIAYNLAKLGESDIVVLEKGYLGNGSTFRCGTGIRQQFGDEANIRMMKRSVELWKGLKEELGYDVEFTQSGYLFLIYSEEELEAFNNNVRLQNRFGVPSRIITPEEAKEIVPPLNTDGVIAAAWNHTDGKANPFKAVFAYANAAKRLGVEIYEYTEAKDIKVEDGKIKAVVTNRGEIRTGRVINAANAWAPLINKMAGVPIKIPIEPYKHQSVKTEPIKPGQIEPMVISFKHGGVYMTQEANQGGVIGGYGLKYGPTYDITPTYDFLRGVSYRFAQIIPALKYVNIIRVWGGFYAETPDHNAAIGRINEIDEFYIAAGFSGHGFMLAPVVGEALAELIVDGKTDKPLDFYDPYRFERGELRGQALQMG

SEQ ID NO: 373 - protein, 227 aa, Thermococcus kodakaraensis KOD1
  misc_feature (414542)..(414542): n is a or c or g or t.
  misc_feature (786890)..(786890): n is a or c or g or t.
  misc_feature (786907)..(786907): n is a or c or g or t.
  misc_feature (786944)..(786946): n is a or c or g or t.
  misc_feature (839139)..(839139): n is a or c or g or t.
  misc_feature (1128488)..(1128488): n is a or c or g or t.
  misc_feature (1128499)..(1128499): n is a or c or g or t.
  misc_feature (1128505)..(1128506): n is a or c or g or t.
  misc_feature (1128517)..(1128518): n is a or c or g or t.
  misc_feature (1128539)..(1128540): n is a or c or g or t.
  misc_feature (1561400)..(1561400): n is a or c or g or t.
  misc_feature (1561477)..(1561477): n is a or c or g or t.
  misc_feature (1561545)..(1561545): n is a or c or g or t.
  misc_feature (1767941)..(1767941): n is a or c or g or t.
VMAMVKVKFLGHAAFLIEGSKKILIDPFLSGNPKAAVKPEEVEADLILVTHAHGDHIGDAIEIARRSGAKIVAMYDIANYISQKASDVETIGMNYGPTTIDGVFIVQVPAWHSSSDGVHNIGNPCGYIVKLDGVTIYHAGDTFVFGDMALFNELYGPIDVALLPIGGHFTMGPREAAKAVELLKPRKVVPMHYNTWPPIAQDPEEFKRLVGDKAEVVILQPGEELEL

SEQ ID NO: 374 - protein, 334 aa, Thermococcus kodakaraensis KOD1
  misc_feature (414542)..(414542): n is a or c or g or t.
  misc_feature (786890)..(786890): n is a or c or g or t.
  misc_feature (786907)..(786907): n is a or c or g or t.
  misc_feature (786944)..(786946): n is a or c or g or t.
  misc_feature (839139)..(839139): n is a or c or g or t.
  misc_feature (1128488)..(1128488): n is a or c or g or t.
  misc_feature (1128499)..(1128499): n is a or c or g or t.
  misc_feature (1128505)..(1128506): n is a or c or g or t.
  misc_feature (1128517)..(1128518): n is a or c or g or t.
  misc_feature (1128539)..(1128540): n is a or c or g or t.
  misc_feature (1561400)..(1561400): n is a or c or g or t.
  misc_feature (1561477)..(1561477): n is a or c or g or t.
  misc_feature (1561545)..(1561545): n is a or c or g or t.
  misc_feature (1767941)..(1767941): n is a or c or g or t.
MGRKIPAVAVIALFLFPLLLPTASGQNQDYEYDLIIVRNDDLIDYIVALPYSKHLDVPILPVNPQELDPATLAQLQSYEQFGWYHVLVIGDYQAISQRVQEQLMSLGFQVTRIGGETRVDTAAKLAEEFYPSGIDAVVLASASDYGSALAAARWAMAYDRPFLLTNPSNISQSVKDTLARLKPETVILIGAGLSKNIEKELQDMGYNTYWLQENITISVPTSTVPEGINWGYVVGAVVLTLAVAIPASLYYAKKKWAANRVPIEVLTEKERAVVKAILENGGTIKQEELPELTGYSRPTISRIIQELEKKQLVEREKTGKTFIVKLTKEIIMRD

SEQ ID NO: 375 - protein, 173 aa, Thermococcus kodakaraensis KOD1
  misc_feature (414542)..(414542): n is a or c or g or t.
  misc_feature (786890)..(786890): n is a or c or g or t.
  misc_feature (786907)..(786907): n is a or c or g or t.
  misc_feature (786944)..(786946): n is a or c or g or t.
  misc_feature (839139)..(839139): n is a or c or g or t.
  misc_feature (1128488)..(1128488): n is a or c or g or t.
  misc_feature (1128499)..(1128499): n is a or c or g or t.
  misc_feature (1128505)..(1128506): n is a or c or g or t.
  misc_feature (1128517)..(1128518): n is a or c or g or t.
  misc_feature (1128539)..(1128540): n is a or c or g or t.
  misc_feature (1561400)..(1561400): n is a or c or g or t.
  misc_feature (1561477)..(1561477): n is a or c or g or t.
  misc_feature (1561545)..(1561545): n is a or c or g or t.
  misc_feature (1767941)..(1767941): n is a or c or g or t.
MMEHFASTARKFGLSELYGYIYGVLFFEDEPMSLGEIAERTGYSLSHASSALKFLENLGLVVRIKKPGDRKAYYKAVKNIQEWRRAAYYKRILEDVKETRESLLRALEELEGEESGEAERVRERIELLLKKNLVAEKIAEILSKGDEKVLRVIIDCIEKRSKRTSDDGSGAAL

SEQ ID NO: 376 - protein, 205 aa, Thermococcus kodakaraensis KOD1
  misc_feature (414542)..(414542): n is a or c or g or t.
  misc_feature (786890)..(786890): n is a or c or g or t.
  misc_feature (786907)..(786907): n is a or c or g or t.
  misc_feature (786944)..(786946): n is a or c or g or t.
  misc_feature (839139)..(839139): n is a or c or g or t.
  misc_feature (1128488)..(1128488): n is a or c or g or t.
  misc_feature (1128499)..(1128499): n is a or c or g or t.
  misc_feature (1128505)..(1128506): n is a or c or g or t.
  misc_feature (1128517)..(1128518): n is a or c or g or t.
  misc_feature (1128539)..(1128540): n is a or c or g or t.
  misc_feature (1561400)..(1561400): n is a or c or g or t.
  misc_feature (1561477)..(1561477): n is a or c or g or t.
  misc_feature (1561545)..(1561545): n is a or c or g or t.
  misc_feature (1767941)..(1767941): n is a or c or g or t.
MYRIKDEWGEFLVRLARRAVEEYVRHKRVIEPPEDTPTELWEKMGVFVTLNRHNVPPQMALRGCIGFPLPIYPLVEATIKAAIYAAVDDPRFPPVQPEELDELTVEVSVLTPPELVEGPPEGRPKKIKVGRDGLLIEKGIYSGLLLPQVPVEWGWDEEEFLAQTCWKAGLPPDCWLDPDTKVYRFTAEIFEEEYPRGPVRRKPLV

SEQ ID NO: 377 - protein, 108 aa, Thermococcus kodakaraensis KOD1
  misc_feature (414542)..(414542): n is a or c or g or t.
  misc_feature (786890)..(786890): n is a or c or g or t.
  misc_feature (786907)..(786907): n is a or c or g or t.
  misc_feature (786944)..(786946): n is a or c or g or t.
  misc_feature (839139)..(839139): n is a or c or g or t.
  misc_feature (1128488)..(1128488): n is a or c or g or t.
  misc_feature (1128499)..(1128499): n is a or c or g or t.
  misc_feature (1128505)..(1128506): n is a or c or g or t.
  misc_feature (1128517)..(1128518): n is a or c or g or t.
  misc_feature (1128539)..(1128540): n is a or c or g or t.
  misc_feature (1561400)..(1561400): n is a or c or g or t.
  misc_feature (1561477)..(1561477): n is a or c or g or t.
  misc_feature (1561545)..(1561545): n is a or c or g or t.
  misc_feature (1767941)..(1767941): n is a or c or g or t.
MGGAKTFFGREGLFLLKMSGRGIVFLSSFGAIYKKELHNERFIIDTGHMVAFSEGLDFNVKRVGGLKSTLFSGEGLVAEFYGTGTLYIQTRSMDSFLSWLVPHLPKRD

SEQ ID NO: 378 - protein, 421 aa, Thermococcus kodakaraensis KOD1
  misc_feature (414542)..(414542): n is a or c or g or t.
  misc_feature (786890)..(786890): n is a or c or g or t.
  misc_feature (786907)..(786907): n is a or c or g or t.
  misc_feature (786944)..(786946): n is a or c or g or t.
  misc_feature (839139)..(839139): n is a or c or g or t.
  misc_feature (1128488)..(1128488): n is a or c or g or t.
  misc_feature (1128499)..(1128499): n is a or c or g or t.
  misc_feature (1128505)..(1128506): n is a or c or g or t.
  misc_feature (1128517)..(1128518): n is a or c or g or t.
  misc_feature (1128539)..(1128540): n is a or c or g or t.
  misc_feature (1561400)..(1561400): n is a or c or g or t.
  misc_feature (1561477)..(1561477): n is a or c or g or t.
  misc_feature (1561545)..(1561545): n is a or c or g or t.
  misc_feature (1767941)..(1767941): n is a or c or g or t.
VVMVMQEKLENKLAAQPLDFESFFSQKAMEMKASEVRELLKLVETSDVISLAGGLPAPETFPVDIIKEITMEVLSKHADKALQYGTTKGFTPLRLALARWMEKRYGIPMSKVEVMIVAGSQQALDLIGRVFIDPGDIVVVEAPTYLAALNAFKFYDPEFISIPLDDDGMKVDVLEEKLKKLKAEGKRIKFVYTVSTFQNPAGVTMSLERRKHLIELANEYDFLIVEDNPYSELRYSGEPIPPIKHFDDEGRVIYLGTFSKIFAPGFRLGWVSAHPHFIRKMEIAKQAVDLCANPFGQVIAWKYVEDGHLDRHIPRVIEFYKPRRDAMLEALEEYMPEGVRWTKPDGGMFIWVTLPEGIDTKLMMEKAVAKGVAYVPGEAFFAHREVKNTMRLNFTYVPEEKIREGVRRLAEVIEEEIKKLK

SEQ ID NO: 379 - protein, 65 aa, Thermococcus kodakaraensis KOD1
  misc_feature (414542)..(414542): n is a or c or g or t.
  misc_feature (786890)..(786890): n is a or c or g or t.
  misc_feature (786907)..(786907): n is a or c or g or t.
  misc_feature (786944)..(786946): n is a or c or g or t.
  misc_feature (839139)..(839139): n is a or c or g or t.
  misc_feature (1128488)..(1128488): n is a or c or g or t.
  misc_feature (1128499)..(1128499): n is a or c or g or t.
  misc_feature (1128505)..(1128506): n is a or c or g or t.
  misc_feature (1128517)..(1128518): n is a or c or g or t.
  misc_feature (1128539)..(1128540): n is a or c or g or t.
  misc_feature (1561400)..(1561400): n is a or c or g or t.
  misc_feature (1561477)..(1561477): n is a or c or g or t.
  misc_feature (1561545)..(1561545): n is a or c or g or t.
  misc_feature (1767941)..(1767941): n is a or c or g or t.
VTSKIPDIRAILVYDSTDCPEIEDFIYTFSDIVVEVTREMFKRKAYVTKGLEPEVFDPFEGDEHD

SEQ ID NO: 380 - protein, 54 aa, Thermococcus kodakaraensis KOD1
  misc_feature (414542)..(414542): n is a or c or g or t.
  misc_feature (786890)..(786890): n is a or c or g or t.
  misc_feature (786907)..(786907): n is a or c or g or t.
  misc_feature (786944)..(786946): n is a or c or g or t.
  misc_feature (839139)..(839139): n is a or c or g or t.
  misc_feature (1128488)..(1128488): n is a or c or g or t.
  misc_feature (1128499)..(1128499): n is a or c or g or t.
  misc_feature (1128505)..(1128506): n is a or c or g or t.
  misc_feature (1128517)..(1128518): n is a or c or g or t.
  misc_feature (1128539)..(1128540): n is a or c or g or t.
  misc_feature (1561400)..(1561400): n is a or c or g or t.
  misc_feature (1561477)..(1561477): n is a or c or g or t.
  misc_feature (1561545)..(1561545): n is a or c or g or t.
  misc_feature (1767941)..(1767941): n is a or c or g or t.
MELTVRKKAFLEELPDVVKTAVEEYGTALKGIEIKEDDKGCYTVMITYERELRL

SEQ ID NO: 381 - protein, 452 aa, Thermococcus kodakaraensis KOD1
  misc_feature (414542)..(414542): n is a or c or g or t.
  misc_feature (786890)..(786890): n is a or c or g or t.
  misc_feature (786907)..(786907): n is a or c or g or t.
  misc_feature (786944)..(786946): n is a or c or g or t.
  misc_feature (839139)..(839139): n is a or c or g or t.
  misc_feature (1128488)..(1128488): n is a or c or g or t.
  misc_feature (1128499)..(1128499): n is a or c or g or t.
  misc_feature (1128505)..(1128506): n is a or c or g or t.
  misc_feature (1128517)..(1128518): n is a or c or g or t.
  misc_feature (1128539)..(1128540): n is a or c or g or t.
  misc_feature (1561400)..(1561400): n is a or c or g or t.
  misc_feature (1561477)..(1561477): n is a or c or g or t.
  misc_feature (1561545)..(1561545): n is a or c or g or t.
  misc_feature (1767941)..(1767941): n is a or c or g or t.
VRAMREKCGVFAALSENAPKKAYYALIALQHRGQESAGISVWKHRIRTVAGRGLIQDVFNGKTLSSLRSNLAIGHVRYSTSGSLSETQPLETECCGKRIAVAHNGTLTNFLPLRKSYENRGVRFHHSVDSELLGISFLWHLNETGDEFEAMREVFNEVKGAYSVALLFDGKILVARDSVGFRPLSYGIGDGHYFASEDSALRLFVDETEGGEIRDVRPGEVFLLSEGSVESRVLAREKHHHCVFEYIYFARPDSTIDGVNVYHARVKMGRELARESPADADVVIAVPDSGRAAALGFSMESGIPYSEGLIKNRYIGRTFITPGQFYRELKVKLKLSPVREVINGKRVVLVDDSIVRGTTMRRLVSLLRKAGAKEVHVRIASPPIRHPCYMGIDIPTRHELIAAFGSVEKVRGAIGADSLAYLSVEGLIRAVGKKDLCLACLTGEYPEWAFRF

SEQ ID NO: 382 - protein, 122 aa, Thermococcus kodakaraensis KOD1
  misc_feature (414542)..(414542): n is a or c or g or t.
  misc_feature (786890)..(786890): n is a or c or g or t.
  misc_feature (786907)..(786907): n is a or c or g or t.
  misc_feature (786944)..(786946): n is a or c or g or t.
  misc_feature (839139)..(839139): n is a or c or g or t.
  misc_feature (1128488)..(1128488): n is a or c or g or t.
  misc_feature (1128499)..(1128499): n is a or c or g or t.
  misc_feature (1128505)..(1128506): n is a or c or g or t.
  misc_feature (1128517)..(1128518): n is a or c or g or t.
  misc_feature (1128539)..(1128540): n is a or c or g or t.
  misc_feature (1561400)..(1561400): n is a or c or g or t.
  misc_feature (1561477)..(1561477): n is a or c or g or t.
  misc_feature (1561545)..(1561545): n is a or c or g or t.
  misc_feature (1767941)..(1767941): n is a or c or g or t.
MSSKGRAIEAMIERGRKRYLMIKNYKRYLPAIKRACEEVFGKCELYVFGSVLTGKFTAGSDVDLMIKVQKVPKSLRERAELEARIEELAGLPDYHPFEFHIVDEEGFERYVKLLKAELKKVE

SEQ ID NO: 383 - protein, 171 aa, Thermococcus kodakaraensis KOD1
  misc_feature (414542)..(414542): n is a or c or g or t.
  misc_feature (786890)..(786890): n is a or c or g or t.
  misc_feature (786907)..(786907): n is a or c or g or t.
  misc_feature (786944)..(786946): n is a or c or g or t.
  misc_feature (839139)..(839139): n is a or c or g or t.
  misc_feature (1128488)..(1128488): n is a or c or g or t.
  misc_feature (1128499)..(1128499): n is a or c or g or t.
  misc_feature (1128505)..(1128506): n is a or c or g or t.
  misc_feature (1128517)..(1128518): n is a or c or g or t.
  misc_feature (1128539)..(1128540): n is a or c or g or t.
  misc_feature (1561400)..(1561400): n is a or c or g or t.
  misc_feature (1561477)..(1561477): n is a or c or g or t.
  misc_feature (1561545)..(1561545): n is a or c or g or t.
  misc_feature (1767941)..(1767941): n is a or c or g or t.
MIIEVIGMVNAEKIERLIDEIVEEMRNAKTPEELEALQRKVEMLEDLIEAVEGDKDIEKAAILMDKIGPIMEDIIEPIKELLKELYNPEKMAAMGKSVADFYKNLVEAGMDKEAALELTKEYMASINVVKTLTETFANMMASKGGNVSVNIPLGHKKVREIEIEEEEEKEE

SEQ ID NO: 384 - protein, 38 aa, Thermococcus kodakaraensis KOD1
  misc_feature (414542)..(414542): n is a or c or g or t.
  misc_feature (786890)..(786890): n is a or c or g or t.
  misc_feature (786907)..(786907): n is a or c or g or t.
  misc_feature (786944)..(786946): n is a or c or g or t.
  misc_feature (839139)..(839139): n is a or c or g or t.
  misc_feature (1128488)..(1128488): n is a or c or g or t.
  misc_feature (1128499)..(1128499): n is a or c or g or t.
  misc_feature (1128505)..(1128506): n is a or c or g or t.
  misc_feature (1128517)..(1128518): n is a or c or g or t.
  misc_feature (1128539)..(1128540): n is a or c or g or t.
  misc_feature (1561400)..(1561400): n is a or c or g or t.
  misc_feature (1561477)..(1561477): n is a or c or g or t.
  misc_feature (1561545)..(1561545): n is a or c or g or t.
  misc_feature (1767941)..(1767941): n is a or c or g or t.
MRIVFGLSNSSASLYATGAAIYTLAFFALVAKNMKWRE

SEQ ID NO: 385 - protein, 206 aa, Thermococcus kodakaraensis KOD1
  misc_feature (414542)..(414542): n is a or c or g or t.
  misc_feature (786890)..(786890): n is a or c or g or t.
  misc_feature (786907)..(786907): n is a or c or g or t.
  misc_feature (786944)..(786946): n is a or c or g or t.
  misc_feature (839139)..(839139): n is a or c or g or t.
  misc_feature (1128488)..(1128488): n is a or c or g or t.
  misc_feature (1128499)..(1128499): n is a or c or g or t.
  misc_feature (1128505)..(1128506): n is a or c or g or t.
  misc_feature (1128517)..(1128518): n is a or c or g or t.
  misc_feature (1128539)..(1128540): n is a or c or g or t.
  misc_feature (1561400)..(1561400): n is a or c or g or t.
  misc_feature (1561477)..(1561477): n is a or c or g or t.
  misc_feature (1561545)..(1561545): n is a or c or g or t.
  misc_feature (1767941)..(1767941): n is a or c or g or t.
MNILKLYYEEALRTFRESGGGEEDFYWLVGSLLARYPSYREELEIRKRLMEMITDEVKGKVLDVGCGTGVLTFKMALKNGVEMVVGVDRKEEVIEFCNRLGDRVTKNAKFVQGNFLEMGLDEKFDSVVFSYVLHDFEPEPFLERALEVLEEGGRVIVGDFDINDLRKRIREFARWKGVKIVKGVTVGRAESHGDLREAFLMVVERL

SEQ ID NO: 386 - protein, 136 aa, Thermococcus kodakaraensis KOD1
  misc_feature (414542)..(414542): n is a or c or g or t.
  misc_feature (786890)..(786890): n is a or c or g or t.
  misc_feature (786907)..(786907): n is a or c or g or t.
  misc_feature (786944)..(786946): n is a or c or g or t.
  misc_feature (839139)..(839139): n is a or c or g or t.
  misc_feature (1128488)..(1128488): n is a or c or g or t.
  misc_feature (1128499)..(1128499): n is a or c or g or t.
  misc_feature (1128505)..(1128506): n is a or c or g or t.
  misc_feature (1128517)..(1128518): n is a or c or g or t.
  misc_feature (1128539)..(1128540): n is a or c or g or t.
  misc_feature (1561400)..(1561400): n is a or c or g or t.
  misc_feature (1561477)..(1561477): n is a or c or g or t.
  misc_feature (1561545)..(1561545): n is a or c or g or t.
  misc_feature (1767941)..(1767941): n is a or c or g or t.
VRAGERSSSSGRGNPKIPPLQLFSVVPMELYDVDEFWKFDLRVGLVKRAEKLKRTRKLIKLDVDFGGEERTVITGIADQYSPEELEGKKFVFVLNLKPKKLSGVESQGMLIVAETEDGKVYLLPVPEEVPVGTRVW

SEQ ID NO: 387 - protein, 273 aa, Thermococcus kodakaraensis KOD1
  misc_feature (414542)..(414542): n is a or c or g or t.
  misc_feature (786890)..(786890): n is a or c or g or t.
  misc_feature (786907)..(786907): n is a or c or g or t.
  misc_feature (786944)..(786946): n is a or c or g or t.
  misc_feature (839139)..(839139): n is a or c or g or t.
  misc_feature (1128488)..(1128488): n is a or c or g or t.
  misc_feature (1128499)..(1128499): n is a or c or g or t.
  misc_feature (1128505)..(1128506): n is a or c or g or t.
  misc_feature (1128517)..(1128518): n is a or c or g or t.
  misc_feature (1128539)..(1128540): n is a or c or g or t.
  misc_feature (1561400)..(1561400): n is a or c or g or t.
  misc_feature (1561477)..(1561477): n is a or c or g or t.
  misc_feature (1561545)..(1561545): n is a or c or g or t.
  misc_feature (1767941)..(1767941): n is a or c or g or t.
MLFGIPESKNPNLLLLGIRWDGSSSYRKGARDGPKAIREATSSELYNSYTENLVNLAERWRYRDLGDVEGKSFAEVLERVRKLVGENYSGERFLFLGGDHSITYATFRALREASGKEFGLIYFDAHPDLYPHYEGDPYSHACPVRRLVEEGWVRGENVVQVGIRAPTPEQLDFAEREGILIYSASEVWKGAEVEVPFERAYLSFDLDVLDPAFAPGVGNPEPGGLSTRELIELIKSIDAEVVAFDVVELNPRYDVSNVTAFAAAKIIREVLGR

SEQ ID NO: 388 - protein, 296 aa, Thermococcus kodakaraensis KOD1
  misc_feature (414542)..(414542): n is a or c or g or t.
  misc_feature (786890)..(786890): n is a or c or g or t.
  misc_feature (786907)..(786907): n is a or c or g or t.
  misc_feature (786944)..(786946): n is a or c or g or t.
  misc_feature (839139)..(839139): n is a or c or g or t.
  misc_feature (1128488)..(1128488): n is a or c or g or t.
  misc_feature (1128499)..(1128499): n is a or c or g or t.
  misc_feature (1128505)..(1128506): n is a or c or g or t.
  misc_feature (1128517)..(1128518): n is a or c or g or t.
  misc_feature (1128539)..(1128540): n is a or c or g or t.
  misc_feature (1561400)..(1561400): n is a or c or g or t.
  misc_feature (1561477)..(1561477): n is a or c or g or t.
  misc_feature (1561545)..(1561545): n is a or c or g or t.
  misc_feature (1767941)..(1767941): n is a or c or g or t.
VFFLRYTLRDYLRLAEIGNRLRGVFDLWNYREIVFPAVEEYSESIRKGTKFAHNNEFYVICPDATSRIIRDFNNGEARIYYISEVLDGEIHGVWEAGVELIGGREPDMYVEVPSVLITALESLGIEDFYIDVGSVKVWEEATRGIEPFREEVRRALLTRNFGIIESLPISAGRKRALWRLFNFRGKRSGVEKLDAIAELLGDERVFLDFGTVRPLPYYTDVIFEVYSPRLGKPLGGGGEYLVGNKKAIGFALDLGALLKLYRGRERKRQVLTGEPGEVYRRARELVKMGIPVEVRP

SEQ ID NO: 389 - protein, 376 aa, Thermococcus kodakaraensis KOD1
  misc_feature (414542)..(414542): n is a or c or g or t.
  misc_feature (786890)..(786890): n is a or c or g or t.
  misc_feature (786907)..(786907): n is a or c or g or t.
  misc_feature (786944)..(786946): n is a or c or g or t.
  misc_feature (839139)..(839139): n is a or c or g or t.
  misc_feature (1128488)..(1128488): n is a or c or g or t.
  misc_feature (1128499)..(1128499): n is a or c or g or t.
  misc_feature (1128505)..(1128506): n is a or c or g or t.
  misc_feature (1128517)..(1128518): n is a or c or g or t.
  misc_feature (1128539)..(1128540): n is a or c or g or t.
  misc_feature (1561400)..(1561400): n is a or c or g or t.
  misc_feature (1561477)..(1561477): n is a or c or g or t.
  misc_feature (1561545)..(1561545): n is a or c or g or t.
  misc_feature (1767941)..(1767941): n is a or c or g or t.
MKGLEEYVREILEDIRRRGLEALREYSERFDNYSGPFRVSEGEFEEAEELVPEEDKRVIEETMERLWEYHARQFRDVELYIKRGSLYGLIYRPIGRIGIYVPGGKPLPSTLMMVGIPARIAGVREIAVTTPPKDGKVNPYVLYVAKLLGIEEVYKLGGVGAIAAMAYGVGMRRVDKIFGPGNRFVNEAKRQVFGIVGIDSLAGPSEIAVIADESADKDYVLADLLSQLEHGKDSKAWLLTTSRELADYCSREGIEVLLCRNLEECAEKANEIAPEHLEIITENPEELVDLIENAGAIYLGPYTPVPAADYFLGVNHVLPTGGAARFSGVLTVMDFMKPITLARVSREEFLAYRRLGMRLAEIEGMEAHRRSLEVRR

SEQ ID NO: 390 - protein, 195 aa, Thermococcus kodakaraensis KOD1
  misc_feature (414542)..(414542): n is a or c or g or t.
  misc_feature (786890)..(786890): n is a or c or g or t.
  misc_feature (786907)..(786907): n is a or c or g or t.
  misc_feature (786944)..(786946): n is a or c or g or t.
  misc_feature (839139)..(839139): n is a or c or g or t.
  misc_feature (1128488)..(1128488): n is a or c or g or t.
  misc_feature (1128499)..(1128499): n is a or c or g or t.
  misc_feature (1128505)..(1128506): n is a or c or g or t.
  misc_feature (1128517)..(1128518): n is a or c or g or t.
  misc_feature (1128539)..(1128540): n is a or c or g or t.
  misc_feature (1561400)..(1561400): n is a or c or g or t.
  misc_feature (1561477)..(1561477): n is a or c or g or t.
  misc_feature (1561545)..(1561545): n is a or c or g or t.
  misc_feature (1767941)..(1767941): n is a or c or g or t.
MIAVVDLGIGNLANVRKALGGVITSDPYAIEGAEKIVLPGVGNFGAVMEKLEPLRGVIIDAINDGKPLLGICLGLQLLFEGSEESPGKPGLGVFRGNVVRFQGVRVPHIGWNQVWQRKECPLFEGIKDGAYFYFVHSYYALPEEDVTVGVTDYESKGAKVVFTSAVCRDNVYAVQFHPEKSGRNGLRLLENFRRL

SEQ ID NO: 391 - protein, 252 aa, Thermococcus kodakaraensis KOD1
  misc_feature (414542)..(414542): n is a or c or g or t.
  misc_feature (786890)..(786890): n is a or c or g or t.
  misc_feature (786907)..(786907): n is a or c or g or t.
  misc_feature (786944)..(786946): n is a or c or g or t.
  misc_feature (839139)..(839139): n is a or c or g or t.
  misc_feature (1128488)..(1128488): n is a or c or g or t.
  misc_feature (1128499)..(1128499): n is a or c or g or t.
  misc_feature (1128505)..(1128506): n is a or c or g or t.
  misc_feature (1128517)..(1128518): n is a or c or g or t.
  misc_feature (1128539)..(1128540): n is a or c or g or t.
  misc_feature (1561400)..(1561400): n is a or c or g or t.
  misc_feature (1561477)..(1561477): n is a or c or g or t.
  misc_feature (1561545)..(1561545): n is a or c or g or t.
  misc_feature (1767941)..(1767941): n is a or c or g or t.
MLAKRIIAALDIRAGRVVKGIKFRNIRDAGDPVELARRYESEGIDEIVFLDITASHEKRGILLDLVERVAEEIYVPFTVGGGIKSAEEAGEIIKRGADKVFVNTAAVERPELVGEIAELVGSANLVVAIDAKWNGSFWEVYTHGGRKPRGIDAVEWARKVEELGAGEILLTSMDTDGTKEGFDIPLTRAVANAVDIPVIASGGAGRPEHFYEAFKAGAEAALAASIFHYGEYTVGQLKGFLAERGIPVRLDY

SEQ ID NO: 392 - protein, 209 aa, Thermococcus kodakaraensis KOD1
  misc_feature (414542)..(414542): n is a or c or g or t.
  misc_feature (786890)..(786890): n is a or c or g or t.
  misc_feature (786907)..(786907): n is a or c or g or t.
  misc_feature (786944)..(786946): n is a or c or g or t.
  misc_feature (839139)..(839139): n is a or c or g or t.
  misc_feature (1128488)..(1128488): n is a or c or g or t.
  misc_feature (1128499)..(1128499): n is a or c or g or t.
  misc_feature (1128505)..(1128506): n is a or c or g or t.
  misc_feature (1128517)..(1128518): n is a or c or g or t.
  misc_feature (1128539)..(1128540): n is a or c or g or t.
  misc_feature (1561400)..(1561400): n is a or c or g or t.
  misc_feature (1561477)..(1561477): n is a or c or g or t.
  misc_feature (1561545)..(1561545): n is a or c or g or t.
  misc_feature (1767941)..(1767941): n is a or c or g or t.
MSIEELVEKVDWEKNGGVVPVVVQDTEGEVLTLAYMDREALRRTLETGYAHYYSRSQGRVRMKGEVSGNLQVVREIRVDCDSDALLLKVEPKGPACHTGNYSCFYRKLGEPERVLPMDYSLTILRELEELIRKRKESPVEGSYTSRLFREGRERIYKKFGEEAVEVLVAENREALIYETADMLYHLLVLLAYNDVSLGEVMAELRRRRK

SEQ ID NO: 393 - protein, 242 aa, Thermococcus kodakaraensis KOD1
  misc_feature (414542)..(414542): n is a or c or g or t.
  misc_feature (786890)..(786890): n is a or c or g or t.
  misc_feature (786907)..(786907): n is a or c or g or t.
  misc_feature (786944)..(786946): n is a or c or g or t.
  misc_feature (839139)..(839139): n is a or c or g or t.
  misc_feature (1128488)..(1128488): n is a or c or g or t.
  misc_feature (1128499)..(1128499): n is a or c or g or t.
  misc_feature (1128505)..(1128506): n is a or c or g or t.
  misc_feature (1128517)..(1128518): n is a or c or g or t.
  misc_feature (1128539)..(1128540): n is a or c or g or t.
  misc_feature (1561400)..(1561400): n is a or c or g or t.
  misc_feature (1561477)..(1561477): n is a or c or g or t.
  misc_feature (1561545)..(1561545): n is a or c or g or t.
  misc_feature (1767941)..(1767941): n is a or c or g or t.
MWLVFDVDGTLIDVGESYDMAVKLTVEYLLEELGKPSEVEIELVRELRRKGVFGDDFKLSEALVRAVFSGLNDWEQIPEGVGVEYFRRNFPLGIDPGHVERVFNTFYLGELYEDRLFDFEGLWRLEKPLVDVELLREAGERFKLGVVTGRNRLEMELAERIIGFRFPKVVTRESGLKPDPELLRCLVGGEEGVYIGDTAGDELFIENYRKKYGDFGFLMVGRDVENANEAIKMFLEEVKRGP

SEQ ID NO: 394 - protein, 325 aa, Thermococcus kodakaraensis KOD1
  misc_feature (414542)..(414542): n is a or c or g or t.
  misc_feature (786890)..(786890): n is a or c or g or t.
  misc_feature (786907)..(786907): n is a or c or g or t.
  misc_feature (786944)..(786946): n is a or c or g or t.
  misc_feature (839139)..(839139): n is a or c or g or t.
  misc_feature (1128488)..(1128488): n is a or c or g or t.
  misc_feature (1128499)..(1128499): n is a or c or g or t.
  misc_feature (1128505)..(1128506): n is a or c or g or t.
  misc_feature (1128517)..(1128518): n is a or c or g or t.
  misc_feature (1128539)..(1128540): n is a or c or g or t.
  misc_feature (1561400)..(1561400): n is a or c or g or t.
  misc_feature (1561477)..(1561477): n is a or c or g or t.
  misc_feature (1561545)..(1561545): n is a or c or g or t.
  misc_feature (1767941)..(1767941): n is a or c or g or t.
MSLLAKIVDGKNLSFEEAYELFNELKGSDGVLIGAYLAALQTKGYTGEELAGLARAMRDSAVKLDLGKVADTAGTGGDGSSTINVSTASALILSAFTRVAKHGNVSITSKSGSANVLEALGLNIRVSPERAREMVESTNFTFIFAPAYHPALRPIMPVRKALGIKTVFNVIGPLANPADPAYQVVGVNSPELLEPVAEALEFLGVERALVVHGSGMDEVSPHRETLVLEVGNGVERYTLSPEDFGIEPVKPLPCSSPEESAARIKAVLGGSGRREDRDFILVNASAALYASGVAEDFREGLEMAREALGQGMLEKLEEIACLSKS

SEQ ID NO: 395 - protein, 389 aa, Thermococcus kodakaraensis KOD1
  misc_feature (414542)..(414542): n is a or c or g or t.
  misc_feature (786890)..(786890): n is a or c or g or t.
  misc_feature (786907)..(786907): n is a or c or g or t.
  misc_feature (786944)..(786946): n is a or c or g or t.
  misc_feature (839139)..(839139): n is a or c or g or t.
  misc_feature (1128488)..(1128488): n is a or c or g or t.
  misc_feature (1128499)..(1128499): n is a or c or g or t.
  misc_feature (1128505)..(1128506): n is a or c or g or t.
  misc_feature (1128517)..(1128518): n is a or c or g or t.
  misc_feature (1128539)..(1128540): n is a or c or g or t.
  misc_feature (1561400)..(1561400): n is a or c or g or t.
  misc_feature (1561477)..(1561477): n is a or c or g or t.
  misc_feature (1561545)..(1561545): n is a or c or g or t.
  misc_feature (1767941)..(1767941): n is a or c or g or t.
MDDMFFGRFGGQFVPETLIEPLKKLERAYKKFKDDPEFNETLEYYLRNWAGRPTPLYYAERLSKKLGGAKIYLKREDLLHGGAHKTNNGIGQALLAKFMGKERLIAETGAGQHGVATAMAGALLGMKVDVYMGAEDVERQKMNVFRMGLLGARVIPVESGSRTLKDAINEALRDWVATFEYSHYLIGSVVGPYPYPVIVRDFQSVIGREAREQILEAEGTLPDAVVACVGGGSNAMGIFYPFVNDRVRLIGVEAGGKGLETGLHAASLNAGELGVFHGMLSYFLQNEEGQITPTHSVSAGLDYPGVGPEHAYLKDSGRAEYVTVTDEEALRAFHELSRTEGILPALESAHAVAYAMKIAPEMDKDEIIIVNLSGRGDKDLDIVRRVGNV

SEQ ID NO: 396 - protein, 153 aa, Thermococcus kodakaraensis KOD1
  misc_feature (414542)..(414542): n is a or c or g or t.
  misc_feature (786890)..(786890): n is a or c or g or t.
  misc_feature (786907)..(786907): n is a or c or g or t.
  misc_feature (786944)..(786946): n is a or c or g or t.
  misc_feature (839139)..(839139): n is a or c or g or t.
  misc_feature (1128488)..(1128488): n is a or c or g or t.
  misc_feature (1128499)..(1128499): n is a or c or g or t.
  misc_feature (1128505)..(1128506): n is a or c or g or t.
  misc_feature (1128517)..(1128518): n is a or c or g or t.
  misc_feature (1128539)..(1128540): n is a or c or g or t.
  misc_feature (1561400)..(1561400): n is a or c or g or t.
  misc_feature (1561477)..(1561477): n is a or c or g or t.
  misc_feature (1561545)..(1561545): n is a or c or g or t.
  misc_feature (1767941)..(1767941): n is a or c or g or t.
MPNIAILVGEAFTGYATIDLEPDEREKVESLLRAFGECLLVDEEHMDAITGLSGSGPAYVSVFVESMIYGGLRVGLLREVAKIAALQTLLGTAKLLLNYEGHPAEIRDMVTTPGGTTIDGIFELEEGKIRTAIMKAIDAATKKSRILSTRTLP

SEQ ID NO: 397 - protein, 65 aa, Thermococcus kodakaraensis KOD1
  misc_feature (414542)..(414542): n is a or c or g or t.
  misc_feature (786890)..(786890): n is a or c or g or t.
  misc_feature (786907)..(786907): n is a or c or g or t.
  misc_feature (786944)..(786946): n is a or c or g or t.
  misc_feature (839139)..(839139): n is a or c or g or t.
  misc_feature (1128488)..(1128488): n is a or c or g or t.
  misc_feature (1128499)..(1128499): n is a or c or g or t.
  misc_feature (1128505)..(1128506): n is a or c or g or t.
  misc_feature (1128517)..(1128518): n is a or c or g or t.
  misc_feature (1128539)..(1128540): n is a or c or g or t.
  misc_feature (1561400)..(1561400): n is a or c or g or t.
  misc_feature (1561477)..(1561477): n is a or c or g or t.
  misc_feature (1561545)..(1561545): n is a or c or g or t.
  misc_feature (1767941)..(1767941): n is a or c or g or t.
VEGTGEREAKGILKDLVRKSTLVGLDGWETDYGLIARKVAGKEELRKEGYPTWDLGDFKNLRSQT

SEQ ID NO: 398 - protein, 822 aa, Thermococcus kodakaraensis KOD1
  misc_feature (414542)..(414542): n is a or c or g or t.
  misc_feature (786890)..(786890): n is a or c or g or t.
  misc_feature (786907)..(786907): n is a or c or g or t.
  misc_feature (786944)..(786946): n is a or c or g or t.
  misc_feature (839139)..(839139): n is a or c or g or t.
  misc_feature (1128488)..(1128488): n is a or c or g or t.
  misc_feature (1128499)..(1128499): n is a or c or g or t.
  misc_feature (1128505)..(1128506): n is a or c or g or t.
  misc_feature (1128517)..(1128518): n is a or c or g or t.
  misc_feature (1128539)..(1128540): n is a or c or g or t.
  misc_feature (1561400)..(1561400): n is a or c or g or t.
  misc_feature (1561477)..(1561477): n is a or c or g or t.
  misc_feature (1561545)..(1561545): n is a or c or g or t.
  misc_feature (1767941)..(1767941): n is a or c or g or t.
VLLMSEAIETCCTNSHGKIEKELERRRSSIRPINERVAKLREESVNTEVRISSERARLITEFYKSDLAKGKSIPVQRALAFKYLLEHCSLPVEDGQLIVGIRGTGVKEVPTYPEITVHSIEDLEILNSRENMPYRVDEETKELYEREIIPFWKGRAMRDIIFENLPQEWIDAYEAGVWTEFMEQRAPGHTAGGERIFKMGVLDIKEEIRRKMEELDPSDPEYYEKMEELKAMDIVADAILIYARRYAEKLEKMAEEETDPKRKEELKQMAEICRWVPAHPPRTFWEALQHYWFIHVGVTYETNPWDSFNPGRIDQHLYPFYKKDIEEGRLTREKAKELLQCFWLKFNNQPAVPKVGVTAEESFTYNDFSKLNVGGLKEDGSDGVNELSYLILEVLGEMRTLQPNTAVLVSEKNPDCLLIEALKVVGPGFGEPPFFNFDGVIVKMLRQGKSLEDARTSGVSGCVESGAFGKEAYILTGYFNLPKILEITLNNGVDPRTGKKIGLETGDPRDFKSFEELWEAFMKQVKHFLDIKMKGNDIIEALYAKYLPVPFLSLWIEDCVEKAKDYNCGGARYNTQYIQVVGLGTIADSLAAIKYHVFDKKTFTMDALLKALKNNWKGYEIMREILRNPDKTPKFGNDDDYVDEIAKRVVDEVVDLIESYPPSPVRKASKRAYFLPTTVHVYFGKVTGATPDGREAGFPVSEGVSPVQGMDRKGIAAVFRSVAKCDWDKTGGALLNQKLTPDIFDSEENIKKLAQLIRTFFRLGGHHVQFNVVSAELLREAQRKPQDFQDLMVRVAGYSDYFVNLPEGLQEEIVQRTEQELL

SEQ ID NO: 399 - protein, 182 aa, Thermococcus kodakaraensis KOD1
  misc_feature (414542)..(414542): n is a or c or g or t.
  misc_feature (786890)..(786890): n is a or c or g or t.
  misc_feature (786907)..(786907): n is a or c or g or t.
  misc_feature (786944)..(786946): n is a or c or g or t.
  misc_feature (839139)..(839139): n is a or c or g or t.
  misc_feature (1128488)..(1128488): n is a or c or g or t.
  misc_feature (1128499)..(1128499): n is a or c or g or t.
  misc_feature (1128505)..(1128506): n is a or c or g or t.
  misc_feature (1128517)..(1128518): n is a or c or g or t.
  misc_feature (1128539)..(1128540): n is a or c or g or t.
  misc_feature (1561400)..(1561400): n is a or c or g or t.
  misc_feature (1561477)..(1561477): n is a or c or g or t.
  misc_feature (1561545)..(1561545): n is a or c or g or t.
  misc_feature (1767941)..(1767941): n is a or c or g or t.
VDDKMEVLKEIAEREYRFFERLQPTNPECKREKTFKFMRISRFYPYSLETLLSYLDDLIEAEKEGRNPLYEKYACMEGRMGIPEDKRGLIERIVQIEKSWIEELHGKYPHAIENKPEFQRYLACELSTFSVQTLERYLEDVERAKEAGRNLALESYLYTFSRLGYSSLEEVEEKFKKRALQK

SEQ ID NO: 400 - protein, 255 aa, Thermococcus kodakaraensis KOD1
  misc_feature (414542)..(414542): n is a or c or g or t.
  misc_feature (786890)..(786890): n is a or c or g or t.
  misc_feature (786907)..(786907): n is a or c or g or t.
  misc_feature (786944)..(786946): n is a or c or g or t.
  misc_feature (839139)..(839139): n is a or c or g or t.
  misc_feature (1128488)..(1128488): n is a or c or g or t.
  misc_feature (1128499)..(1128499): n is a or c or g or t.
  misc_feature (1128505)..(1128506): n is a or c or g or t.
  misc_feature (1128517)..(1128518): n is a or c or g or t.
  misc_feature (1128539)..(1128540): n is a or c or g or t.
  misc_feature (1561400)..(1561400): n is a or c or g or t.
  misc_feature (1561477)..(1561477): n is a or c or g or t.
  misc_feature (1561545)..(1561545): n is a or c or g or t.
  misc_feature (1767941)..(1767941): n is a or c or g or t.
MKTRSPLEPLSGGEIMGASPGRGFPSKLIPIEVPPHVVMLRGIGRDSNIYLVRDEEEALIIDTGTGINWHLYTEIWEREGYLTDVEHVTIFNTHEHFDHVGGNKVLQRWLEERGIEVSFAAHKITANVLERGDEGVILSYFYGRRFEPHQVDFKLEDGDKLNVSSLELLVVHTPGHTAGSSCLYLDDGKHRVMFTGDTVFKGTVGRTDLPTGDGWALRESLERLAEFDVDFGFPGHGDYIRDWKENLREVLRWLP

SEQ ID NO: 401 - protein, 252 aa, Thermococcus kodakaraensis KOD1
  misc_feature (414542)..(414542): n is a or c or g or t.
  misc_feature (786890)..(786890): n is a or c or g or t.
  misc_feature (786907)..(786907): n is a or c or g or t.
  misc_feature (786944)..(786946): n is a or c or g or t.
  misc_feature (839139)..(839139): n is a or c or g or t.
  misc_feature (1128488)..(1128488): n is a or c or g or t.
  misc_feature (1128499)..(1128499): n is a or c or g or t.
  misc_feature (1128505)..(1128506): n is a or c or g or t.
  misc_feature (1128517)..(1128518): n is a or c or g or t.
  misc_feature (1128539)..(1128540): n is a or c or g or t.
  misc_feature (1561400)..(1561400): n is a or c or g or t.
  misc_feature (1561477)..(1561477): n is a or c or g or t.
  misc_feature (1561545)..(1561545): n is a or c or g or t.
  misc_feature (1767941)..(1767941): n is a or c or g or t.
MIDAHCHIEMFKGRAGEVVEESKKHLKAVVDSITEYRKFHVWKSWELLEPYFGFVFPTLGYAPNEARRGNWEKVKRVEEFIREHADEIVAVGEIGLDFYYAKTEEERKNQREIFHHFLNLAVELDKPVVLHARDAEREVFEAIQRAGVKAYFHSYSGPAELALEIVGNGHIIGINTGIDFIPEVRKAAEVLPLESIVVETDAPYMSPYKGEKNYPWNVEYAVRRIAEIKGLEFEEVEKVTEKNTIQFFDLKL

SEQ ID NO: 402 - protein, 239 aa, Thermococcus kodakaraensis KOD1
  misc_feature (414542)..(414542): n is a or c or g or t.
  misc_feature (786890)..(786890): n is a or c or g or t.
  misc_feature (786907)..(786907): n is a or c or g or t.
  misc_feature (786944)..(786946): n is a or c or g or t.
  misc_feature (839139)..(839139): n is a or c or g or t.
  misc_feature (1128488)..(1128488): n is a or c or g or t.
  misc_feature (1128499)..(1128499): n is a or c or g or t.
  misc_feature (1128505)..(1128506): n is a or c or g or t.
  misc_feature (1128517)..(1128518): n is a or c or g or t.
  misc_feature (1128539)..(1128540): n is a or c or g or t.
  misc_feature (1561400)..(1561400): n is a or c or g or t.
  misc_feature (1561477)..(1561477): n is a or c or g or t.
  misc_feature (1561545)..(1561545): n is a or c or g or t.
  misc_feature (1767941)..(1767941): n is a or c or g or t.
MIKVGTCGFCEARSKYFRDFDAVEVQQTFYRILQEKTLERWRKEAPEGFTFSIKAFQGVTHPANSPTWRRSNVKPGKDVGLLRPTSDVLHFWRVTLKEAETLGARFILIQLPKSFRESDESFANAEKFFEMIDRGNFEIAVELRGWSEKGIKRFVREFDVIDVTDPLVRIPLHTGDVSYYRLHGRYENGRIIYSHSYSDEELQKARERVIGWNRGESFVFFNNSDMCKDAKRFKTLLAG

SEQ ID NO: 403 - protein, 255 aa, Thermococcus kodakaraensis KOD1
  misc_feature (414542)..(414542): n is a or c or g or t.
  misc_feature (786890)..(786890): n is a or c or g or t.
  misc_feature (786907)..(786907): n is a or c or g or t.
  misc_feature (786944)..(786946): n is a or c or g or t.
  misc_feature (839139)..(839139): n is a or c or g or t.
  misc_feature (1128488)..(1128488): n is a or c or g or t.
  misc_feature (1128499)..(1128499): n is a or c or g or t.
  misc_feature (1128505)..(1128506): n is a or c or g or t.
  misc_feature (1128517)..(1128518): n is a or c or g or t.
  misc_feature (1128539)..(1128540): n is a or c or g or t.
  misc_feature (1561400)..(1561400): n is a or c or g or t.
  misc_feature (1561477)..(1561477): n is a or c or g or t.
  misc_feature (1561545)..(1561545): n is a or c or g or t.
  misc_feature (1767941)..(1767941): n is a or c or g or t.
VGEMKTIIEARDLKKHFRSIKALDGITVEILEGVTLILGPNGGGKSTFLKLATGVYRPTSGEILVFGERPWNNRSVKERFSVAYDPPAFPQFVTGREWLKFFAESRGVGEESIIKAAELFDATSFLDKRISEYSSGMLKRISLAQAFVGEPELVFLDEPLANIDFDSMEKVVEVIEGMKGKRSFVIISHIWEPLMPVVDWVVVIGNGKLVLSGRAEEVQEDVEKLFKPRIRRSKEGGAKESPSPGQEGRQTPTSV

SEQ ID NO: 404 - protein, 447 aa, Thermococcus kodakaraensis KOD1
  misc_feature (414542)..(414542): n is a or c or g or t.
  misc_feature (786890)..(786890): n is a or c or g or t.
  misc_feature (786907)..(786907): n is a or c or g or t.
  misc_feature (786944)..(786946): n is a or c or g or t.
  misc_feature (839139)..(839139): n is a or c or g or t.
  misc_feature (1128488)..(1128488): n is a or c or g or t.
  misc_feature (1128499)..(1128499): n is a or c or g or t.
  misc_feature (1128505)..(1128506): n is a or c or g or t.
  misc_feature (1128517)..(1128518): n is a or c or g or t.
  misc_feature (1128539)..(1128540): n is a or c or g or t.
  misc_feature (1561400)..(1561400): n is a or c or g or t.
  misc_feature (1561477)..(1561477): n is a or c or g or t.
  misc_feature (1561545)..(1561545): n is a or c or g or t.
  misc_feature (1767941)..(1767941): n is a or c or g or t.
MKPMKRPMVLTILLVVLILLPSVSAEKRVVYVGTIEGTITQYTVDQFESYIRTAEKNSAEALIIELNTPGGQGDAMMEIVSLIQNSTVPVIIYVYPRGAIAASAGTYIAMASHLIAMAPGTSIGACEPILGYSANGSIVRAPDKIRNFYAAYMRSLAEASGRNETAAVKFVLEDLSLTPEEALKANVIEVIANDLPDLLKKANGMRTKVPVAGKGYVTFNFTNVEVKRLSPSLSYQIVTFLANPGIAYILLTVGMLGLVFGFLTPGWHVPETLGAILLVLGVIGMGYFGYDAAGLVLMILGVIFFIAEALTPTFGLFTIAGLVSFILGGLIMFGKGGEVYLVNSETFSTLRVIIIVTGVLLALFFLFGMAAVIRAHRRRPETGKEEMIGAVGKVVEDLDPEGLIKVRGELWKAVSKDGSLIKVGEKVRVVGMDGLTLIVEKVDEKEV

SEQ ID NO: 405 - protein, 268 aa, Thermococcus kodakaraensis KOD1
  misc_feature (414542)..(414542): n is a or c or g or t.
  misc_feature (786890)..(786890): n is a or c or g or t.
  misc_feature (786907)..(786907): n is a or c or g or t.
  misc_feature (786944)..(786946): n is a or c or g or t.
  misc_feature (839139)..(839139): n is a or c or g or t.
  misc_feature (1128488)..(1128488): n is a or c or g or t.
  misc_feature (1128499)..(1128499): n is a or c or g or t.
  misc_feature (1128505)..(1128506): n is a or c or g or t.
  misc_feature (1128517)..(1128518): n is a or c or g or t.
  misc_feature (1128539)..(1128540): n is a or c or g or t.
  misc_feature (1561400)..(1561400): n is a or c or g or t.
  misc_feature (1561477)..(1561477): n is a or c or g or t.
  misc_feature (1561545)..(1561545): n is a or c or g or t.
  misc_feature (1767941)..(1767941): n is a or c or g or t.
MAGFGTLVLGIVLLFVLILLASAIKIVKEYERAVIFRLGRVVGARGPGLFFIIPIFEKAVIVDLRTRVLDVPVQETITKDNVPVKVNAVVYFRVVDPVKAVTQVANYIVATSQIAQTTLRSVIGQAHLDELLSEREKLNRELQKIIDEATDPWGIKVTTVEIKDVELPAGMQRAMAKQAEAERERRARITLAEAERQAAEKLREAAEIISEHPMALQLRTLQTISDVASDKSNVIVLPLPMEMLKLFKSFAEAGQAVKKKLEAEEQSE

SEQ ID NO: 406 - protein, 262 aa, Thermococcus kodakaraensis KOD1
  misc_feature (414542)..(414542): n is a or c or g or t.
  misc_feature (786890)..(786890): n is a or c or g or t.
  misc_feature (786907)..(786907): n is a or c or g or t.
  misc_feature (786944)..(786946): n is a or c or g or t.
  misc_feature (839139)..(839139): n is a or c or g or t.
  misc_feature (1128488)..(1128488): n is a or c or g or t.
  misc_feature (1128499)..(1128499): n is a or c or g or t.
  misc_feature (1128505)..(1128506): n is a or c or g or t.
  misc_feature (1128517)..(1128518): n is a or c or g or t.
  misc_feature (1128539)..(1128540): n is a or c or g or t.
  misc_feature (1561400)..(1561400): n is a or c or g or t.
  misc_feature (1561477)..(1561477): n is a or c or g or t.
  misc_feature (1561545)..(1561545): n is a or c or g or t.
  misc_feature (1767941)..(1767941): n is a or c or g or t.
VLSLEGRSIVFASGKGGTGKTTTVANLGVALAQFGKEVILLDADLTMANLSLVLGMEDIPVTLHDVLAREADLKDAIYEGPAGVKVIPGGLSLEKVKKAKPERLRELMREISQLADFILIDAPAGLEMTSVTALLIGKELIVVTNPEISAITDSLKTKLIAEKLGTLPLGVILNRVTNEKTELTQDEIEAILEVPVLAMIPEDPEVKRASAYGVPLVIKNPTSPAAIAIKQLAAKLAGIKWQPPEPESPIKRVFKAIFGGKR

SEQ ID NO: 407 - protein, 503 aa, Thermococcus kodakaraensis KOD1
  misc_feature (414542)..(414542): n is a or c or g or t.
  misc_feature (786890)..(786890): n is a or c or g or t.
  misc_feature (786907)..(786907): n is a or c or g or t.
  misc_feature (786944)..(786946): n is a or c or g or t.
  misc_feature (839139)..(839139): n is a or c or g or t.
  misc_feature (1128488)..(1128488): n is a or c or g or t.
  misc_feature (1128499)..(1128499): n is a or c or g or t.
  misc_feature (1128505)..(1128506): n is a or c or g or t.
  misc_feature (1128517)..(1128518): n is a or c or g or t.
  misc_feature (1128539)..(1128540): n is a or c or g or t.
  misc_feature (1561400)..(1561400): n is a or c or g or t.
  misc_feature (1561477)..(1561477): n is a or c or g or t.
  misc_feature (1561545)..(1561545): n is a or c or g or t.
  misc_feature (1767941)..(1767941): n is a or c or g or t.
VKAKIRILDMFSGRYTVLINEEDAKEAKLHPDDLVKIEAGKKAVYGSVALSNLVGKGEVGISRDVLDLHNFSEGETVSVIPAGTPESVRYIKKKMHGEKLRKVEIEAIVRDIVDRKLRDIEISSFVTALEINGLDMDEIAALTIAMAETGDMLDIDRKPIMDVHSIGGVPGNKTNILVVPIVAAAGLTIPKTSSRAITSAAGTADVVEVFADVSFSLDEIKRIVEKVGACLVWGGALNLAPADDITIKAERALSIDPTGLMLASIMSKKYAMGSQYVLIDIPTGKGVKVETVEEARSLARDFIELGKRLGQYVEVAITYGGQPIGHTVGPALEAREALSALMTGKGPGSLIEKATGLAGILLEMGGVAPAGTGKKMAKEILESGKAWEKMKEIIEAQGGDPNIKPEEIPIGDKTYTFTAATSGYVTAIDNRAITAIARAAGAPEDKGAGIELYVKVGEKVKEGDPLFTIHAEHEARLDQAIVLARRTEPIRIEGMVLQRIGNI

SEQ ID NO: 408 - protein, 309 aa, Thermococcus kodakaraensis KOD1
  misc_feature (414542)..(414542): n is a or c or g or t.
  misc_feature (786890)..(786890): n is a or c or g or t.
  misc_feature (786907)..(786907): n is a or c or g or t.
  misc_feature (786944)..(786946): n is a or c or g or t.
  misc_feature (839139)..(839139): n is a or c or g or t.
  misc_feature (1128488)..(1128488): n is a or c or g or t.
  misc_feature (1128499)..(1128499): n is a or c or g or t.
  misc_feature (1128505)..(1128506): n is a or c or g or t.
  misc_feature (1128517)..(1128518): n is a or c or g or t.
  misc_feature (1128539)..(1128540): n is a or c or g or t.
  misc_feature (1561400)..(1561400): n is a or c or g or t.
  misc_feature (1561477)..(1561477): n is a or c or g or t.
  misc_feature (1561545)..(1561545): n is a or c or g or t.
  misc_feature (1767941)..(1767941): n is a or c or g or t.
MSSQAILIENLTKSYGTFRAVDGLTFDVKVGEVFGFLGPNGAGKTTTILSMLGIIIPDDGRIEILGMDMSREPIKIKERIGYLPENATIYGELTAWKNLEFFANFYRMSNSEREKRITELLKRVGLWDARYRKAKTFSKGMKQRLLLAQALINDPELLILDEPTSGLDPEGAHLVKEVIREAKAEGRTVFFSSHILSEVEELSDRVGIIVRGRLKAVGPIREIKRQFMELEGYEIKVETKEPIPELRHEEITRVERLAPNRIILFARSDIREWLSQYLTSKGVTILSLEVEEPSLEDVFMKTIYGRDEE

SEQ ID NO: 409 - protein, 284 aa, Thermococcus kodakaraensis KOD1
  misc_feature (414542)..(414542): n is a or c or g or t.
  misc_feature (786890)..(786890): n is a or c or g or t.
  misc_feature (786907)..(786907): n is a or c or g or t.
  misc_feature (786944)..(786946): n is a or c or g or t.
  misc_feature (839139)..(839139): n is a or c or g or t.
  misc_feature (1128488)..(1128488): n is a or c or g or t.
  misc_feature (1128499)..(1128499): n is a or c or g or t.
  misc_feature (1128505)..(1128506): n is a or c or g or t.
  misc_feature (1128517)..(1128518): n is a or c or g or t.
  misc_feature (1128539)..(1128540): n is a or c or g or t.
  misc_feature (1561400)..(1561400): n is a or c or g or t.
  misc_feature (1561477)..(1561477): n is a or c or g or t.
  misc_feature (1561545)..(1561545): n is a or c or g or t.
  misc_feature (1767941)..(1767941): n is a or c or g or t.
MREITPRKIIEMKGKEKIAMVTAYDYPSALLADKAGMDIVFVGDSLGMVVYGEPNTLNVSMEQMVFHTRAVAKAVKRALVLADMPFGSYEVSVEEGVKNAMRLIRAGADAVKIEGGYDHKKLVKKLVRMGIPVMGHTGLTPQRYLRLGGYRLMGETEEEIEEILRDAKALEKAGAFAVVLEFVLADVAKLVTEEVSIPTIGIGAGPHVDGQVLVWHDLLGIYENVPPFVKKYADLASIIQLALENYRGEVKEGRFPAKEHYWEFLDKDDFERKKMKALERLEDE

SEQ ID NO: 410 - protein, 117 aa, Thermococcus kodakaraensis KOD1
  misc_feature (414542)..(414542): n is a or c or g or t.
  misc_feature (786890)..(786890): n is a or c or g or t.
  misc_feature (786907)..(786907): n is a or c or g or t.
  misc_feature (786944)..(786946): n is a or c or g or t.
  misc_feature (839139)..(839139): n is a or c or g or t.
  misc_feature (1128488)..(1128488): n is a or c or g or t.
  misc_feature (1128499)..(1128499): n is a or c or g or t.
  misc_feature (1128505)..(1128506): n is a or c or g or t.
  misc_feature (1128517)..(1128518): n is a or c or g or t.
  misc_feature (1128539)..(1128540): n is a or c or g or t.
  misc_feature (1561400)..(1561400): n is a or c or g or t.
  misc_feature (1561477)..(1561477): n is a or c or g or t.
  misc_feature (1561545)..(1561545): n is a or c or g or t.
  misc_feature (1767941)..(1767941): n is a or c or g or t.
VIPYLEPDLEPHAVDMLALETANVIWKYARKYGLITEEQAFGLYEGMMKLVREEVIILESSGKYLGEALEIAMRYDIPIYDSLFIAQAKSLRAKLATSDKRQAEVAKVLGLEAVYIG

SEQ ID NO: 411 - protein, 386 aa, Thermococcus kodakaraensis KOD1
  misc_feature (414542)..(414542): n is a or c or g or t.
  misc_feature (786890)..(786890): n is a or c or g or t.
  misc_feature (786907)..(786907): n is a or c or g or t.
  misc_feature (786944)..(786946): n is a or c or g or t.
  misc_feature (839139)..(839139): n is a or c or g or t.
  misc_feature (1128488)..(1128488): n is a or c or g or t.
  misc_feature (1128499)..(1128499): n is a or c or g or t.
  misc_feature (1128505)..(1128506): n is a or c or g or t.
  misc_feature (1128517)..(1128518): n is a or c or g or t.
  misc_feature (1128539)..(1128540): n is a or c or g or t.
  misc_feature (1561400)..(1561400): n is a or c or g or t.
  misc_feature (1561477)..(1561477): n is a or c or g or t.
  misc_feature (1561545)..(1561545): n is a or c or g or t.
  misc_feature (1767941)..(1767941): n is a or c or g or t.
MAVPLVNEELQAWFDSHFKYDVERMGGQAGIIANLLANLDFREVLVYTPHLAKRQAEMFVKKPNLFYPVVEGGKLVLKHPWEAYRENDPVKVNRIFEFRAGTTFRLGNETITVPFSGRFIVSARFESIRIYTEPELKPFLPEIGQRVDGAILSGYQGIKLRYSDGKDANYYLREAKKDILLLKREKDVKVHLEFASIQNRELRKKVIYNLFPLVDSVGMDEAEIAYVLSALGYDKLAERIFTYNRIEDTVLGGKILIDEMNLELLQIHTIYYIMYIAHANNPLSEAELRQSLELATTLAASRASLGDIASPDQISVGMNVPYNERGEYVKLRFEEAKRRLRTKEYKLVIIPTRLVQNPVSTVGLGDTISTGAFTSYLAMLKEKGEL

SEQ ID NO: 412 - protein, 45 aa, Thermococcus kodakaraensis KOD1
  misc_feature (414542)..(414542): n is a or c or g or t.
  misc_feature (786890)..(786890): n is a or c or g or t.
  misc_feature (786907)..(786907): n is a or c or g or t.
  misc_feature (786944)..(786946): n is a or c or g or t.
  misc_feature (839139)..(839139): n is a or c or g or t.
  misc_feature (1128488)..(1128488): n is a or c or g or t.
  misc_feature (1128499)..(1128499): n is a or c or g or t.
  misc_feature (1128505)..(1128506): n is a or c or g or t.
  misc_feature (1128517)..(1128518): n is a or c or g or t.
  misc_feature (1128539)..(1128540): n is a or c or g or t.
  misc_feature (1561400)..(1561400): n is a or c or g or t.
  misc_feature (1561477)..(1561477): n is a or c or g or t.
  misc_feature (1561545)..(1561545): n is a or c or g or t.
  misc_feature (1767941)..(1767941): n is a or c or g or t.
MPALDKALYQASCYTICLTLTFFFVLTLVMVALVFVLIYLKKCRR

SEQ ID NO: 413 - protein, 663 aa, Thermococcus kodakaraensis KOD1
  misc_feature (414542)..(414542): n is a or c or g or t.
  misc_feature (786890)..(786890): n is a or c or g or t.
  misc_feature (786907)..(786907): n is a or c or g or t.
  misc_feature (786944)..(786946): n is a or c or g or t.
  misc_feature (839139)..(839139): n is a or c or g or t.
  misc_feature (1128488)..(1128488): n is a or c or g or t.
  misc_feature (1128499)..(1128499): n is a or c or g or t.
  misc_feature (1128505)..(1128506): n is a or c or g or t.
  misc_feature (1128517)..(1128518): n is a or c or g or t.
  misc_feature (1128539)..(1128540): n is a or c or g or t.
  misc_feature (1561400)..(1561400): n is a or c or g or t.
  misc_feature (1561477)..(1561477): n is a or c or g or t.
  misc_feature (1561545)..(1561545): n is a or c or g or t.
  misc_feature (1767941)..(1767941): n is a or c or g or t.
VQLFSTRSRTLLRTSRFCWPCSAALVLTTEWRDEEMKKLGVLLALLVLFGTLATGTVGAVYIPSSGDFGVYIFGSSSNVTISDGRLVLDATGSEYVRAWLNVTEFQAIEFDYQAYANNVLSGVSFMSGSSGVGLTFIEYDTGSIEVRKISGANYPQYDGSSDTIGGSIDAGTSFRNKYVHFRIEFQQRGTEWDLLVYKDGFLLYNLTNVQQHIDPLSIEKVVFGVPAVGIGNNLGWQGKVEFNNIQIYEVEYHIQLSLKDALSNQPLTGVTVKENGNVIGTLVDGGSLDLTKGTHTLTFEKSGYWSVTKTIDVQGDMTVSVEMYPDSAAFKFENFPSDISIPENTIYTLTFTLSPISTDAAYNTYLSLSGLSNVLEVQKDGQAVSPESGKYYLGDISGPTQISIKFKAGAVGQHGFTLSFESHDAIMSKTYTTTKSVTYTVEPLPFSVQMPSEWQVGQNELRISESSGQSYLITAVLKDSQGNEVWSDSHAFSPYEAYSFSVNVPSEGQYTLELQWNGQVATYDVTVNPAITLTTKQLTVEKGGEGTIVLHFKNPSSDVQYYTIKVSGGFLPSEINQSISVGPLTEKDVSIAFAVPEDLTYDAYELQVQVLQGNATVFQDKVAVSIGDSGGFTLFGGSSGNTWLWLGVGGLGLLALVGLARRR

SEQ ID NO: 414 - protein, 127 aa, Thermococcus kodakaraensis KOD1
  misc_feature (414542)..(414542): n is a or c or g or t.
  misc_feature (786890)..(786890): n is a or c or g or t.
  misc_feature (786907)..(786907): n is a or c or g or t.
  misc_feature (786944)..(786946): n is a or c or g or t.
  misc_feature (839139)..(839139): n is a or c or g or t.
  misc_feature (1128488)..(1128488): n is a or c or g or t.
  misc_feature (1128499)..(1128499): n is a or c or g or t.
  misc_feature (1128505)..(1128506): n is a or c or g or t.
  misc_feature (1128517)..(1128518): n is a or c or g or t.
  misc_feature (1128539)..(1128540): n is a or c or g or t.
  misc_feature (1561400)..(1561400): n is a or c or g or t.
  misc_feature (1561477)..(1561477): n is a or c or g or t.
  misc_feature (1561545)..(1561545): n is a or c or g or t.
  misc_feature (1767941)..(1767941): n is a or c or g or t.
MASVPLAFVVLVELFDKLADKNDYYNKLYAGIYGSIGKKKSRVGAILISLLFAALGMLGVMWAITGTMTLNIGDVGPANLFVSGLIGLYIFAPETGNNELILWFWTAATIATKGAFISILPHIPGLI

SEQ ID NO: 415 - protein, 76 aa, Thermococcus kodakaraensis KOD1
  misc_feature (414542)..(414542): n is a or c or g or t.
  misc_feature (786890)..(786890): n is a or c or g or t.
  misc_feature (786907)..(786907): n is a or c or g or t.
  misc_feature (786944)..(786946): n is a or c or g or t.
  misc_feature (839139)..(839139): n is a or c or g or t.
  misc_feature (1128488)..(1128488): n is a or c or g or t.
  misc_feature (1128499)..(1128499): n is a or c or g or t.
  misc_feature (1128505)..(1128506): n is a or c or g or t.
  misc_feature (1128517)..(1128518): n is a or c or g or t.
  misc_feature (1128539)..(1128540): n is a or c or g or t.
  misc_feature (1561400)..(1561400): n is a or c or g or t.
  misc_feature (1561477)..(1561477): n is a or c or g or t.
  misc_feature (1561545)..(1561545): n is a or c or g or t.
  misc_feature (1767941)..(1767941): n is a or c or g or t.
MDANSIIDQLHNLAGSHPYLALGLILILIGVLTKGKVSLVFYALGALALLKEFGLVDTFFSFLKQIPELVKSFGGV

SEQ ID NO: 416 - protein, 267 aa, Thermococcus kodakaraensis KOD1
  misc_feature (414542)..(414542): n is a or c or g or t.
  misc_feature (786890)..(786890): n is a or c or g or t.
  misc_feature (786907)..(786907): n is a or c or g or t.
  misc_feature (786944)..(786946): n is a or c or g or t.
  misc_feature (839139)..(839139): n is a or c or g or t.
  misc_feature (1128488)..(1128488): n is a or c or g or t.
  misc_feature (1128499)..(1128499): n is a or c or g or t.
  misc_feature (1128505)..(1128506): n is a or c or g or t.
  misc_feature (1128517)..(1128518): n is a or c or g or t.
  misc_feature (1128539)..(1128540): n is a or c or g or t.
  misc_feature (1561400)..(1561400): n is a or c or g or t.
  misc_feature (1561477)..(1561477): n is a or c or g or t.
  misc_feature (1561545)..(1561545): n is a or c or g or t.
  misc_feature (1767941)..(1767941): n is a or c or g or t.
MRKKERQIITVGLILLFAAIGWWAYHGGGGGFVDITNALSGNSTSTTTYELAVSNLLATVDQATGHVLVSFQLANEEHFNISSVQILYALNVADPNNATYTALNATAENGTYKAEIPSKFGDVVYYKIKVSYNAGKTLESDVKSITVKDTAAPTLNSVSINYNSTAGTFSIDFNATDNDAIATYYVYYADLGTSSTVSNTTTFTAVNATSLPVVISNVTANNYYAFYFVVEDISGNKAMLYNETSPYIVQANATATWPVVVTEQSSS

SEQ ID NO: 417 - protein, 487 aa, Thermococcus kodakaraensis KOD1
  misc_feature (414542)..(414542): n is a or c or g or t.
  misc_feature (786890)..(786890): n is a or c or g or t.
  misc_feature (786907)..(786907): n is a or c or g or t.
  misc_feature (786944)..(786946): n is a or c or g or t.
  misc_feature (839139)..(839139): n is a or c or g or t.
  misc_feature (1128488)..(1128488): n is a or c or g or t.
  misc_feature (1128499)..(1128499): n is a or c or g or t.
  misc_feature (1128505)..(1128506): n is a or c or g or t.
  misc_feature (1128517)..(1128518): n is a or c or g or t.
  misc_feature (1128539)..(1128540): n is a or c or g or t.
  misc_feature (1561400)..(1561400): n is a or c or g or t.
  misc_feature (1561477)..(1561477): n is a or c or g or t.
  misc_feature (1561545)..(1561545): n is a or c or g or t.
  misc_feature (1767941)..(1767941): n is a or c or g or t.
MAVSTRAASPAEVNIPHFNPASGPYLGRLMSTNRKEKLYLPLKVGEANHIFILGKTGYGKTSFMKALAEALWEYYTSRGQEVLIVIFERKYDYSKFQRLKAFWNKRVEELGKEEATRVHPYLAAYFGTLEKYPQLKSQLGFPGDFAMSIPNYILAETYVTRKPYPIDVFTWHGLQPDSFPTRRIVFRPTRAPEAIKLDNGGGKVEVAIGRIHLRDISFEMLARKFDIPKGTAYGRILRKYWKVYKIHDPDEILRRVKAEEPSMRESTYESLKSILDEIRADPLYLKGSVLKPKAEQVTRSGNGIYDEPKPFTDYLTTKAINIIDFSDNSELDLEEQRLIMYLLWQKIKLIAGRKRVDVWLFFDEIQDLIGTAGEASRHNLAWKAMEEIYRKGRSLSVNVVAGTQYLYKLPMSLIMGAAHIAVIGALASPKDLDILRVAIMDGERLRIPVEHDSFEEFLKRRKKKGRGWFSFDREFTVKMYFRPNQSF

SEQ ID NO: 418 - protein, 253 aa, Thermococcus kodakaraensis KOD1
  misc_feature (414542)..(414542): n is a or c or g or t.
  misc_feature (786890)..(786890): n is a or c or g or t.
  misc_feature (786907)..(786907): n is a or c or g or t.
  misc_feature (786944)..(786946): n is a or c or g or t.
  misc_feature (839139)..(839139): n is a or c or g or t.
  misc_feature (1128488)..(1128488): n is a or c or g or t.
  misc_feature (1128499)..(1128499): n is a or c or g or t.
  misc_feature (1128505)..(1128506): n is a or c or g or t.
  misc_feature (1128517)..(1128518): n is a or c or g or t.
  misc_feature (1128539)..(1128540): n is a or c or g or t.
  misc_feature (1561400)..(1561400): n is a or c or g or t.
  misc_feature (1561477)..(1561477): n is a or c or g or t.
  misc_feature (1561545)..(1561545): n is a or c or g or t.
  misc_feature (1767941)..(1767941): n is a or c or g or t.
VMKMVWPFGRKKKKAEPRPGIVMTDDQFAELVRLDDFSLEEKVEQRVEERLRQQRILAQRMSQIKETYQKLLVAVTPEEGSIILGFPEAYLINYDEYWIYYQERPPSWLDSVWWSLARFFGKRPPHKVLKANKKIVQFNNETITVYCKTIEEIVGTGQQEAIPMVVHPAISRGWEAYEAVKAERDKYRQKYFDLLHEAKREVELALQINPRVKVYWKEKEQQGKKQEERFGGTEMAFEENPVKRELKSVLGEG

SEQ ID NO: 419 - protein, 256 aa, Thermococcus kodakaraensis KOD1
  misc_feature (414542)..(414542): n is a or c or g or t.
  misc_feature (786890)..(786890): n is a or c or g or t.
  misc_feature (786907)..(786907): n is a or c or g or t.
  misc_feature (786944)..(786946): n is a or c or g or t.
  misc_feature (839139)..(839139): n is a or c or g or t.
  misc_feature (1128488)..(1128488): n is a or c or g or t.
  misc_feature (1128499)..(1128499): n is a or c or g or t.
  misc_feature (1128505)..(1128506): n is a or c or g or t.
  misc_feature (1128517)..(1128518): n is a or c or g or t.
  misc_feature (1128539)..(1128540): n is a or c or g or t.
  misc_feature (1561400)..(1561400): n is a or c or g or t.
  misc_feature (1561477)..(1561477): n is a or c or g or t.
  misc_feature (1561545)..(1561545): n is a or c or g or t.
  misc_feature (1767941)..(1767941): n is a or c or g or t.
VHLDEFVENLSMKKGHYYNIKTPYELFQTRQGTYADMALFGAYALAKNGFETYLFEIATTNGFGVLPGFKLIVNHPWVPNNDPLVIFWPFRIPMRLSAALKLLNLSGETPKNVTVYTVSYNSGKYKVEKVGTYPASEFKFNIMEWVLFGFPDSETMNRLLSRDFPGCKYTTNLSAISSNQEDVKNIKVVFPYGILFYNVPFKQRYTEILYTLMISNQEIAKDLQNCRVLLLGPETDFDFNNPPANYTATYSGWVSR

SEQ ID NO: 420 - protein, 145 aa, Thermococcus kodakaraensis KOD1
  misc_feature (414542)..(414542): n is a or c or g or t.
  misc_feature (786890)..(786890): n is a or c or g or t.
  misc_feature (786907)..(786907): n is a or c or g or t.
  misc_feature (786944)..(786946): n is a or c or g or t.
  misc_feature (839139)..(839139): n is a or c or g or t.
  misc_feature (1128488)..(1128488): n is a or c or g or t.
  misc_feature (1128499)..(1128499): n is a or c or g or t.
  misc_feature (1128505)..(1128506): n is a or c or g or t.
  misc_feature (1128517)..(1128518): n is a or c or g or t.
  misc_feature (1128539)..(1128540): n is a or c or g or t.
  misc_feature (1561400)..(1561400): n is a or c or g or t.
  misc_feature (1561477)..(1561477): n is a or c or g or t.
  misc_feature (1561545)..(1561545): n is a or c or g or t.
  misc_feature (1767941)..(1767941): n is a or c or g or t.
MKETKEPLAKFHARLDKEGRIAIPKTIREALNIEKNDYVEVIVRKIEINPEKSIIKVLKQGYLVARVGAKGLIFLPADLKRDFDLHEKDIIEVLLLGYHKFDELVSEKGKKLLSKVQTSGKWIEVKQDELIPEDKVMKHFTYVFV

SEQ ID NO: 421 - protein, 145 aa, Thermococcus kodakaraensis KOD1
  misc_feature (414542)..(414542): n is a or c or g or t.
  misc_feature (786890)..(786890): n is a or c or g or t.
  misc_feature (786907)..(786907): n is a or c or g or t.
  misc_feature (786944)..(786946): n is a or c or g or t.
  misc_feature (839139)..(839139): n is a or c or g or t.
  misc_feature (1128488)..(1128488): n is a or c or g or t.
  misc_feature (1128499)..(1128499): n is a or c or g or t.
  misc_feature (1128505)..(1128506): n is a or c or g or t.
  misc_feature (1128517)..(1128518): n is a or c or g or t.
  misc_feature (1128539)..(1128540): n is a or c or g or t.
  misc_feature (1561400)..(1561400): n is a or c or g or t.
  misc_feature (1561477)..(1561477): n is a or c or g or t.
  misc_feature (1561545)..(1561545): n is a or c or g or t.
  misc_feature (1767941)..(1767941): n is a or c or g or t.
MSEFSGREIDWRASKPRLSERLPISKKTKEYLLEFVRSHRKEVETVDEAILFLLRFYYQHRGKTMSEADFWSWVASEKRRLDAVLEQVEEVPTLLEYIERELQVARDTAFSLSARGEKENAAYWTGYADALEDLLKKIERREVRA

SEQ ID NO: 422 - protein, 103 aa, Thermococcus kodakaraensis KOD1
  misc_feature (414542)..(414542): n is a or c or g or t.
  misc_feature (786890)..(786890): n is a or c or g or t.
  misc_feature (786907)..(786907): n is a or c or g or t.
  misc_feature (786944)..(786946): n is a or c or g or t.
  misc_feature (839139)..(839139): n is a or c or g or t.
  misc_feature (1128488)..(1128488): n is a or c or g or t.
  misc_feature (1128499)..(1128499): n is a or c or g or t.
  misc_feature (1128505)..(1128506): n is a or c or g or t.
  misc_feature (1128517)..(1128518): n is a or c or g or t.
  misc_feature (1128539)..(1128540): n is a or c or g or t.
  misc_feature (1561400)..(1561400): n is a or c or g or t.
  misc_feature (1561477)..(1561477): n is a or c or g or t.
  misc_feature (1561545)..(1561545): n is a or c or g or t.
  misc_feature (1767941)..(1767941): n is a or c or g or t.
MIATVDELIDFLKKHKKKGFKYAIIAMDPIGGWRAPSGKKKYYQANFAISRGVFAKDDLTNLMKAAGFAVFLYKDTDPFDEDTKAYFEEADSASSSPSEEGRS

SEQ ID NO: 423 - protein, 63 aa, Thermococcus kodakaraensis KOD1
  misc_feature (414542)..(414542): n is a or c or g or t.
  misc_feature (786890)..(786890): n is a or c or g or t.
  misc_feature (786907)..(786907): n is a or c or g or t.
  misc_feature (786944)..(786946): n is a or c or g or t.
  misc_feature (839139)..(839139): n is a or c or g or t.
  misc_feature (1128488)..(1128488): n is a or c or g or t.
  misc_feature (1128499)..(1128499): n is a or c or g or t.
  misc_feature (1128505)..(1128506): n is a or c or g or t.
  misc_feature (1128517)..(1128518): n is a or c or g or t.
  misc_feature (1128539)..(1128540): n is a or c or g or t.
  misc_feature (1561400)..(1561400): n is a or c or g or t.
  misc_feature (1561477)..(1561477): n is a or c or g or t.
  misc_feature (1561545)..(1561545): n is a or c or g or t.
  misc_feature (1767941)..(1767941): n is a or c or g or t.
VQHVEPSFEYRRGGSARDYYAVIPLEDVIVSRSFEEFADDLGLLLGVNLSKPAQVPAYAVGGR

SEQ ID NO: 424 - protein, 441 aa, Thermococcus kodakaraensis KOD1
  misc_feature (414542)..(414542): n is a or c or g or t.
  misc_feature (786890)..(786890): n is a or c or g or t.
  misc_feature (786907)..(786907): n is a or c or g or t.
  misc_feature (786944)..(786946): n is a or c or g or t.
  misc_feature (839139)..(839139): n is a or c or g or t.
  misc_feature (1128488)..(1128488): n is a or c or g or t.
  misc_feature (1128499)..(1128499): n is a or c or g or t.
  misc_feature (1128505)..(1128506): n is a or c or g or t.
  misc_feature (1128517)..(1128518): n is a or c or g or t.
  misc_feature (1128539)..(1128540): n is a or c or g or t.
  misc_feature (1561400)..(1561400): n is a or c or g or t.
  misc_feature (1561477)..(1561477): n is a or c or g or t.
  misc_feature (1561545)..(1561545): n is a or c or g or t.
  misc_feature (1767941)..(1767941): n is a or c or g or t.
VPRPGFEPGARARKARMFDRATPPGLDIREGRPFKNLSGLVPLIEHHCIRGSNPKLDGNLFNRSHKPKAMPMKTLADVFREALKEKGISSIGTLSKRFRKSKNKLQDIAIEIVHGKGAVFRVPEKTAVAWDLNGNRVDGSYYAYAPLCMREKFEPVLTPEELREKLPDWPYFIIDLYHWDKHTQKEKGKICLQVNQSYGLLRDYFTGSELAVTWANEEFREMFHGPLDRITTYGGPTSEFLKENGINEVVLLDPWAEEVLSEKDFDVKAFIIGGIVDTGGNKKKTTPKIGEELESAGIKVRRRKIVLRGDVVGVPDRINRILGIILKMMVEGKSMDEAVYEMQEPLHARWRLRKELPKRATRYMVEGKVYRVVEKELFDEYSKWLKIRWEDFVKVLRELDLVALERKRIHHLNKISNARIINGKLHRVILLKRAAMLCYNC

SEQ ID NO: 425 - protein, 353 aa, Thermococcus kodakaraensis KOD1
  misc_feature (414542)..(414542): n is a or c or g or t.
  misc_feature (786890)..(786890): n is a or c or g or t.
  misc_feature (786907)..(786907): n is a or c or g or t.
  misc_feature (786944)..(786946): n is a or c or g or t.
  misc_feature (839139)..(839139): n is a or c or g or t.
  misc_feature (1128488)..(1128488): n is a or c or g or t.
  misc_feature (1128499)..(1128499): n is a or c or g or t.
  misc_feature (1128505)..(1128506): n is a or c or g or t.
  misc_feature (1128517)..(1128518): n is a or c or g or t.
  misc_feature (1128539)..(1128540): n is a or c or g or t.
  misc_feature (1561400)..(1561400): n is a or c or g or t.
  misc_feature (1561477)..(1561477): n is a or c or g or t.
  misc_feature (1561545)..(1561545): n is a or c or g or t.
  misc_feature (1767941)..(1767941): n is a or c or g or t.
MRDEDEKFMRLALELAKRGEGWTNPNPMVGAVIVKDGKIIGVGWHRKFGEKHAEINAIEDAKAKGYDVRGATMYVTLEPCSHWGKQPPCADRIIQEGFKRVVVAMEDPNPLVAGQGIEKMRKAGIEVEVGLLEEEARKLNEIFLKYITTKLPFVSIKLALTLDGFIATETGSSKWITGEKARQRVQELRRKHMAIMVGSGTVLADNPRLNCRLENCPEKVKVILDRSGRVADEMRKGRKFRLFEDGRVIFFTEKPEKFKGIAEAYPITEPAKILKKLGELGIDSVLVEGGRIACQFLSLADKLYLFYGPKLFGRGIKPFECLKVENTKEAPLLRIESIERLGESFLVTAYPGW

SEQ ID NO: 426 - protein, 271 aa, Thermococcus kodakaraensis KOD1
  misc_feature (414542)..(414542): n is a or c or g or t.
  misc_feature (786890)..(786890): n is a or c or g or t.
  misc_feature (786907)..(786907): n is a or c or g or t.
  misc_feature (786944)..(786946): n is a or c or g or t.
  misc_feature (839139)..(839139): n is a or c or g or t.
  misc_feature (1128488)..(1128488): n is a or c or g or t.
  misc_feature (1128499)..(1128499): n is a or c or g or t.
  misc_feature (1128505)..(1128506): n is a or c or g or t.
  misc_feature (1128517)..(1128518): n is a or c or g or t.
  misc_feature (1128539)..(1128540): n is a or c or g or t.
  misc_feature (1561400)..(1561400): n is a or c or g or t.
  misc_feature (1561477)..(1561477): n is a or c or g or t.
  misc_feature (1561545)..(1561545): n is a or c or g or t.
  misc_feature (1767941)..(1767941): n is a or c or g or t.
VNSSGAHYIGGYYEYEGQNESLTKILNSISERKTTNPVRGKVEGDSVVFQFKNRTYAIKIREIAPYLWDEKELSNLIAFSRGNDIVIVPAIEMDVIENNFTLNAVPGEKTGTTRIELNFTYKLYLGYPFLLNGSTTGIIEWANTSMDYDQIPWEKLKDMFEKPLYVFYFNETSIIPLPILKVTPDMVLKDFELSPEYGFENLADVYILKDKASSTSPTFNVSEGTHSSLTASSMVSKGSQFNENTELLKEFFLVALIVSMAVMALHRHLRR

SEQ ID NO: 427 - protein, 433 aa, Thermococcus kodakaraensis KOD1
  misc_feature (414542)..(414542): n is a or c or g or t.
  misc_feature (786890)..(786890): n is a or c or g or t.
  misc_feature (786907)..(786907): n is a or c or g or t.
  misc_feature (786944)..(786946): n is a or c or g or t.
  misc_feature (839139)..(839139): n is a or c or g or t.
  misc_feature (1128488)..(1128488): n is a or c or g or t.
  misc_feature (1128499)..(1128499): n is a or c or g or t.
  misc_feature (1128505)..(1128506): n is a or c or g or t.
  misc_feature (1128517)..(1128518): n is a or c or g or t.
  misc_feature (1128539)..(1128540): n is a or c or g or t.
  misc_feature (1561400)..(1561400): n is a or c or g or t.
  misc_feature (1561477)..(1561477): n is a or c or g or t.
  misc_feature (1561545)..(1561545): n is a or c or g or t.
  misc_feature (1767941)..(1767941): n is a or c or g or t.
VKIMEKKWVLAAGAVVILLLAVFSFQGERAVEGTTAVALYNSVGIGVVEKTLTLELNEGLNNVPLKELEGLNVAEVTIMPPEGVEVLGIFSRGTNEDAYSANVGMDVEVKLDTGETIQGKFYGLKDGKLVVEGEDYYLIDPAKVVYFKASTLDESSVYAVLRAEKKGEYNVTLIYRVEGMNWKSRYKLYIGERAKLQGYVVITNPTAVGLESADVLLVAGDVQLYQTLPGPRVVYSLDEKASQATVGEPQKLEAFYVYALGTANINPSSTMVYPYVSMEVPFQREYLYESWVADGERPVYESISFKTDKVLPAGIVEVYRESEGRALLIGEMSIEHTPRDDVVRIGIGRDYDLKGRTTVLDVQRSDDRTYYKIKIEVENFGNDTKTVIIRHHKSGNLLSSSVEPIDETASYVEFSLTVNPGEKKEVVFEYSYK

SEQ ID NO: 428 - protein, 1711 aa, Thermococcus kodakaraensis KOD1
  misc_feature (414542)..(414542): n is a or c or g or t.
  misc_feature (786890)..(786890): n is a or c or g or t.
  misc_feature (786907)..(786907): n is a or c or g or t.
  misc_feature (786944)..(786946): n is a or c or g or t.
  misc_feature (839139)..(839139): n is a or c or g or t.
  misc_feature (1128488)..(1128488): n is a or c or g or t.
  misc_feature (1128499)..(1128499): n is a or c or g or t.
  misc_feature (1128505)..(1128506): n is a or c or g or t.
  misc_feature (1128517)..(1128518): n is a or c or g or t.
  misc_feature (1128539)..(1128540): n is a or c or g or t.
  misc_feature (1561400)..(1561400): n is a or c or g or t.
  misc_feature (1561477)..(1561477): n is a or c or g or t.
  misc_feature (1561545)..(1561545): n is a or c or g or t.
  misc_feature (1767941)..(1767941): n is a or c or g or t.
MKAVYREMCPNCWGRISDERLVMRNPCEECLDEPVHADSYFQLVSAVRNALKLRGTLKEWEKIYQLENQTREIEEFFKKATGFTFWSAQRTWVKRLLKGRSFSIIAPTGMGKSTFGAFMAVWHALKGKKSYIVVPTTPLVIQTVRKIEGIMENANADVRLAYYHGNLRKKEKEEMLERIKNEDYDILVTSAQWLARNYEEVLKGRHFDFIFVDDVDAFLKASKNIDRSLYLLGFTDEIIQKAWEIIRLKKQMSRYLNGNSEDRNEKLNGLNREIEKLQREIEKFKRKNKIGIMIIASATGSARGDRIKLYRELLGFEVGSGRSALRNVVDSYLKPTKDIKEHVEELLTRLGKGGLIFVPVDQGLGYAEELANYLSEKGFKIELVSSKNKKALEKFENGEADYLIGSATYYGSLVRGIDLPHLIRYAVFTGVPKFRFSIDLERPTIYRALGLLSEIMDFLSEEDRRQAEKLHARLRRLIRNIPQFELLKIEEALAEGLPIENEFHNHVLGVFRELVEFLRRVLRDEEVLRKLAEDPFISLVKEEGKWYIEIPDVRTYIQATGRTSRLFAGGITKGLSVLIVDNEKVFNGLVRQMRWRFQEFKMVPFEELDLDEILRQIDEDREKVRLVMEGKISAKVKDLVRSALMIVESPNKARTIANFFGQPSKTRIGDLVAYEISVGDRMLTILASGGHMFDLVTNEGYHGVLIQNEGDMLKFIPVYDTLKRCRDCGHQFVDWEKKGVCPRCGSTNVRDALENVIAMREIAQEVDEILIATDPDTEGEKIAWDIRNVLAPYTPNIKRIEFHEVTRPAIMKAIQEARDVNENRVNAQIVRRIEDRWIGFELSQELQRVFESYNLSAGRVQTPVLGWIIERYKEFTESEVYFLGLTLENGLQVTIELGKDGKDVEPPEYVTVEEVQLEERELNPAPPYTTDAMLKDASTFLKLSAPETMRLAQDLFEAGLCVTPDTLVSLADGRIMEIKDAVEKSEGNLLSVNGLKPKEAKALKFWEIDWNGPLKVIKLKNGHEIKATPDHGLLVMREGKLGWVSAKNVREGDYVAFAYNTGHRGRDEYTLLKLMIKLGITDVMVELDEEYFNEKVAPIVRERISTSTKYKYLRRRVLPLYLLQEWGLDDYEAHVKSLYRQRAGSKPIPNFKLDGRFWYVFGLVLGDGTLRDSKVLISQTPLKDVKSVLEDVFPFLRVFETTNQVGFSNSIIAEVFRRLGARKGKLHPLVFGLREEYINAMIAGYFDTDGTFSILNDRKGPNFRGILTSKRGDVLRMLSVYLYQIGIMNYLRRDERTGVWDLIISNRSLEKFREKIYPYLRIRRAQFDEAYSVYRASRRAFEGDLLPVAPVFGKLKFKNGTKNRILKETGIDVWNWLKRPEGEIPRDKLSKVLEYAEESPEKEFLKSLVEAGVTWVKVKGVEEELYTGKLYDFTTTTENFLSNGAVSHNCTYHRTDSTHVSNTGIEVAKEYITQELGEKYFKPRPWGEEGAHEAIRPTRPIDTGRLMQLIRDGIIQLPRNLTRNHYRLYDMIFRRFMTSQMTPAKILYEKAVINAGVGKAELEGYVEIIEDGWTRLRSPPLRELPKLEKGMKLKVVEAKKWKAPKVSLYTQGDIIALMKERKIGRPSTYAKIVETLMRRGYVVETKGRKKLLPTEKGIKVYHYLVSKYRDLVSEERTRELEEIMDRIEEGIEDYIKVLGELYSEIQRYVSG

SEQ ID NO: 429 - protein, 406 aa, Thermococcus kodakaraensis KOD1
  misc_feature (414542)..(414542): n is a or c or g or t.
  misc_feature (786890)..(786890): n is a or c or g or t.
  misc_feature (786907)..(786907): n is a or c or g or t.
  misc_feature (786944)..(786946): n is a or c or g or t.
  misc_feature (839139)..(839139): n is a or c or g or t.
  misc_feature (1128488)..(1128488): n is a or c or g or t.
  misc_feature (1128499)..(1128499): n is a or c or g or t.
  misc_feature (1128505)..(1128506): n is a or c or g or t.
  misc_feature (1128517)..(1128518): n is a or c or g or t.
  misc_feature (1128539)..(1128540): n is a or c or g or t.
  misc_feature (1561400)..(1561400): n is a or c or g or t.
  misc_feature (1561477)..(1561477): n is a or c or g or t.
  misc_feature (1561545)..(1561545): n is a or c or g or t.
  misc_feature (1767941)..(1767941): n is a or c or g or t.
MILQVALDLTDIEQAISIAEKAARGGAHWLEVGTPLIKKEGMRAVELMKRRFPDRKIVADLKTMDTGALEVEMAARHGADVVSILGVADDKTIKDAVEVARRYGIRVMVDLIGVKDKVKRAKELEKMGVHYILVHTGIDEQAQGKNPLEDLEKVVKAVKVPVAVAGGLNLDTIPKVIELGATIIIVGSAITKAKDPEEVTRRIIDLFWGEYMMTIRKAMFDITDHIRSVAENLKLEQVRGLVDAMIGANKIFIYGAGRSGLVGKAFAMRLMHLDFNVYVVGETITPAFEAGDLLIAISGSGETKSIVDAAQIAKEQGGKVVGITSYADSTLGKLADVVVEIPGRTKADVPTDYIARQMLTQYKWIAPMGTLFEDSTMVFLDGIIALLMATFQKTEKDMKRKHATLE

SEQ ID NO: 430 - protein, 217 aa, Thermococcus kodakaraensis KOD1
  misc_feature (414542)..(414542): n is a or c or g or t.
  misc_feature (786890)..(786890): n is a or c or g or t.
  misc_feature (786907)..(786907): n is a or c or g or t.
  misc_feature (786944)..(786946): n is a or c or g or t.
  misc_feature (839139)..(839139): n is a or c or g or t.
  misc_feature (1128488)..(1128488): n is a or c or g or t.
  misc_feature (1128499)..(1128499): n is a or c or g or t.
  misc_feature (1128505)..(1128506): n is a or c or g or t.
  misc_feature (1128517)..(1128518): n is a or c or g or t.
  misc_feature (1128539)..(1128540): n is a or c or g or t.
  misc_feature (1561400)..(1561400): n is a or c or g or t.
  misc_feature (1561477)..(1561477): n is a or c or g or t.
  misc_feature (1561545)..(1561545): n is a or c or g or t.
  misc_feature (1767941)..(1767941): n is a or c or g or t.
MGRIKAVLFDIDGTLLTEMPLIQLFLPQVYEKLAKKLETTKEEARNVFLSEIFSRRDTYDWHDWNFFFELFGLNMRYEDLLRRYPHKLHVYPDTIPTLEWLKGSGYPLGVVTSGPEYQRLKLKLTGLEGYFDVIVTREDVKAIKPEPKIFLYALEKLGVEPKEAAFVGDSLSQDVYGAKHVGMLSIWINREGEPGHHLADYEIRTLHELRKILGVVE

SEQ ID NO: 431 - protein, 170 aa, Thermococcus kodakaraensis KOD1
  misc_feature (414542)..(414542): n is a or c or g or t.
  misc_feature (786890)..(786890): n is a or c or g or t.
  misc_feature (786907)..(786907): n is a or c or g or t.
  misc_feature (786944)..(786946): n is a or c or g or t.
  misc_feature (839139)..(839139): n is a or c or g or t.
  misc_feature (1128488)..(1128488): n is a or c or g or t.
  misc_feature (1128499)..(1128499): n is a or c or g or t.
  misc_feature (1128505)..(1128506): n is a or c or g or t.
  misc_feature (1128517)..(1128518): n is a or c or g or t.
  misc_feature (1128539)..(1128540): n is a or c or g or t.
  misc_feature (1561400)..(1561400): n is a or c or g or t.
  misc_feature (1561477)..(1561477): n is a or c or g or t.
  misc_feature (1561545)..(1561545): n is a or c or g or t.
  misc_feature (1767941)..(1767941): n is a or c or g or t.
VKAPICEVCLKTDGILCPADEKKLQEGIISELDVKVARLLYKLLGDADIEFKNAVEAGDLVVIVVGEGDVPVVIGKGGKNIKALIRELGKRVRVIEGMKAENPNELKKLASDLFYPAGVFGVNVVYKAGGERDYKILVFGRDRKKLPEKPEVLESILSQITGKDVRISFV

SEQ ID NO: 432 - protein, 471 aa, Thermococcus kodakaraensis KOD1
  misc_feature (414542)..(414542): n is a or c or g or t.
  misc_feature (786890)..(786890): n is a or c or g or t.
  misc_feature (786907)..(786907): n is a or c or g or t.
  misc_feature (786944)..(786946): n is a or c or g or t.
  misc_feature (839139)..(839139): n is a or c or g or t.
  misc_feature (1128488)..(1128488): n is a or c or g or t.
  misc_feature (1128499)..(1128499): n is a or c or g or t.
  misc_feature (1128505)..(1128506): n is a or c or g or t.
  misc_feature (1128517)..(1128518): n is a or c or g or t.
  misc_feature (1128539)..(1128540): n is a or c or g or t.
  misc_feature (1561400)..(1561400): n is a or c or g or t.
  misc_feature (1561477)..(1561477): n is a or c or g or t.
  misc_feature (1561545)..(1561545): n is a or c or g or t.
  misc_feature (1767941)..(1767941): n is a or c or g or t.
MSRQMVGALVLLLLLTLPGVSAVSLPWSGLSIFGASSGAYPIRLDGVEQTGNIAVVTWDVPPNCLSGYGTVFISRDGRTITERVSLGRLKPWGKKVAVFLNVREPVYVKLRITSGNGIFMSSWVKLRPQSVPRVFSTGYTTTYSWGDGEIRPQFVPIPAIIGAIISVGFALWDAYDAYNACSDYGEDSIKCTVAAGSVFVFSLAMEGDELVGVLRHGDELVEVPGKLYSTLKRLDLVEEVGDGVVRAKERFAHIFDDIVKHGDDAAKALDDLVRAGVSKEAVEETVKHGATIKEIKEGIERSERALERIAGGAEGKHVLGKVRTYDVAIEKGNEKEGLIHMLLRHVWGYDMENVGKTSFWPMGQKIIVSGQEKQLPRVFRDEGELMEFLKEVVERVSKDPEYISEKFFKNGVPNRNFGIPVDLKKLGMRVDGIDVVQLEFRFEKGEFVLKTAYPVDGWAVETFIPGKGGWQ

SEQ ID NO: 433 - protein, 128 aa, Thermococcus kodakaraensis KOD1
  misc_feature (414542)..(414542): n is a or c or g or t.
  misc_feature (786890)..(786890): n is a or c or g or t.
  misc_feature (786907)..(786907): n is a or c or g or t.
  misc_feature (786944)..(786946): n is a or c or g or t.
  misc_feature (839139)..(839139): n is a or c or g or t.
  misc_feature (1128488)..(1128488): n is a or c or g or t.
  misc_feature (1128499)..(1128499): n is a or c or g or t.
  misc_feature (1128505)..(1128506): n is a or c or g or t.
  misc_feature (1128517)..(1128518): n is a or c or g or t.
  misc_feature (1128539)..(1128540): n is a or c or g or t.
  misc_feature (1561400)..(1561400): n is a or c or g or t.
  misc_feature (1561477)..(1561477): n is a or c or g or t.
  misc_feature (1561545)..(1561545): n is a or c or g or t.
  misc_feature (1767941)..(1767941): n is a or c or g or t.
VLIDSIPPTIITKEVKIKLWPTPEELPEYINKTLASMNNATPLAEQILNVSKAYLPPEEKKGNPWKPAAIVFLLVALVAGALAINYWNEANRLKEQLMKKKQRRPGGLPKKEEETEEDISKSEEKKVI

SEQ ID NO: 434 - protein, 421 aa, Thermococcus kodakaraensis KOD1
  misc_feature (414542)..(414542): n is a or c or g or t.
  misc_feature (786890)..(786890): n is a or c or g or t.
  misc_feature (786907)..(786907): n is a or c or g or t.
  misc_feature (786944)..(786946): n is a or c or g or t.
  misc_feature (839139)..(839139): n is a or c or g or t.
  misc_feature (1128488)..(1128488): n is a or c or g or t.
  misc_feature (1128499)..(1128499): n is a or c or g or t.
  misc_feature (1128505)..(1128506): n is a or c or g or t.
  misc_feature (1128517)..(1128518): n is a or c or g or t.
  misc_feature (1128539)..(1128540): n is a or c or g or t.
  misc_feature (1561400)..(1561400): n is a or c or g or t.
  misc_feature (1561477)..(1561477): n is a or c or g or t.
  misc_feature (1561545)..(1561545): n is a or c or g or t.
  misc_feature (1767941)..(1767941): n is a or c or g or t.
MIEQRVWEEVIGDNLELRVKYVERNVKVIFPKSRALAVVGPRRAGKTYFLFQLWDAIDSERKKSLYVNFEDPRLIGVTSSDLMEMLRVYYSLLNHPKGTKLTLLLDEVQVVEGWEKFVRYLLDRGHRVVVTGSSSKLLSKEVATVLRGRAVTLNLYPFSLPEVLMVKGLKGELPSLETRGKIRGVLRECLEWGSYPETVLQPELRREILREILEVTIYRDVVERWRVDNLKALRFLFKLLASSSHATITKLHSTMKSLGIAVGKPTLANYLEYLNDALVVFPLRAYVKSEKKRELLGFKPYFVDNGLLAVLGVRDWSRLLENLVFTELLKRGLEPNRDLFYYVTQEGREVDFILPGEELIQVSWELHPGNEKRELSPLVNAANETGIEKMTLVTWERYPAEGIKIGEKSIRVVPLEEWALW

SEQ ID NO: 435 - protein, 126 aa, Thermococcus kodakaraensis KOD1
  misc_feature (414542)..(414542): n is a or c or g or t.
  misc_feature (786890)..(786890): n is a or c or g or t.
  misc_feature (786907)..(786907): n is a or c or g or t.
  misc_feature (786944)..(786946): n is a or c or g or t.
  misc_feature (839139)..(839139): n is a or c or g or t.
  misc_feature (1128488)..(1128488): n is a or c or g or t.
  misc_feature (1128499)..(1128499): n is a or c or g or t.
  misc_feature (1128505)..(1128506): n is a or c or g or t.
  misc_feature (1128517)..(1128518): n is a or c or g or t.
  misc_feature (1128539)..(1128540): n is a or c or g or t.
  misc_feature (1561400)..(1561400): n is a or c or g or t.
  misc_feature (1561477)..(1561477): n is a or c or g or t.
  misc_feature (1561545)..(1561545): n is a or c or g or t.
  misc_feature (1767941)..(1767941): n is a or c or g or t.
MVEVEHWNTLRLKIYIGENDRWEGKPLYKAIVEKLREMGMAGATVYRGIYGFGKKSRVHSSDVMRLSTDLPVVVEVVDRGHKIEKAICEIKPMIKDGMITVEPVIVVWVGTKEEIEKFEEDAVRET

SEQ ID NO: 436 - protein, 171 aa, Thermococcus kodakaraensis KOD1
  misc_feature (414542)..(414542): n is a or c or g or t.
  misc_feature (786890)..(786890): n is a or c or g or t.
  misc_feature (786907)..(786907): n is a or c or g or t.
  misc_feature (786944)..(786946): n is a or c or g or t.
  misc_feature (839139)..(839139): n is a or c or g or t.
  misc_feature (1128488)..(1128488): n is a or c or g or t.
  misc_feature (1128499)..(1128499): n is a or c or g or t.
  misc_feature (1128505)..(1128506): n is a or c or g or t.
  misc_feature (1128517)..(1128518): n is a or c or g or t.
  misc_feature (1128539)..(1128540): n is a or c or g or t.
  misc_feature (1561400)..(1561400): n is a or c or g or t.
  misc_feature (1561477)..(1561477): n is a or c or g or t.
  misc_feature (1561545)..(1561545): n is a or c or g or t.
  misc_feature (1767941)..(1767941): n is a or c or g or t.
MMSLEFEVPLDLLNDVMDFIIEEDAKLQWVRYSKRTNSVVIRVLISAEVIEQFLLRLARVVGIPLEVTIVEEKIGEKLIHEAFLFSVEVSSGTYPVFVLLYYNVSKFYPDRIVVGTLADAPQELVDAVFSRTVGKLRLLDTEKAKSTVENGMLLIYLRANPPSGQLGVSSA

SEQ ID NO: 437 - protein, 406 aa, Thermococcus kodakaraensis KOD1
  misc_feature (414542)..(414542): n is a or c or g or t.
  misc_feature (786890)..(786890): n is a or c or g or t.
  misc_feature (786907)..(786907): n is a or c or g or t.
  misc_feature (786944)..(786946): n is a or c or g or t.
  misc_feature (839139)..(839139): n is a or c or g or t.
  misc_feature (1128488)..(1128488): n is a or c or g or t.
  misc_feature (1128499)..(1128499): n is a or c or g or t.
  misc_feature (1128505)..(1128506): n is a or c or g or t.
  misc_feature (1128517)..(1128518): n is a or c or g or t.
  misc_feature (1128539)..(1128540): n is a or c or g or t.
  misc_feature (1561400)..(1561400): n is a or c or g or t.
  misc_feature (1561477)..(1561477): n is a or c or g or t.
  misc_feature (1561545)..(1561545): n is a or c or g or t.
  misc_feature (1767941)..(1767941): n is a or c or g or t.
VIQMLHHVKLIYATKSRKLVGKKIVLAIPGSIAAVECVKLARELIRHGAEVHAVMSENATKIIHPYAMEFATGNPVVTEITGFIEHVELAGEHENKADLVLVCPATANTISKIACGIDDTPVTTVVTTAFAHTPIMIAPAMHSTMYDHPIVKENIEKLKKLGVEFIEPRFEEGKAKVASIEEIVYRVIRKLHPKSLEGKRVLVTAGATREYIDPIRYITNASSGKMGVAIAEEAEFRGAEVTLIRTKSSVPSFVENQIEVETVEEMLEAIESELKGKKYDVVVLAAAVSDFRVKNKADVKIKSGQPLVLELEPTPKIIDRVKELQPGVFLVGFKAETGLSEEELISAARKQIERAGSDLVVANTLKAFGSEENEVVLVGRDFAKKLPRMTKRELAERLWDEIEKML

SEQ ID NO: 438 - protein, 115 aa, Thermococcus kodakaraensis KOD1
  misc_feature (414542)..(414542): n is a or c or g or t.
  misc_feature (786890)..(786890): n is a or c or g or t.
  misc_feature (786907)..(786907): n is a or c or g or t.
  misc_feature (786944)..(786946): n is a or c or g or t.
  misc_feature (839139)..(839139): n is a or c or g or t.
  misc_feature (1128488)..(1128488): n is a or c or g or t.
  misc_feature (1128499)..(1128499): n is a or c or g or t.
  misc_feature (1128505)..(1128506): n is a or c or g or t.
  misc_feature (1128517)..(1128518): n is a or c or g or t.
  misc_feature (1128539)..(1128540): n is a or c or g or t.
  misc_feature (1561400)..(1561400): n is a or c or g or t.
  misc_feature (1561477)..(1561477): n is a or c or g or t.
  misc_feature (1561545)..(1561545): n is a or c or g or t.
  misc_feature (1767941)..(1767941): n is a or c or g or t.
MLSQTIKSGDWKGEKHVPVIEYEKEGDLVKVEVSVGKEIPHPNTPEHHIAWIQLWFHPEDGAFPILVGKVEFSNHTDPLTEPRAVFFFRTQKKGKLYALSYCNIHGLWENEVTLE

SEQ ID NO: 439 - protein, 168 aa, Thermococcus kodakaraensis KOD1
  misc_feature (414542)..(414542): n is a or c or g or t.
  misc_feature (786890)..(786890): n is a or c or g or t.
  misc_feature (786907)..(786907): n is a or c or g or t.
  misc_feature (786944)..(786946): n is a or c or g or t.
  misc_feature (839139)..(839139): n is a or c or g or t.
  misc_feature (1128488)..(1128488): n is a or c or g or t.
  misc_feature (1128499)..(1128499): n is a or c or g or t.
  misc_feature (1128505)..(1128506): n is a or c or g or t.
  misc_feature (1128517)..(1128518): n is a or c or g or t.
  misc_feature (1128539)..(1128540): n is a or c or g or t.
  misc_feature (1561400)..(1561400): n is a or c or g or t.
  misc_feature (1561477)..(1561477): n is a or c or g or t.
  misc_feature (1561545)..(1561545): n is a or c or g or t.
  misc_feature (1767941)..(1767941): n is a or c or g or t.
VNERIIILEVQKPLVKSMRKALVIGIAVVVLVVAGYGALSWDGKEASGSPQDSHAKFVKMELDKSTYSPSDTMIIRLINEGETKATTSYHFRLYREENGEWEEVPVNLMFIEIAVSIEPGKSWEQKVNLADLKLSPGHYKIVKKVILTSQGTENAASYEVSAEFEVKG

SEQ ID NO: 440 - protein, 70 aa, Thermococcus kodakaraensis KOD1
  misc_feature (414542)..(414542): n is a or c or g or t.
  misc_feature (786890)..(786890): n is a or c or g or t.
  misc_feature (786907)..(786907): n is a or c or g or t.
  misc_feature (786944)..(786946): n is a or c or g or t.
  misc_feature (839139)..(839139): n is a or c or g or t.
  misc_feature (1128488)..(1128488): n is a or c or g or t.
  misc_feature (1128499)..(1128499): n is a or c or g or t.
  misc_feature (1128505)..(1128506): n is a or c or g or t.
  misc_feature (1128517)..(1128518): n is a or c or g or t.
  misc_feature (1128539)..(1128540): n is a or c or g or t.
  misc_feature (1561400)..(1561400): n is a or c or g or t.
  misc_feature (1561477)..(1561477): n is a or c or g or t.
  misc_feature (1561545)..(1561545): n is a or c or g or t.
  misc_feature (1767941)..(1767941): n is a or c or g or t.
VYQVRLYLEGLRVNEVELETLRKLAQKALKELEEAYLRLPDTDNGKTYLFRGKERVRLMLQILESAKKEG

SEQ ID NO: 441 - protein, 333 aa, Thermococcus kodakaraensis KOD1
  misc_feature (414542)..(414542): n is a or c or g or t.
  misc_feature (786890)..(786890): n is a or c or g or t.
  misc_feature (786907)..(786907): n is a or c or g or t.
  misc_feature (786944)..(786946): n is a or c or g or t.
  misc_feature (839139)..(839139): n is a or c or g or t.
  misc_feature (1128488)..(1128488): n is a or c or g or t.
  misc_feature (1128499)..(1128499): n is a or c or g or t.
  misc_feature (1128505)..(1128506): n is a or c or g or t.
  misc_feature (1128517)..(1128518): n is a or c or g or t.
  misc_feature (1128539)..(1128540): n is a or c or g or t.
  misc_feature (1561400)..(1561400): n is a or c or g or t.
  misc_feature (1561477)..(1561477): n is a or c or g or t.
  misc_feature (1561545)..(1561545): n is a or c or g or t.
  misc_feature (1767941)..(1767941): n is a or c or g or t.
MRPRVLVTFKMKSKPVEELKKYADVDFLLYPSVEELAEKIKDYDGLIVSPLNRVPREVIERAERLKVISCHSAGYDHVDVEAATKKGIYVTKVSGVLSEAVAEFAVGLTIALLRKFVYTDKLIRRGEWDSHAKIWSTFKDIETVYGKKVGILGMGAIGKAIARRMKAMGTEILYWSRSRKEDIEAEVGAKYLPLDEVLRESDIVILALPATPETYHIINEERIKLLEGKYLVNIGRGTLVDEKAVVKAIEEGRLKGYATDVFEKEPVTEHPLFKYEWETVLTPHHAGLSKEAMEDMGFQAVMNLLAVLRGEIPKDLVNREVVKVRPPEEVKML

SEQ ID NO: 442 - protein, 152 aa, Thermococcus kodakaraensis KOD1
  misc_feature (414542)..(414542): n is a or c or g or t.
  misc_feature (786890)..(786890): n is a or c or g or t.
  misc_feature (786907)..(786907): n is a or c or g or t.
  misc_feature (786944)..(786946): n is a or c or g or t.
  misc_feature (839139)..(839139): n is a or c or g or t.
  misc_feature (1128488)..(1128488): n is a or c or g or t.
  misc_feature (1128499)..(1128499): n is a or c or g or t.
  misc_feature (1128505)..(1128506): n is a or c or g or t.
  misc_feature (1128517)..(1128518): n is a or c or g or t.
  misc_feature (1128539)..(1128540): n is a or c or g or t.
  misc_feature (1561400)..(1561400): n is a or c or g or t.
  misc_feature (1561477)..(1561477): n is a or c or g or t.
  misc_feature (1561545)..(1561545): n is a or c or g or t.
  misc_feature (1767941)..(1767941): n is a or c or g or t.
MWREEIKKLLEPYGLPVNTERGVYIELIDDEGEVYDRLAFYVENPEEEWPLVKALVEAIADLTDHDIPGRNVFAFGFRPDFGGIVIKLSFFDAEAGKGAVIGEVPERILKIAEKNAIPISRAEGDGIGLPREYTGEDFEALVKLVEAVTFEW

SEQ ID NO: 443 - protein, 139 aa, Thermococcus kodakaraensis KOD1
  misc_feature (414542)..(414542): n is a or c or g or t.
  misc_feature (786890)..(786890): n is a or c or g or t.
  misc_feature (786907)..(786907): n is a or c or g or t.
  misc_feature (786944)..(786946): n is a or c or g or t.
  misc_feature (839139)..(839139): n is a or c or g or t.
  misc_feature (1128488)..(1128488): n is a or c or g or t.
  misc_feature (1128499)..(1128499): n is a or c or g or t.
  misc_feature (1128505)..(1128506): n is a or c or g or t.
  misc_feature (1128517)..(1128518): n is a or c or g or t.
  misc_feature (1128539)..(1128540): n is a or c or g or t.
  misc_feature (1561400)..(1561400): n is a or c or g or t.
  misc_feature (1561477)..(1561477): n is a or c or g or t.
  misc_feature (1561545)..(1561545): n is a or c or g or t.
  misc_feature (1767941)..(1767941): n is a or c or g or t.
MEFKAGRTFLFRVPAGEDLLEAINRSAESRGIKTGVVMGIGSLRNPVVGYYSEEEKRYRSIELSGTFELLSLNGNISLKDGKPFAHLHVTLGDEEGRVFGGHLIRGEVFVAEVYIEELIGKPLERKDMGNNLWLWETER

SEQ ID NO: 444 - protein, 356 aa, Thermococcus kodakaraensis KOD1
  misc_feature (414542)..(414542): n is a or c or g or t.
  misc_feature (786890)..(786890): n is a or c or g or t.
  misc_feature (786907)..(786907): n is a or c or g or t.
  misc_feature (786944)..(786946): n is a or c or g or t.
  misc_feature (839139)..(839139): n is a or c or g or t.
  misc_feature (1128488)..(1128488): n is a or c or g or t.
  misc_feature (1128499)..(1128499): n is a or c or g or t.
  misc_feature (1128505)..(1128506): n is a or c or g or t.
  misc_feature (1128517)..(1128518): n is a or c or g or t.
  misc_feature (1128539)..(1128540): n is a or c or g or t.
  misc_feature (1561400)..(1561400): n is a or c or g or t.
  misc_feature (1561477)..(1561477): n is a or c or g or t.
  misc_feature (1561545)..(1561545): n is a or c or g or t.
  misc_feature (1767941)..(1767941): n is a or c or g or t.
VMIMVDVRLENVVKEFDGVQAVKGINLHIKHGELFTLLGPSGCGKTTTLRMIAGLDYPTSGKIYFGDQEVTYLPSYERGAVLVFQNYALWPHMTVFDNVAYGLKLKKVPKEEIKKKVEWALELVKLKGFENRYPTQLSGGQQQRVAIARALVVEPKVLLLDEPLSNLDAKLRLEMRSEIRRIQRELGITVIYVTHDQEEAMAISDRIAVMNVGTVEQVGTPRDIYERPQSEFVASFMGKTNVIPAKVVERDGNKVTVEFESFRLDGLYYDGDKDDVVLVIRPERIKLHPVENAVSIEGTVDLVEYYGFFTEVVGLFGDTRIIARTISDREVQGLRPTQPVTFYINREDIIVLPKQL

SEQ ID NO: 445 - protein, 698 aa, Thermococcus kodakaraensis KOD1
  misc_feature (414542)..(414542): n is a or c or g or t.
  misc_feature (786890)..(786890): n is a or c or g or t.
  misc_feature (786907)..(786907): n is a or c or g or t.
  misc_feature (786944)..(786946): n is a or c or g or t.
  misc_feature (839139)..(839139): n is a or c or g or t.
  misc_feature (1128488)..(1128488): n is a or c or g or t.
  misc_feature (1128499)..(1128499): n is a or c or g or t.
  misc_feature (1128505)..(1128506): n is a or c or g or t.
  misc_feature (1128517)..(1128518): n is a or c or g or t.
  misc_feature (1128539)..(1128540): n is a or c or g or t.
  misc_feature (1561400)..(1561400): n is a or c or g or t.
  misc_feature (1561477)..(1561477): n is a or c or g or t.
  misc_feature (1561545)..(1561545): n is a or c or g or t.
  misc_feature (1767941)..(1767941): n is a or c or g or t.
VFFFSPGSKIASRGNVLSGVDFLLPGDTMLRKVLSMLLAITAVLAAAGYVSAEEYSYTYSDYLYQPAPVVPAFALPGESFELYVKEGVSVSSIEAVSVLHGPYQLEIQGTSPGEDGMTVVKVKTPDDIAPDTYFLLIKTDKGTLVLPNGLKVFKEWPKELKLAWTSDTHVTTGAKIGYVCGDYFQSNIYKLEEMCSNPIPLHSVVATYSAYLYWGMNGATLMINTGDEVDTSGDMVGYKIMFDITKDTSAADMPVVGIKGNHDDPPTVYTQLLGPKYFYVTIGKFIIIGLDTGGDQGYPTEDQLDWMEKVLEEHKDYTPIILYHHPYFFDPRWNYLGGVLKGLDPDADWDQIKGHLRRSWSSQEEISKRFLEDIVKYNVPLTMSGHIHHDMYWLYIDKNGNKHYFLTLTSTGAPDKEPNPPANPKHSPTWYGSNLVVIKEDGSVEMPYVNVEIKDDKVQSDFMSVPVPQRFMAFRHVSEAGTAVKFINQLDESVSGPIVLPIPEGAKVDPEATNITYTVLGERQIADQYYIMLNVTIPQGVSQLVIDTGADTEKPVVQIAYLQPSHPKPNANFMAYFTAQDNLGIRDLYAVIYDENGNRVKYGKVDKFPGEPSSGKPGDTFYIVQLPGLEEGKYKIEIVAEDFHGNRATATKEITITSTSKAAKTTTAKQTSSEGKSTCGPAALVGLAVVPLLLRRRK

SEQ ID NO: 446 - protein, 42 aa, Thermococcus kodakaraensis KOD1
  misc_feature (414542)..(414542): n is a or c or g or t.
  misc_feature (786890)..(786890): n is a or c or g or t.
  misc_feature (786907)..(786907): n is a or c or g or t.
  misc_feature (786944)..(786946): n is a or c or g or t.
  misc_feature (839139)..(839139): n is a or c or g or t.
  misc_feature (1128488)..(1128488): n is a or c or g or t.
  misc_feature (1128499)..(1128499): n is a or c or g or t.
  misc_feature (1128505)..(1128506): n is a or c or g or t.
  misc_feature (1128517)..(1128518): n is a or c or g or t.
  misc_feature (1128539)..(1128540): n is a or c or g or t.
  misc_feature (1561400)..(1561400): n is a or c or g or t.
  misc_feature (1561477)..(1561477): n is a or c or g or t.
  misc_feature (1561545)..(1561545): n is a or c or g or t.
  misc_feature (1767941)..(1767941): n is a or c or g or t.
MHMLNSLKEASKGKNSIYRFLCESLTQKETSNLIQLVEKLNL

SEQ ID NO: 447 - protein, 28 aa, Thermococcus kodakaraensis KOD1
  misc_feature (414542)..(414542): n is a or c or g or t.
  misc_feature (786890)..(786890): n is a or c or g or t.
  misc_feature (786907)..(786907): n is a or c or g or t.
  misc_feature (786944)..(786946): n is a or c or g or t.
  misc_feature (839139)..(839139): n is a or c or g or t.
  misc_feature (1128488)..(1128488): n is a or c or g or t.
  misc_feature (1128499)..(1128499): n is a or c or g or t.
  misc_feature (1128505)..(1128506): n is a or c or g or t.
  misc_feature (1128517)..(1128518): n is a or c or g or t.
  misc_feature (1128539)..(1128540): n is a or c or g or t.
  misc_feature (1561400)..(1561400): n is a or c or g or t.
  misc_feature (1561477)..(1561477): n is a or c or g or t.
  misc_feature (1561545)..(1561545): n is a or c or g or t.
  misc_feature (1767941)..(1767941): n is a or c or g or t.
MPLGGHYTRYNVLEFFYRIHGITSILEQ

SEQ ID NO: 448 - protein, 125 aa, Thermococcus kodakaraensis KOD1
  misc_feature (414542)..(414542): n is a or c or g or t.
  misc_feature (786890)..(786890): n is a or c or g or t.
  misc_feature (786907)..(786907): n is a or c or g or t.
  misc_feature (786944)..(786946): n is a or c or g or t.
  misc_feature (839139)..(839139): n is a or c or g or t.
  misc_feature (1128488)..(1128488): n is a or c or g or t.
  misc_feature (1128499)..(1128499): n is a or c or g or t.
  misc_feature (1128505)..(1128506): n is a or c or g or t.
  misc_feature (1128517)..(1128518): n is a or c or g or t.
  misc_feature (1128539)..(1128540): n is a or c or g or t.
  misc_feature (1561400)..(1561400): n is a or c or g or t.
  misc_feature (1561477)..(1561477): n is a or c or g or t.
  misc_feature (1561545)..(1561545): n is a or c or g or t.
  misc_feature (1767941)..(1767941): n is a or c or g or t.
VITSKTVHVVQTAYVLKEDTTDKDGLYFFAIFFLMIPGLILVGAGVRKVATLTVDDDVIEAKLVMGGKLELKVNNYKLDERIDHAVKFKAGRDESRIVEIKPIRIKWNALGWVFYVDDQEVGMLP

SEQ ID NO: 449 - protein, 104 aa, Thermococcus kodakaraensis KOD1
  misc_feature (414542)..(414542): n is a or c or g or t.
  misc_feature (786890)..(786890): n is a or c or g or t.
  misc_feature (786907)..(786907): n is a or c or g or t.
  misc_feature (786944)..(786946): n is a or c or g or t.
  misc_feature (839139)..(839139): n is a or c or g or t.
  misc_feature (1128488)..(1128488): n is a or c or g or t.
  misc_feature (1128499)..(1128499): n is a or c or g or t.
  misc_feature (1128505)..(1128506): n is a or c or g or t.
  misc_feature (1128517)..(1128518): n is a or c or g or t.
  misc_feature (1128539)..(1128540): n is a or c or g or t.
  misc_feature (1561400)..(1561400): n is a or c or g or t.
  misc_feature (1561477)..(1561477): n is a or c or g or t.
  misc_feature (1561545)..(1561545): n is a or c or g or t.
  misc_feature (1767941)..(1767941): n is a or c or g or t.
VIELLFLLFGLFIMFFGALGLLRFPDVYTRLHATAKCDTGGAINILLALALASDFPLTGKLKFLVIAFTIAMINPMVSHAIARAAYKSGIKPKAVVDMYAWDNP

SEQ ID NO: 450 - protein, 81 aa, Thermococcus kodakaraensis KOD1
  misc_feature (414542)..(414542): n is a or c or g or t.
  misc_feature (786890)..(786890): n is a or c or g or t.
  misc_feature (786907)..(786907): n is a or c or g or t.
  misc_feature (786944)..(786946): n is a or c or g or t.
  misc_feature (839139)..(839139): n is a or c or g or t.
  misc_feature (1128488)..(1128488): n is a or c or g or t.
  misc_feature (1128499)..(1128499): n is a or c or g or t.
  misc_feature (1128505)..(1128506): n is a or c or g or t.
  misc_feature (1128517)..(1128518): n is a or c or g or t.
  misc_feature (1128539)..(1128540): n is a or c or g or t.
  misc_feature (1561400)..(1561400): n is a or c or g or t.
  misc_feature (1561477)..(1561477): n is a or c or g or t.
  misc_feature (1561545)..(1561545): n is a or c or g or t.
  misc_feature (1767941)..(1767941): n is a or c or g or t.
VKRLVGALLGSALLLELLRLDYTKVPWGSYAYYLANWREVGIPNLVTAILADWRGYDSLGEATLLFAATTGFYLLLGGKRK

SEQ ID NO: 451 - protein, 375 aa, Thermococcus kodakaraensis KOD1
  misc_feature (414542)..(414542): n is a or c or g or t.
  misc_feature (786890)..(786890): n is a or c or g or t.
  misc_feature (786907)..(786907): n is a or c or g or t.
  misc_feature (786944)..(786946): n is a or c or g or t.
  misc_feature (839139)..(839139): n is a or c or g or t.
  misc_feature (1128488)..(1128488): n is a or c or g or t.
  misc_feature (1128499)..(1128499): n is a or c or g or t.
  misc_feature (1128505)..(1128506): n is a or c or g or t.
  misc_feature (1128517)..(1128518): n is a or c or g or t.
  misc_feature (1128539)..(1128540): n is a or c or g or t.
  misc_feature (1561400)..(1561400): n is a or c or g or t.
  misc_feature (1561477)..(1561477): n is a or c or g or t.
  misc_feature (1561545)..(1561545): n is a or c or g or t.
  misc_feature (1767941)..(1767941): n is a or c or g or t.
VYLFRRGRAKMDYTSIIAAGIAIGASAFAVYYSHDTSEKVKNRLFELKKEADSLGENFESLKKQLLEKINELERKSTTPQAPSEVDYDRISRLSERVSKLESLFKEKLKSLEKTNVQLEYELGSLKKRLDEVEREVSEVSESFLSSREEIKEELKRELLAEVEEEIERLEELIERRKEEEVEEFLDMLKTAVTMNPEKISAGLLEAKRALLSLRDIAKVYVLTGKGRDEFLALKENLLGLLKNLRKLVIVSVPDENIYSKFRDIIIEVKRLDLPMKDEKSGKELNPERSFIEIHKLVYALAGGIDEIASMINEPVPVTPVEKEFYEKLRYQFEELRKLEKQVEMLMARLGEKLPEASAEKDERREIEDLLRDLGV

SEQ ID NO: 452 - protein, 231 aa, Thermococcus kodakaraensis KOD1
  misc_feature (414542)..(414542): n is a or c or g or t.
  misc_feature (786890)..(786890): n is a or c or g or t.
  misc_feature (786907)..(786907): n is a or c or g or t.
  misc_feature (786944)..(786946): n is a or c or g or t.
  misc_feature (839139)..(839139): n is a or c or g or t.
  misc_feature (1128488)..(1128488): n is a or c or g or t.
  misc_feature (1128499)..(1128499): n is a or c or g or t.
  misc_feature (1128505)..(1128506): n is a or c or g or t.
  misc_feature (1128517)..(1128518): n is a or c or g or t.
  misc_feature (1128539)..(1128540): n is a or c or g or t.
  misc_feature (1561400)..(1561400): n is a or c or g or t.
  misc_feature (1561477)..(1561477): n is a or c or g or t.
  misc_feature (1561545)..(1561545): n is a or c or g or t.
  misc_feature (1767941)..(1767941): n is a or c or g or t.
VRDDGRGIDPEKVKRKAIEKGLISPEQAAELSDEEAINLIFLPGFSTAEKVTDVSGRGVGMDVVQDVIKALNGSISVKTEVGKGTTFILKLPISMAIIQALLIKVMDEIYAVPINNILETIEVKRSDLKSIGGREVIVLRGEIIPIVSLHELFGLPDSESEEFPAIIVDLGAQKLAIKVDELLHKKDIVIKSLGKALSSVKGFAGATILGDGSVILIIDINSLLGGIGGGL

SEQ ID NO: 453 - protein, 207 aa, Thermococcus kodakaraensis KOD1
  misc_feature (414542)..(414542): n is a or c or g or t.
  misc_feature (786890)..(786890): n is a or c or g or t.
  misc_feature (786907)..(786907): n is a or c or g or t.
  misc_feature (786944)..(786946): n is a or c or g or t.
  misc_feature (839139)..(839139): n is a or c or g or t.
  misc_feature (1128488)..(1128488): n is a or c or g or t.
  misc_feature (1128499)..(1128499): n is a or c or g or t.
  misc_feature (1128505)..(1128506): n is a or c or g or t.
  misc_feature (1128517)..(1128518): n is a or c or g or t.
  misc_feature (1128539)..(1128540): n is a or c or g or t.
  misc_feature (1561400)..(1561400): n is a or c or g or t.
  misc_feature (1561477)..(1561477): n is a or c or g or t.
  misc_feature (1561545)..(1561545): n is a or c or g or t.
  misc_feature (1767941)..(1767941): n is a or c or g or t.
MKISEWYKDIFREASNIAMSHALTSLSEMVGGPIEMEPPEVEVLSRVEFLKRLTQNGISNSFVVAFDITEGLGGLTVLQFPTKSAINLSAALMGMDPSGMKELDEMGKSAITEVGNILISVYTDILAKLVGEPVSLSPPKPINSLYDIEKELNRPDLRNVDKIMLFKTRFYEENIGFESFFYLVPDEESFEKLVKRLEAQVKEEGGE

SEQ ID NO: 454 - protein, 86 aa, Thermococcus kodakaraensis KOD1
  misc_feature (414542)..(414542): n is a or c or g or t.
  misc_feature (786890)..(786890): n is a or c or g or t.
  misc_feature (786907)..(786907): n is a or c or g or t.
  misc_feature (786944)..(786946): n is a or c or g or t.
  misc_feature (839139)..(839139): n is a or c or g or t.
  misc_feature (1128488)..(1128488): n is a or c or g or t.
  misc_feature (1128499)..(1128499): n is a or c or g or t.
  misc_feature (1128505)..(1128506): n is a or c or g or t.
  misc_feature (1128517)..(1128518): n is a or c or g or t.
  misc_feature (1128539)..(1128540): n is a or c or g or t.
  misc_feature (1561400)..(1561400): n is a or c or g or t.
  misc_feature (1561477)..(1561477): n is a or c or g or t.
  misc_feature (1561545)..(1561545): n is a or c or g or t.
  misc_feature (1767941)..(1767941): n is a or c or g or t.
VRGVMMKSPIEAVIELEFPNEEVARVVYESVRIEHDTVPYRRTKGEFVLDGRKIRLKFIAEDNSALRGTLNSYLRWIKVAMDSIEV

SEQ ID NO: 455 - protein, 327 aa, Thermococcus kodakaraensis KOD1
  misc_feature (414542)..(414542): n is a or c or g or t.
  misc_feature (786890)..(786890): n is a or c or g or t.
  misc_feature (786907)..(786907): n is a or c or g or t.
  misc_feature (786944)..(786946): n is a or c or g or t.
  misc_feature (839139)..(839139): n is a or c or g or t.
  misc_feature (1128488)..(1128488): n is a or c or g or t.
  misc_feature (1128499)..(1128499): n is a or c or g or t.
  misc_feature (1128505)..(1128506): n is a or c or g or t.
  misc_feature (1128517)..(1128518): n is a or c or g or t.
  misc_feature (1128539)..(1128540): n is a or c or g or t.
  misc_feature (1561400)..(1561400): n is a or c or g or t.
  misc_feature (1561477)..(1561477): n is a or c or g or t.
  misc_feature (1561545)..(1561545): n is a or c or g or t.
  misc_feature (1767941)..(1767941): n is a or c or g or t.
MKGKIKLRRFLETAGDKSFLLLCHHNADPDSLGSAIAFARFLKARGVERVRIGVAQSVSSYAKRLLTLSPVPVEKNPSVDEDVVVIFDTSSLEQLEPIDIPKDKFTILIDHHVEKKNPITADISVVDSTRTSTAEIVWELFKYLGFADGPSVKALLAGIVTDTANFRFANSKTFKSVSEMLEAFPVQMGEIFQLVAPVNDENIDQAKRMAVLKACQRMEIRKFRKYIIAVSKVSAYESLACKVFLQLGADIAIVGSEKNGVRISARARESLVRKGLHLGKIMEKVGPIIDGSGGGHAGAAGANGKKNLDDAIKLILKEIEKFLREVG

SEQ ID NO: 456 - protein, 111 aa, Thermococcus kodakaraensis KOD1
  misc_feature (414542)..(414542): n is a or c or g or t.
  misc_feature (786890)..(786890): n is a or c or g or t.
  misc_feature (786907)..(786907): n is a or c or g or t.
  misc_feature (786944)..(786946): n is a or c or g or t.
  misc_feature (839139)..(839139): n is a or c or g or t.
  misc_feature (1128488)..(1128488): n is a or c or g or t.
  misc_feature (1128499)..(1128499): n is a or c or g or t.
  misc_feature (1128505)..(1128506): n is a or c or g or t.
  misc_feature (1128517)..(1128518): n is a or c or g or t.
  misc_feature (1128539)..(1128540): n is a or c or g or t.
  misc_feature (1561400)..(1561400): n is a or c or g or t.
  misc_feature (1561477)..(1561477): n is a or c or g or t.
  misc_feature (1561545)..(1561545): n is a or c or g or t.
  misc_feature (1767941)..(1767941): n is a or c or g or t.
VARCPLCGKALDWAELINQMLEKGVGEDVFKDRDKFMETFNDFVFKCPHCGEEFYGRNLPASETEKVFELLNDFKGSIDWDNKRVRLRLNSLLALDSMLENWDRKMSQKRS

SEQ ID NO: 457 - protein, 403 aa, Thermococcus kodakaraensis KOD1
  misc_feature (414542)..(414542): n is a or c or g or t.
  misc_feature (786890)..(786890): n is a or c or g or t.
  misc_feature (786907)..(786907): n is a or c or g or t.
  misc_feature (786944)..(786946): n is a or c or g or t.
  misc_feature (839139)..(839139): n is a or c or g or t.
  misc_feature (1128488)..(1128488): n is a or c or g or t.
  misc_feature (1128499)..(1128499): n is a or c or g or t.
  misc_feature (1128505)..(1128506): n is a or c or g or t.
  misc_feature (1128517)..(1128518): n is a or c or g or t.
  misc_feature (1128539)..(1128540): n is a or c or g or t.
  misc_feature (1561400)..(1561400): n is a or c or g or t.
  misc_feature (1561477)..(1561477): n is a or c or g or t.
  misc_feature (1561545)..(1561545): n is a or c or g or t.
  misc_feature (1767941)..(1767941): n is a or c or g or t.
MHIFFLVVSVEAVKRYLSRKDFKSAFNSALKIEDSFERLLALLRIFDEFPREEVLSEMLQALEGIEDKREKALAYSIVGRAFYQLGRESAGERYMILAVSLAREFSSPRIRGELLAGIARNLAISDRYRDAYLLFWEAVETLQSARGLSSAVLSSLLSVARLIEKTADEINAPIALDYYRLAKEVYESLFFNLQAKELSEKIELIEEVLRRGKTVVDSLVEKGDVEKAVDLIRFLDLRERASEMLKLSYWLFLHERPDLGRRVFEDAMNLILVGKFRPSDEELFKIAKRMLRIGLVEEPLVLAGIIDDSHLASELLGEVAIAYRRMGELSKARSIAEGIPDESVKNRVLKALEGGEDVGHEQGLPLTGRGEERGAVPEDDRGSEVQGEVGQEEDNPAGEGDDS

SEQ ID NO: 458 - protein, 188 aa, Thermococcus kodakaraensis KOD1
  misc_feature (414542)..(414542): n is a or c or g or t.
  misc_feature (786890)..(786890): n is a or c or g or t.
  misc_feature (786907)..(786907): n is a or c or g or t.
  misc_feature (786944)..(786946): n is a or c or g or t.
  misc_feature (839139)..(839139): n is a or c or g or t.
  misc_feature (1128488)..(1128488): n is a or c or g or t.
  misc_feature (1128499)..(1128499): n is a or c or g or t.
  misc_feature (1128505)..(1128506): n is a or c or g or t.
  misc_feature (1128517)..(1128518): n is a or c or g or t.
  misc_feature (1128539)..(1128540): n is a or c or g or t.
  misc_feature (1561400)..(1561400): n is a or c or g or t.
  misc_feature (1561477)..(1561477): n is a or c or g or t.
  misc_feature (1561545)..(1561545): n is a or c or g or t.
  misc_feature (1767941)..(1767941): n is a or c or g or t.
MRLNYCLLMDGVINMVPPELEEGLPLEKMKDFSLEELLGMAIKAEIGARKFYESLAERIDIQELKEKIEWLAGEEKKHEELLRKIYANMFPGKEVVFPKEHIGPELQPVARKLNGVQDIIDLIRWAMKAEEIAAQFYAKLEEMVDTEEKKRLMRYLSDMEWGHYYNLKAEYELLLDWEMYGQMMHVGP

SEQ ID NO: 459 - protein, 273 aa, Thermococcus kodakaraensis KOD1
  misc_feature (414542)..(414542): n is a or c or g or t.
  misc_feature (786890)..(786890): n is a or c or g or t.
  misc_feature (786907)..(786907): n is a or c or g or t.
  misc_feature (786944)..(786946): n is a or c or g or t.
  misc_feature (839139)..(839139): n is a or c or g or t.
  misc_feature (1128488)..(1128488): n is a or c or g or t.
  misc_feature (1128499)..(1128499): n is a or c or g or t.
  misc_feature (1128505)..(1128506): n is a or c or g or t.
  misc_feature (1128517)..(1128518): n is a or c or g or t.
  misc_feature (1128539)..(1128540): n is a or c or g or t.
  misc_feature (1561400)..(1561400): n is a or c or g or t.
  misc_feature (1561477)..(1561477): n is a or c or g or t.
  misc_feature (1561545)..(1561545): n is a or c or g or t.
  misc_feature (1767941)..(1767941): n is a or c or g or t.
VSLIMLEGFIANLSSWLLSISGGSLIMVAFYAGLFVALMTTLGALLAIFANRMPGWGVDVSLSFAAGVMIVASFTSLILPAIESTGTFTPAGVGILLGVILIYLIDRFIPHEHLVKGYEGPREFKERLRVVWLIVLAVIIHNLPEGMAVGTSLVYDLERGLITAIAIGIQDFPEGTVVSLPLATLQKKRLMPIVMGALSGVAEMVMVILGAFLFTVFHSLLPYGLGMAGGAMLYVTVKEMIPEIYKREENETLVTLGFFLGFYVMLFLDSMLG

SEQ ID NO: 460 - protein, 344 aa, Thermococcus kodakaraensis KOD1
  misc_feature (414542)..(414542): n is a or c or g or t.
  misc_feature (786890)..(786890): n is a or c or g or t.
  misc_feature (786907)..(786907): n is a or c or g or t.
  misc_feature (786944)..(786946): n is a or c or g or t.
  misc_feature (839139)..(839139): n is a or c or g or t.
  misc_feature (1128488)..(1128488): n is a or c or g or t.
  misc_feature (1128499)..(1128499): n is a or c or g or t.
  misc_feature (1128505)..(1128506): n is a or c or g or t.
  misc_feature (1128517)..(1128518): n is a or c or g or t.
  misc_feature (1128539)..(1128540): n is a or c or g or t.
  misc_feature (1561400)..(1561400): n is a or c or g or t.
  misc_feature (1561477)..(1561477): n is a or c or g or t.
  misc_feature (1561545)..(1561545): n is a or c or g or t.
  misc_feature (1767941)..(1767941): n is a or c or g or t.
MNVKGYWKPLAESILAILIGAVIGAIVLWLSGYSASSAYYWLIVGSLGSLDGIAETLAKSAPIMLTAITFALGARTGLFNIGAEGSVYFGAIAAIITTQYIPNPLIGLLAGLIVGALWLLPAAILKVYRGVHEVISTIMLNWIALYLVSWLAVSVYYNPRDPNSTLSIPPSARLPLLMEGTSLSLAFIIAVFTAIIVYVIMWHMKLGYELRVSGQNPRAAEYGGISPKKATIWSFLLGGMTAGLAGAGIVMGTPPSYAITQGLANIQNYGFDGIGVALVGRNHPLGIIFSGILFGALSAGATAMQQHAHVPLEMIKVIEGIIIIAVAVPGLYDLTTRWFRRERA

SEQ ID NO: 461 - protein, 710 aa, Thermococcus kodakaraensis KOD1
  misc_feature (414542)..(414542): n is a or c or g or t.
  misc_feature (786890)..(786890): n is a or c or g or t.
  misc_feature (786907)..(786907): n is a or c or g or t.
  misc_feature (786944)..(786946): n is a or c or g or t.
  misc_feature (839139)..(839139): n is a or c or g or t.
  misc_feature (1128488)..(1128488): n is a or c or g or t.
  misc_feature (1128499)..(1128499): n is a or c or g or t.
  misc_feature (1128505)..(1128506): n is a or c or g or t.
  misc_feature (1128517)..(1128518): n is a or c or g or t.
  misc_feature (1128539)..(1128540): n is a or c or g or t.
  misc_feature (1561400)..(1561400): n is a or c or g or t.
  misc_feature (1561477)..(1561477): n is a or c or g or t.
  misc_feature (1561545)..(1561545): n is a or c or g or t.
  misc_feature (1767941)..(1767941): n is a or c or g or t.
MKKVFAAIIILAILGINATLAAPVENGTVYISENVKVQIHPNEELLGIVYYLAFGNDTFVIDRGDYIDEVEAHFGKYRNSTAVILLRDYLSRSNRFTWKDTYLARIEMLLVRCSEPPELKIPEYLEEYYSEEGVPEYYREYFNWFKNEFLPALREFANETDFMEFYRTHQDYYMEDLRLYGGALSLIPPDEFMEEHAGVSNVTYVFFHPYLVAIHGHSLTTTENNRTAWGAAGFLPLVRRDPQRTVWSYKTARDTMMGLPLNRDLINSTGLDELLYLNFIYHELGHDVTIPVLNTLDLYTYSYVIDAARDDMPYLTTYDGHYVGLTMIYEGFADAWADYAISHVNHNYTLLAMQMQKAWGEFWVEWLYNEIQSCALDVKSGELKNISLCVPRALESLEKFASPENVTKVYNLEVPVTPVRALDKGWFGNRVVVIYGTANLSPTESRNIKSFADEVAEILRKFYRRNGGIDDVVVKADVNVTPSDLSSHLVLIGTPSTNRIVDIFDDYFPIRLERAGEGWRVIRENNVTSFLLLDEESPLRAVYGNTSVAAGGFQTVDKAALLMASVNPYNTYYYVVWIAGTDENMTKLFKNPTYYLSSYEIWTPGAIEVGFYNKPLAERLSESFNATLLLSPQTTTTTTTTVRTDTTTVPETTTTSVDSSTTTTPTTSPSKSQTTSPVETSRTTATDKNMCGPAALVGLAIIPLLIRRRR

SEQ ID NO: 462 - protein, 235 aa, Thermococcus kodakaraensis KOD1
  misc_feature (414542)..(414542): n is a or c or g or t.
  misc_feature (786890)..(786890): n is a or c or g or t.
  misc_feature (786907)..(786907): n is a or c or g or t.
  misc_feature (786944)..(786946): n is a or c or g or t.
  misc_feature (839139)..(839139): n is a or c or g or t.
  misc_feature (1128488)..(1128488): n is a or c or g or t.
  misc_feature (1128499)..(1128499): n is a or c or g or t.
  misc_feature (1128505)..(1128506): n is a or c or g or t.
  misc_feature (1128517)..(1128518): n is a or c or g or t.
  misc_feature (1128539)..(1128540): n is a or c or g or t.
  misc_feature (1561400)..(1561400): n is a or c or g or t.
  misc_feature (1561477)..(1561477): n is a or c or g or t.
  misc_feature (1561545)..(1561545): n is a or c or g or t.
  misc_feature (1767941)..(1767941): n is a or c or g or t.
MLIALISDIHSNWEALQAVWKEVKHADTILCMGDLVGYGASPNEVVEFVRKQMGKRTFLCVRGNHDNAVAFGADWGFNPYAREAVRWHQWVMKSENIEFLRRLPVRQLFTDDAGRTYLLIHGSPRAPLDEYLFPWLPESEFRAVLTYIRQDDLLVGHTHIPMLKVIEGRRIINPGSVGQPRDGDWRASYAIIDTSEEPPENVEFHRVEYDVEEAARKIIEEGLPRFLANRLFEGL

SEQ ID NO: 463 - protein, 137 aa, Thermococcus kodakaraensis KOD1
  misc_feature (414542)..(414542): n is a or c or g or t.
  misc_feature (786890)..(786890): n is a or c or g or t.
  misc_feature (786907)..(786907): n is a or c or g or t.
  misc_feature (786944)..(786946): n is a or c or g or t.
  misc_feature (839139)..(839139): n is a or c or g or t.
  misc_feature (1128488)..(1128488): n is a or c or g or t.
  misc_feature (1128499)..(1128499): n is a or c or g or t.
  misc_feature (1128505)..(1128506): n is a or c or g or t.
  misc_feature (1128517)..(1128518): n is a or c or g or t.
  misc_feature (1128539)..(1128540): n is a or c or g or t.
  misc_feature (1561400)..(1561400): n is a or c or g or t.
  misc_feature (1561477)..(1561477): n is a or c or g or t.
  misc_feature (1561545)..(1561545): n is a or c or g or t.
  misc_feature (1767941)..(1767941): n is a or c or g or t.
VVSMEELRRDFREFKDLCMGILLYGSHVKGEATGQSDVDVCLVKPKPGTYEKVLERLGGKYDVKVFEELPLYIQIDVIKNHRVIYGDELELSEYFYRFRKLWNDMEHRIRENRFESVREKVRLRRRAREKAKVLGKA

SEQ ID NO: 464 - protein, 20 aa, Thermococcus kodakaraensis KOD1
  misc_feature (414542)..(414542): n is a or c or g or t.
  misc_feature (786890)..(786890): n is a or c or g or t.
  misc_feature (786907)..(786907): n is a or c or g or t.
  misc_feature (786944)..(786946): n is a or c or g or t.
  misc_feature (839139)..(839139): n is a or c or g or t.
  misc_feature (1128488)..(1128488): n is a or c or g or t.
  misc_feature (1128499)..(1128499): n is a or c or g or t.
  misc_feature (1128505)..(1128506): n is a or c or g or t.
  misc_feature (1128517)..(1128518): n is a or c or g or t.
  misc_feature (1128539)..(1128540): n is a or c or g or t.
  misc_feature (1561400)..(1561400): n is a or c or g or t.
  misc_feature (1561477)..(1561477): n is a or c or g or t.
  misc_feature (1561545)..(1561545): n is a or c or g or t.
  misc_feature (1767941)..(1767941): n is a or c or g or t.
VAPSAGGSGNYCCCNKVNTN

SEQ ID NO: 465 - protein, 333 aa, Thermococcus kodakaraensis KOD1
  misc_feature (414542)..(414542): n is a or c or g or t.
  misc_feature (786890)..(786890): n is a or c or g or t.
  misc_feature (786907)..(786907): n is a or c or g or t.
  misc_feature (786944)..(786946): n is a or c or g or t.
  misc_feature (839139)..(839139): n is a or c or g or t.
  misc_feature (1128488)..(1128488): n is a or c or g or t.
  misc_feature (1128499)..(1128499): n is a or c or g or t.
  misc_feature (1128505)..(1128506): n is a or c or g or t.
  misc_feature (1128517)..(1128518): n is a or c or g or t.
  misc_feature (1128539)..(1128540): n is a or c or g or t.
  misc_feature (1561400)..(1561400): n is a or c or g or t.
  misc_feature (1561477)..(1561477): n is a or c or g or t.
  misc_feature (1561545)..(1561545): n is a or c or g or t.
  misc_feature (1767941)..(1767941): n is a or c or g or t.
VRLSSLNNSARLKWEPSFSQYRLKSATSHLQDERMDTLYKATLGMVKSLSNIIRHGHEYIGSLERNFLKGRIQHSTMLGHAAKLLARARFAIAFTGAGISAESGIPTFRGRNGLWKTYRAEELATPEAFKRDPHLVWEFYKWRMRKILKAEPNPAHKALAELENMGVLKAVITQNVDDLHREAGSRKVVELHGNIFRVRCVSCSYRENLKESGRVFEFVREKELPKCPKCGSLLRPDVVWFGEPLPREALEEAFSLAERADVVLVVGTSGVVYPAAYVPYIVKERGGKVIEVNVERSGITPIADVFIRGKAGEVMPELLRRVKDIMAERNHYG

SEQ ID NO: 466 - protein, 707 aa, Thermococcus kodakaraensis KOD1
  misc_feature (414542)..(414542): n is a or c or g or t.
  misc_feature (786890)..(786890): n is a or c or g or t.
  misc_feature (786907)..(786907): n is a or c or g or t.
  misc_feature (786944)..(786946): n is a or c or g or t.
  misc_feature (839139)..(839139): n is a or c or g or t.
  misc_feature (1128488)..(1128488): n is a or c or g or t.
  misc_feature (1128499)..(1128499): n is a or c or g or t.
  misc_feature (1128505)..(1128506): n is a or c or g or t.
  misc_feature (1128517)..(1128518): n is a or c or g or t.
  misc_feature (1128539)..(1128540): n is a or c or g or t.
  misc_feature (1561400)..(1561400): n is a or c or g or t.
  misc_feature (1561477)..(1561477): n is a or c or g or t.
  misc_feature (1561545)..(1561545): n is a or c or g or t.
  misc_feature (1767941)..(1767941): n is a or c or g or t.
VGFHRSHCFRCSPLAWNRCVDRGPSGLSVRHREKANSSGPYTGWPSEHGDNDWACTGGVWIMPFSVCMRDCYDTCSILSEFKDGKLSVRGNPEHLITAGFLCPKGALLPKWFHSPDRLKAPLIRTGERGSGEFREASWDEAINFVANKLKETIEEYGSESVLVYQYAGDRGVVNYAFPLRLFHYLNTAMLDYGICDRAGQEALKDVYGTAIGLDPEELKKQRLIVYWGVNPFWTNLHGFMLAKRYGLETWTVDVVRTETAKRSHRFFQIRPETDVLFALGVAKLIIENELYDRDFVRENVYGFEEFKNYVKTLSLDYVVKETGLSREEIEDFAFGFSEKRGVIHMGYGFQRSLSGGEAVRAIAILPALVGHPFGFIYDMKTIDKSYAEGAFLRTKPAKRIAQVKLAEYIEKGEIKFLYIYNSNPLASLPNQRRLRKALKESDVFVVTHDIFLTDTALYSDVVLPANTFFERLDIADSYYHRYVALNEPVARLYGKSNSEVTRLLAKALGIQNPHLHESDEEVIRKILELNGLSWGELKRKGFIRVPEKPRRWKTPSGKIEFYSQRAVERGLSPFPEYRKREGKYPLKLLTPTYRMTITSQYHNTHGMIDPNLYMNPADAEKRGIKDGDDVEVFNDRGRIKTTVKLTEDLPRGVVLLYKAFWVRLLGWNANFLTTDETAEEYGNASAYHSTWVEVRKRAQNSNSSNSL

SEQ ID NO: 467 - protein, 146 aa, Thermococcus kodakaraensis KOD1
  misc_feature (414542)..(414542): n is a or c or g or t.
  misc_feature (786890)..(786890): n is a or c or g or t.
  misc_feature (786907)..(786907): n is a or c or g or t.
  misc_feature (786944)..(786946): n is a or c or g or t.
  misc_feature (839139)..(839139): n is a or c or g or t.
  misc_feature (1128488)..(1128488): n is a or c or g or t.
  misc_feature (1128499)..(1128499): n is a or c or g or t.
  misc_feature (1128505)..(1128506): n is a or c or g or t.
  misc_feature (1128517)..(1128518): n is a or c or g or t.
  misc_feature (1128539)..(1128540): n is a or c or g or t.
  misc_feature (1561400)..(1561400): n is a or c or g or t.
  misc_feature (1561477)..(1561477): n is a or c or g or t.
  misc_feature (1561545)..(1561545): n is a or c or g or t.
  misc_feature (1767941)..(1767941): n is a or c or g or t.
MKVVLDTNVVLAALIKPEGLSALLIKALDGERLINFTSEDALDELTLKIGLLAEKGKISPGWEETLAHFLRGSEIVSPSTSFNLCRDPDDNKWLEISYEAGAGYILTWDDDLLSLRNEEKAVKLGNHEVKILKPLEFYREILKSKC

SEQ ID NO: 468 - protein, 209 aa, Thermococcus kodakaraensis KOD1
  misc_feature (414542)..(414542): n is a or c or g or t.
  misc_feature (786890)..(786890): n is a or c or g or t.
  misc_feature (786907)..(786907): n is a or c or g or t.
  misc_feature (786944)..(786946): n is a or c or g or t.
  misc_feature (839139)..(839139): n is a or c or g or t.
  misc_feature (1128488)..(1128488): n is a or c or g or t.
  misc_feature (1128499)..(1128499): n is a or c or g or t.
  misc_feature (1128505)..(1128506): n is a or c or g or t.
  misc_feature (1128517)..(1128518): n is a or c or g or t.
  misc_feature (1128539)..(1128540): n is a or c or g or t.
  misc_feature (1561400)..(1561400): n is a or c or g or t.
  misc_feature (1561477)..(1561477): n is a or c or g or t.
  misc_feature (1561545)..(1561545): n is a or c or g or t.
  misc_feature (1767941)..(1767941): n is a or c or g or t.
MPKIEPFEKHRDRYENWFERNRYAYLSELEAVKKLLPKKGKGAEIGVGTGRFAAPLGIKLGVEPSKAMAEIARTRGIEVIEGTAENLPFEEDSMDYLLMVTTICFVDDPEKALKEAYRVLKPGGALIIGFVDRNSPIGRFYEEHKNESVFYKEARFFSTEELLELLKKVGFREFEIVQTLFHRLNEIKSVEPVKPGYGEGSFVVIKAVK

SEQ ID NO: 469 - protein, 511 aa, Thermococcus kodakaraensis KOD1
  misc_feature (414542)..(414542): n is a or c or g or t.
  misc_feature (786890)..(786890): n is a or c or g or t.
  misc_feature (786907)..(786907): n is a or c or g or t.
  misc_feature (786944)..(786946): n is a or c or g or t.
  misc_feature (839139)..(839139): n is a or c or g or t.
  misc_feature (1128488)..(1128488): n is a or c or g or t.
  misc_feature (1128499)..(1128499): n is a or c or g or t.
  misc_feature (1128505)..(1128506): n is a or c or g or t.
  misc_feature (1128517)..(1128518): n is a or c or g or t.
  misc_feature (1128539)..(1128540): n is a or c or g or t.
  misc_feature (1561400)..(1561400): n is a or c or g or t.
  misc_feature (1561477)..(1561477): n is a or c or g or t.
  misc_feature (1561545)..(1561545): n is a or c or g or t.
  misc_feature (1767941)..(1767941): n is a or c or g or t.
MVIYMVEPFVPEGEIFEGIFRQNEGIPEFATYVNGEWVFTGKTAEVRSPIDGSLIARVSLSDMALSNRAVAAAYSAGRHEIRDTPGEKRLEAFLKVAELIRDSFDDFVTALVLDAGKPLSNARGEVTATIERLEKTTMEFGRLIGDYIPGDWSAESLGSEGIVKREPYGVVLAISPYNYPLFISTAKIVPALLAGNAVLLKPSSQDPLAPLLLSRVLQLAGIPESAYHLLTVPGALMDSILADRRIRAVTFTGSTEVGEHILSMGGIKFYHMELGGKDPAVVLDDAPLEETVEKLVKGMVSYSGQRCDAIRLIIAEEGIYEQLKRELVAALSKIEPENPLEDEDAIMGPLINERSAEKIEEVYRDALEKGAVPLTGFKRKGAYVWPVLLEASREVLPGLRAFQEDVFGPLTILVKVSNEDEAVELANSSRFGLDAAVFSGDDSRARKVARRLEVGAVFINEFPRHGIGYYPFGGMKDSGIGREGIGYSIETLTTTKTIVRNYRGRGVWDYI

SEQ ID NO: 470 - protein, 270 aa, Thermococcus kodakaraensis KOD1
  misc_feature (414542)..(414542): n is a or c or g or t.
  misc_feature (786890)..(786890): n is a or c or g or t.
  misc_feature (786907)..(786907): n is a or c or g or t.
  misc_feature (786944)..(786946): n is a or c or g or t.
  misc_feature (839139)..(839139): n is a or c or g or t.
  misc_feature (1128488)..(1128488): n is a or c or g or t.
  misc_feature (1128499)..(1128499): n is a or c or g or t.
  misc_feature (1128505)..(1128506): n is a or c or g or t.
  misc_feature (1128517)..(1128518): n is a or c or g or t.
  misc_feature (1128539)..(1128540): n is a or c or g or t.
  misc_feature (1561400)..(1561400): n is a or c or g or t.
  misc_feature (1561477)..(1561477): n is a or c or g or t.
  misc_feature (1561545)..(1561545): n is a or c or g or t.
  misc_feature (1767941)..(1767941): n is a or c or g or t.
VGVQAMAGLNFRSLTISVAFIFTFLLFAAIATLFLLPKPSDVLEALKSEEMLYSLKLSLITASLSTVLVILMGVPIGYALSRFNFPGKSAVKSILDLPMAFPELVLGLALLLLFGRTPVGEALSDLGVRVVFTKLGIVVAQFFTALPYAVRVIYTTFEGISPRYELVARSLGYSEFETFRKVTLPMAKNGLLASTVISFARSMGAFGAVLILAGGSYMNTEILPVTLYLNISYGNIGMAITSGIVLVVVSFIAILLTERLEGGGSASVRG

SEQ ID NO: 471 - protein, 222 aa, Thermococcus kodakaraensis KOD1
  misc_feature (414542)..(414542): n is a or c or g or t.
  misc_feature (786890)..(786890): n is a or c or g or t.
  misc_feature (786907)..(786907): n is a or c or g or t.
  misc_feature (786944)..(786946): n is a or c or g or t.
  misc_feature (839139)..(839139): n is a or c or g or t.
  misc_feature (1128488)..(1128488): n is a or c or g or t.
  misc_feature (1128499)..(1128499): n is a or c or g or t.
  misc_feature (1128505)..(1128506): n is a or c or g or t.
  misc_feature (1128517)..(1128518): n is a or c or g or t.
  misc_feature (1128539)..(1128540): n is a or c or g or t.
  misc_feature (1561400)..(1561400): n is a or c or g or t.
  misc_feature (1561477)..(1561477): n is a or c or g or t.
  misc_feature (1561545)..(1561545): n is a or c or g or t.
  misc_feature (1767941)..(1767941): n is a or c or g or t.
VHMHKIIDERMEVVGMRIAVPTNGGGREDTVAPVFARAPAFYIADVDENGNIVSEKVIQNSAAMAGGGAGPMAVQTLINEGVEAIIAPQVGPNALGAIQAAGIRLYQVAPGTPVEEAIKSVVSGEAAQFTAPAPQAPVAPAAPATPVAPVPPAYGPAYPAYPAYGYGFGPGWGRGWGRGWGRGRGFGRGWGRGGRGWGARLGYCPWTGMPSRRTLRRYYGWW

SEQ ID NO: 472 - protein, 84 aa, Thermococcus kodakaraensis KOD1
  misc_feature (414542)..(414542): n is a or c or g or t.
  misc_feature (786890)..(786890): n is a or c or g or t.
  misc_feature (786907)..(786907): n is a or c or g or t.
  misc_feature (786944)..(786946): n is a or c or g or t.
  misc_feature (839139)..(839139): n is a or c or g or t.
  misc_feature (1128488)..(1128488): n is a or c or g or t.
  misc_feature (1128499)..(1128499): n is a or c or g or t.
  misc_feature (1128505)..(1128506): n is a or c or g or t.
  misc_feature (1128517)..(1128518): n is a or c or g or t.
  misc_feature (1128539)..(1128540): n is a or c or g or t.
  misc_feature (1561400)..(1561400): n is a or c or g or t.
  misc_feature (1561477)..(1561477): n is a or c or g or t.
  misc_feature (1561545)..(1561545): n is a or c or g or t.
  misc_feature (1767941)..(1767941): n is a or c or g or t.
VPKMPRGYGRGMGRGGRFGPYPPYYGGFFGRFGLYGIIDLIFLLLILYLLFKLFLVAATYVIALVVLYMLWGFISPRRGRWFWP

SEQ ID NO: 473 - protein, 159 aa, Thermococcus kodakaraensis KOD1
  misc_feature (414542)..(414542): n is a or c or g or t.
  misc_feature (786890)..(786890): n is a or c or g or t.
  misc_feature (786907)..(786907): n is a or c or g or t.
  misc_feature (786944)..(786946): n is a or c or g or t.
  misc_feature (839139)..(839139): n is a or c or g or t.
  misc_feature (1128488)..(1128488): n is a or c or g or t.
  misc_feature (1128499)..(1128499): n is a or c or g or t.
  misc_feature (1128505)..(1128506): n is a or c or g or t.
  misc_feature (1128517)..(1128518): n is a or c or g or t.
  misc_feature (1128539)..(1128540): n is a or c or g or t.
  misc_feature (1561400)..(1561400): n is a or c or g or t.
  misc_feature (1561477)..(1561477): n is a or c or g or t.
  misc_feature (1561545)..(1561545): n is a or c or g or t.
  misc_feature (1767941)..(1767941): n is a or c or g or t.
MEVKDMRIIVSTVTGGLDDRVNPAFGRTPTFTIVDVENGEIVNVQVVPNPGYSQPRGAGVTAAQFVIDQGADVVIAGQFGPNSSGVLQAAGIKMVSAPATMTVREAVEAFLRGELTTAVFGPEGGMGPGMGRGMGGMGRGMGRGRGGGMGGGRGGGWGW

SEQ ID NO: 474 - protein, 191 aa, Thermococcus kodakaraensis KOD1
  misc_feature (414542)..(414542): n is a or c or g or t.
  misc_feature (786890)..(786890): n is a or c or g or t.
  misc_feature (786907)..(786907): n is a or c or g or t.
  misc_feature (786944)..(786946): n is a or c or g or t.
  misc_feature (839139)..(839139): n is a or c or g or t.
  misc_feature (1128488)..(1128488): n is a or c or g or t.
  misc_feature (1128499)..(1128499): n is a or c or g or t.
  misc_feature (1128505)..(1128506): n is a or c or g or t.
  misc_feature (1128517)..(1128518): n is a or c or g or t.
  misc_feature (1128539)..(1128540): n is a or c or g or t.
  misc_feature (1561400)..(1561400): n is a or c or g or t.
  misc_feature (1561477)..(1561477): n is a or c or g or t.
  misc_feature (1561545)..(1561545): n is a or c or g or t.
  misc_feature (1767941)..(1767941): n is a or c or g or t.
VMGMKRSQLWAGLIAPLVAYSGILTAIYVNRSWWRLTDNAISDLGKLGLPHNWLLNVPLVITAVLAIYYALGVLDMARNSVEKAGIWVLIAGFVFLALIGIFPEGTSPHYYVSWGFFLTAGFGLLIAGIGMGLSGDRKMLYFTVVLFVLAWILAIWAMRTFKGVAIPEFIGALAVTIWHYAVLSKIWGKTR

SEQ ID NO: 475 - protein, 172 aa, Thermococcus kodakaraensis KOD1
  misc_feature (414542)..(414542): n is a or c or g or t.
  misc_feature (786890)..(786890): n is a or c or g or t.
  misc_feature (786907)..(786907): n is a or c or g or t.
  misc_feature (786944)..(786946): n is a or c or g or t.
  misc_feature (839139)..(839139): n is a or c or g or t.
  misc_feature (1128488)..(1128488): n is a or c or g or t.
  misc_feature (1128499)..(1128499): n is a or c or g or t.
  misc_feature (1128505)..(1128506): n is a or c or g or t.
  misc_feature (1128517)..(1128518): n is a or c or g or t.
  misc_feature (1128539)..(1128540): n is a or c or g or t.
  misc_feature (1561400)..(1561400): n is a or c or g or t.
  misc_feature (1561477)..(1561477): n is a or c or g or t.
  misc_feature (1561545)..(1561545): n is a or c or g or t.
  misc_feature (1767941)..(1767941): n is a or c or g or t.
VAKMNAREVAYAGIFIALIAVSAQISVNIGPVPLTFQVFAVLLTGLLLGPRLGFLSVLSYDIAGAIGLPVFAGFTGGIAHLYGPTGGYLLAFPIAAFMAGLSKGKGGKAKLVASLVAIALIYVLGWLRLGLYFGGNFGKAFELGVAPFVIPDLIKALIAVEISEVVERRLEL

SEQ ID NO: 476 - protein, 814 aa, Thermococcus kodakaraensis KOD1
  misc_feature (414542)..(414542): n is a or c or g or t.
  misc_feature (786890)..(786890): n is a or c or g or t.
  misc_feature (786907)..(786907): n is a or c or g or t.
  misc_feature (786944)..(786946): n is a or c or g or t.
  misc_feature (839139)..(839139): n is a or c or g or t.
  misc_feature (1128488)..(1128488): n is a or c or g or t.
  misc_feature (1128499)..(1128499): n is a or c or g or t.
  misc_feature (1128505)..(1128506): n is a or c or g or t.
  misc_feature (1128517)..(1128518): n is a or c or g or t.
  misc_feature (1128539)..(1128540): n is a or c or g or t.
  misc_feature (1561400)..(1561400): n is a or c or g or t.
  misc_feature (1561477)..(1561477): n is a or c or g or t.
  misc_feature (1561545)..(1561545): n is a or c or g or t.
  misc_feature (1767941)..(1767941): n is a or c or g or t.
VAAVTVKVRFDKEVREYAKGEKVKDSVLKITETALAQALEKFHRRMIVIEGDTLKKAELAGILAGASARVLSDIVGELIEKRLRDESEDKIEVLYATDALGEETFGRKRYEAFRKHFDVLAGSEVNVTAVTFKHTREILGRTYDLLILDMSYDYSPNDLGRIIETVRGGGLIFILAHPFEKWKDMWTGFHKSLVTPPYTIEDVKKRFNRRLIRKFTQHDGIYIITESGKAKKKPKKSKSQAKIRARKGVEIPEETLFPKELYEMALTRGQVEVLKAFEELVDKEGMLVLTADRGRGKSVSVGIAAIGLAVALKKRTRIVVTAPELENVQSLFRFAKRALEKLGFKPYVVEEKGLIKELYARKIGLRYYPPAEGYKKNADLYILDEAAGIHVPILHKYLNKPRVVYSSTIHGYEGAGRGFSVKFLKKAREKRSFKELHMEEPIRYAYGDPIEKWLFDVLLLDAEPVELTEEDYELIKRKEVYLEEPDLDDWFENDREDLRHFVGIYILAHYRNRPSDVALLADAPHHEARVLRLKNGKIVTAVQIAKEGGIPKNVIDKMAKGYKPRGNIIPDMMVKHHYLKEFARLKGYRIVRIATHPDAMDMGLGSKALELLEKEAREKGLDWIGSGFGASEELVRFWVRNGFAVVHLSPARNPVSGEFTAIVLKPISKKAKELIKKANDEFRIRFTEWLGDTHRELEPEIARWLFETPFGEAVDYPIHLTEIQKKRLDAFTGKVLTYDTVVDAVKPIVKLYFLDGWMKPYLDERQIKLLIYRVLQAHSWEETAKLIDRTEMFTMIEVRDIIRGLWYYYKRLLT

SEQ ID NO: 477 - protein, 168 aa, Thermococcus kodakaraensis KOD1
  misc_feature (414542)..(414542): n is a or c or g or t.
  misc_feature (786890)..(786890): n is a or c or g or t.
  misc_feature (786907)..(786907): n is a or c or g or t.
  misc_feature (786944)..(786946): n is a or c or g or t.
  misc_feature (839139)..(839139): n is a or c or g or t.
  misc_feature (1128488)..(1128488): n is a or c or g or t.
  misc_feature (1128499)..(1128499): n is a or c or g or t.
  misc_feature (1128505)..(1128506): n is a or c or g or t.
  misc_feature (1128517)..(1128518): n is a or c or g or t.
  misc_feature (1128539)..(1128540): n is a or c or g or t.
  misc_feature (1561400)..(1561400): n is a or c or g or t.
  misc_feature (1561477)..(1561477): n is a or c or g or t.
  misc_feature (1561545)..(1561545): n is a or c or g or t.
  misc_feature (1767941)..(1767941): n is a or c or g or t.
VSAMPSGWEKIVSMTKSGMRIIGQMKRKVSRGKRIALLIDGPNILRKELGVKLEDIAEALSEIGDIRVAKVILNQYAPQGLIEAVSNQGFEPIIVSGETGVKLAVEAMKEIYNPHIDVIALATRNAEFLPVILKAKEKGKETVVIGVEPGFSVALKHAADYTIILGGE

SEQ ID NO: 478 - protein, 122 aa, Thermococcus kodakaraensis KOD1
  misc_feature (414542)..(414542): n is a or c or g or t.
  misc_feature (786890)..(786890): n is a or c or g or t.
  misc_feature (786907)..(786907): n is a or c or g or t.
  misc_feature (786944)..(786946): n is a or c or g or t.
  misc_feature (839139)..(839139): n is a or c or g or t.
  misc_feature (1128488)..(1128488): n is a or c or g or t.
  misc_feature (1128499)..(1128499): n is a or c or g or t.
  misc_feature (1128505)..(1128506): n is a or c or g or t.
  misc_feature (1128517)..(1128518): n is a or c or g or t.
  misc_feature (1128539)..(1128540): n is a or c or g or t.
  misc_feature (1561400)..(1561400): n is a or c or g or t.
  misc_feature (1561477)..(1561477): n is a or c or g or t.
  misc_feature (1561545)..(1561545): n is a or c or g or t.
  misc_feature (1767941)..(1767941): n is a or c or g or t.
MEMEAEEYLLLLGLALAVLALIYPGQTLSGEFCEGSHEKLGDYYVSVSGGFLRVSAVSGDVFIAHGQNVILRRAPIEYSYLPDSRCYTVKIRYKGGTSLYAFAGGIALAGGAFFYMAFLKYR

SEQ ID NO: 479 - protein, 292 aa, Thermococcus kodakaraensis KOD1
  misc_feature (414542)..(414542): n is a or c or g or t.
  misc_feature (786890)..(786890): n is a or c or g or t.
  misc_feature (786907)..(786907): n is a or c or g or t.
  misc_feature (786944)..(786946): n is a or c or g or t.
  misc_feature (839139)..(839139): n is a or c or g or t.
  misc_feature (1128488)..(1128488): n is a or c or g or t.
  misc_feature (1128499)..(1128499): n is a or c or g or t.
  misc_feature (1128505)..(1128506): n is a or c or g or t.
  misc_feature (1128517)..(1128518): n is a or c or g or t.
  misc_feature (1128539)..(1128540): n is a or c or g or t.
  misc_feature (1561400)..(1561400): n is a or c or g or t.
  misc_feature (1561477)..(1561477): n is a or c or g or t.
  misc_feature (1561545)..(1561545): n is a or c or g or t.
  misc_feature (1767941)..(1767941): n is a or c or g or t.
MNIYEMLALIAFGYVLKRLFKSEKPFDYIRILTNDILLAFFVFGNVASKDLGYLLSIKTVFIYVFLVIGISLGSSYLYGRFVLKNDPWAGALMVLSVYPNTAALGFPIASLFLDDITPAILYSTTNSLIVIPIVTFIAAHYSSGGASLRRSIEKALKFPPTVANLLALALVIAGIRLPGWIIEPIKTIGWWSIPLLIIYFGSRITLSRFELRKFLEVGAFRIAIPFIFVFLTLRNASPEVFYSVLVEASMPPAIAANAILAQYQLKAEEAISVTFVLTLIVIGLFMALKALL

SEQ ID NO: 480 - protein, 337 aa, Thermococcus kodakaraensis KOD1
  misc_feature (414542)..(414542): n is a or c or g or t.
  misc_feature (786890)..(786890): n is a or c or g or t.
  misc_feature (786907)..(786907): n is a or c or g or t.
  misc_feature (786944)..(786946): n is a or c or g or t.
  misc_feature (839139)..(839139): n is a or c or g or t.
  misc_feature (1128488)..(1128488): n is a or c or g or t.
  misc_feature (1128499)..(1128499): n is a or c or g or t.
  misc_feature (1128505)..(1128506): n is a or c or g or t.
  misc_feature (1128517)..(1128518): n is a or c or g or t.
  misc_feature (1128539)..(1128540): n is a or c or g or t.
  misc_feature (1561400)..(1561400): n is a or c or g or t.
  misc_feature (1561477)..(1561477): n is a or c or g or t.
  misc_feature (1561545)..(1561545): n is a or c or g or t.
  misc_feature (1767941)..(1767941): n is a or c or g or t.
MERVVEILKEILEIPSPTGYTREVMEHIEKKLTEAGIKTYYTNKGALIAGNHPEPELVIAAHVDTLGAMVKGILPDGHLSFTRIGGLLLPAFEGEYCTIITRSGKRYRGTLLLKNPSVHVNKEAGKKERTEENMYIRLDAEVEKKEDTEKLGIRPGDFIAFDPKFEYVNGFVKAHFLDDKASVAVLIDLMLDLSQTLEKLPVAFFFSPYEEVGHGGSAGYPKSTKELLVVDMGVVGEGVAGKETAVSIAAKDSSGPYDYEMTTKLIELAEKRGIPYTVDVFPYYGSDGSAALRAGWDFRVALIGQGVHASHGMERTHVKGMLATKELIRAYIEEKFL

SEQ ID NO: 481 - protein, 24 aa, Thermococcus kodakaraensis KOD1
  misc_feature (414542)..(414542): n is a or c or g or t.
  misc_feature (786890)..(786890): n is a or c or g or t.
  misc_feature (786907)..(786907): n is a or c or g or t.
  misc_feature (786944)..(786946): n is a or c or g or t.
  misc_feature (839139)..(839139): n is a or c or g or t.
  misc_feature (1128488)..(1128488): n is a or c or g or t.
  misc_feature (1128499)..(1128499): n is a or c or g or t.
  misc_feature (1128505)..(1128506): n is a or c or g or t.
  misc_feature (1128517)..(1128518): n is a or c or g or t.
  misc_feature (1128539)..(1128540): n is a or c or g or t.
  misc_feature (1561400)..(1561400): n is a or c or g or t.
  misc_feature (1561477)..(1561477): n is a or c or g or t.
  misc_feature (1561545)..(1561545): n is a or c or g or t.
  misc_feature (1767941)..(1767941): n is a or c or g or t.
VAKRNGGSMIPEEFIKYAFEERVA

SEQ ID NO: 482 - protein, 104 aa, Thermococcus kodakaraensis KOD1
  misc_feature (414542)..(414542): n is a or c or g or t.
  misc_feature (786890)..(786890): n is a or c or g or t.
  misc_feature (786907)..(786907): n is a or c or g or t.
  misc_feature (786944)..(786946): n is a or c or g or t.
  misc_feature (839139)..(839139): n is a or c or g or t.
  misc_feature (1128488)..(1128488): n is a or c or g or t.
  misc_feature (1128499)..(1128499): n is a or c or g or t.
  misc_feature (1128505)..(1128506): n is a or c or g or t.
  misc_feature (1128517)..(1128518): n is a or c or g or t.
  misc_feature (1128539)..(1128540): n is a or c or g or t.
  misc_feature (1561400)..(1561400): n is a or c or g or t.
  misc_feature (1561477)..(1561477): n is a or c or g or t.
  misc_feature (1561545)..(1561545): n is a or c or g or t.
  misc_feature (1767941)..(1767941): n is a or c or g or t.
VREKIDFTKLVSLELAKKHTWTNITGGSSEATVLFFTPPSTSYEVRCEVEVHEDDEVWEYTNAVHDVFHRPKKPRDWSKTPAYLFKIKEIYDNGEKAMGVRIYP

SEQ ID NO: 483 - protein, 382 aa, Thermococcus kodakaraensis KOD1
  misc_feature (414542)..(414542): n is a or c or g or t.
  misc_feature (786890)..(786890): n is a or c or g or t.
  misc_feature (786907)..(786907): n is a or c or g or t.
  misc_feature (786944)..(786946): n is a or c or g or t.
  misc_feature (839139)..(839139): n is a or c or g or t.
  misc_feature (1128488)..(1128488): n is a or c or g or t.
  misc_feature (1128499)..(1128499): n is a or c or g or t.
  misc_feature (1128505)..(1128506): n is a or c or g or t.
  misc_feature (1128517)..(1128518): n is a or c or g or t.
  misc_feature (1128539)..(1128540): n is a or c or g or t.
  misc_feature (1561400)..(1561400): n is a or c or g or t.
  misc_feature (1561477)..(1561477): n is a or c or g or t.
  misc_feature (1561545)..(1561545): n is a or c or g or t.
  misc_feature (1767941)..(1767941): n is a or c or g or t.
VRRLPNHRGTALPPKPLNIPGVTFRWKSKRKVMGMVDYELLKKIVEAPGVSGFEFLGVRDVVIEAFKPYVDEIKVDKLGNVIAHKKGNGPKVMLAAHMDQIGLMVNHIEKNGFLRVVPVGGVDPRTLIAQRFKVWIDKDKFIYGVGGSVPPHIQKPEERSKAPTWDQVFIDIGAESKEEAEEMGVRVGTIITWDGRLERLGKHRLVSIAFDDRIAVYTLVKAAQELGETDADIYFVATVQEEVGLRGARVSAFGIDPDYGFAIDVTIAADVPGTPEHKQVTQLGKGTAIKIMDRSVICHPTIVRWMEELAKKYEIPYQWDILLGGGTDAGAIHLNKSGVPTGAISVPARYIHSNAEVVDERDVDAGVKLMVKVLEHIGELEL

SEQ ID NO: 484 - protein, 273 aa, Thermococcus kodakaraensis KOD1
  misc_feature (414542)..(414542): n is a or c or g or t.
  misc_feature (786890)..(786890): n is a or c or g or t.
  misc_feature (786907)..(786907): n is a or c or g or t.
  misc_feature (786944)..(786946): n is a or c or g or t.
  misc_feature (839139)..(839139): n is a or c or g or t.
  misc_feature (1128488)..(1128488): n is a or c or g or t.
  misc_feature (1128499)..(1128499): n is a or c or g or t.
  misc_feature (1128505)..(1128506): n is a or c or g or t.
  misc_feature (1128517)..(1128518): n is a or c or g or t.
  misc_feature (1128539)..(1128540): n is a or c or g or t.
  misc_feature (1561400)..(1561400): n is a or c or g or t.
  misc_feature (1561477)..(1561477): n is a or c or g or t.
  misc_feature (1561545)..(1561545): n is a or c or g or t.
  misc_feature (1767941)..(1767941): n is a or c or g or t.
MIPEFLIRALLASIMVSVLLGLLSPIINTKGLAFLTHALFHALLFGAVLGMILALLLNNYGLVILTALVVTTLLVILIAQLEKIGFTSDSAVGIVSSFVAGLTVLGFGVLYKVMATRPYFPLTQNIVSYLTGDIFLVTLDDLTVLIVGGAVVFFVLLLLYRDFLYISFDMEGVESYGGNARAYLTILYVLVGVIGALIVQTVGLITLQVVAILPGAIALMVSSDFRKVLGISLLLTLTVQLTSVVLAYFTAIPPSGIATIMLGIVYGALLFRR

SEQ ID NO: 485 - protein, 605 aa, Thermococcus kodakaraensis KOD1
  misc_feature (414542)..(414542): n is a or c or g or t.
  misc_feature (786890)..(786890): n is a or c or g or t.
  misc_feature (786907)..(786907): n is a or c or g or t.
  misc_feature (786944)..(786946): n is a or c or g or t.
  misc_feature (839139)..(839139): n is a or c or g or t.
  misc_feature (1128488)..(1128488): n is a or c or g or t.
  misc_feature (1128499)..(1128499): n is a or c or g or t.
  misc_feature (1128505)..(1128506): n is a or c or g or t.
  misc_feature (1128517)..(1128518): n is a or c or g or t.
  misc_feature (1128539)..(1128540): n is a or c or g or t.
  misc_feature (1561400)..(1561400): n is a or c or g or t.
  misc_feature (1561477)..(1561477): n is a or c or g or t.
  misc_feature (1561545)..(1561545): n is a or c or g or t.
  misc_feature (1767941)..(1767941): n is a or c or g or t.
VVAMCGIIGYIGDRKACEVIVKGLKRLEYRGYDSAGVVTGNGETLDVRKGAGRIDKLTEKLGFLEMEGNRGIGHTRWATHGVPNDINAHPQKDCTGKIVLVHNGIIENFAELKEELLKKGHVFRSDTDTEVIAHLIEEELKGSENFEEALRKALNKLRGSFALAIVYADEPDKLYVVRNESPLVLGIGEGEMFAASDVPAFLEYTNKVIFLDDGEYAILTKDSYVVKRIDTGEVVEKPVHEISWTLEMAEKAGYPHFMLKEIYEQPRAIKDAIHGNREIIRSVAEEIANYDKIIFVAMGTSYHAALVGKSLFQRLAKKVPIVEEASEFRYEFEDLIDDKTLVIAITQSGETADTLAAMKLAKKNGAKVLAVVNVVGSMATRIADLTLYTHAGPEIGVAATKTYTTQLTVLTMLAIELAKVLGTASEDYLEKLEDELMKVPELVELALKHDEALRELAETLKDKRDFFYIGRGISVPTALEGALKLKEISYIHAEGLSAGELKHGPLALLEDGVPVVAINPSGKVFDKMVSNIEEAKARGAMIISLSDREELSRVSDVLVKMPEVDELLSPIVYVVPLQLLAYHLAVLRGNDPDKPRNLAKSVTVE

SEQ ID NO: 486 - protein, 93 aa, Thermococcus kodakaraensis KOD1
  misc_feature (414542)..(414542): n is a or c or g or t.
  misc_feature (786890)..(786890): n is a or c or g or t.
  misc_feature (786907)..(786907): n is a or c or g or t.
  misc_feature (786944)..(786946): n is a or c or g or t.
  misc_feature (839139)..(839139): n is a or c or g or t.
  misc_feature (1128488)..(1128488): n is a or c or g or t.
  misc_feature (1128499)..(1128499): n is a or c or g or t.
  misc_feature (1128505)..(1128506): n is a or c or g or t.
  misc_feature (1128517)..(1128518): n is a or c or g or t.
  misc_feature (1128539)..(1128540): n is a or c or g or t.
  misc_feature (1561400)..(1561400): n is a or c or g or t.
  misc_feature (1561477)..(1561477): n is a or c or g or t.
  misc_feature (1561545)..(1561545): n is a or c or g or t.
  misc_feature (1767941)..(1767941): n is a or c or g or t.
VRFLFELSDVPHIVFGMAREGVYELGEKFFERLKEEHGIDSRSSTEKDALTLLNELEKMEAFYTGLGFLEDLEEVMDIRKAAMELLEKLKNGK

SEQ ID NO: 487 - protein, 61 aa, Thermococcus kodakaraensis KOD1
  misc_feature (414542)..(414542): n is a or c or g or t.
  misc_feature (786890)..(786890): n is a or c or g or t.
  misc_feature (786907)..(786907): n is a or c or g or t.
  misc_feature (786944)..(786946): n is a or c or g or t.
  misc_feature (839139)..(839139): n is a or c or g or t.
  misc_feature (1128488)..(1128488): n is a or c or g or t.
  misc_feature (1128499)..(1128499): n is a or c or g or t.
  misc_feature (1128505)..(1128506): n is a or c or g or t.
  misc_feature (1128517)..(1128518): n is a or c or g or t.
  misc_feature (1128539)..(1128540): n is a or c or g or t.
  misc_feature (1561400)..(1561400): n is a or c or g or t.
  misc_feature (1561477)..(1561477): n is a or c or g or t.
  misc_feature (1561545)..(1561545): n is a or c or g or t.
  misc_feature (1767941)..(1767941): n is a or c or g or t.
MAVKMGIKFFDENILKDGFPEGFTVLVAGEPGAGKTILGSTFLYNGMEQFGENESRCTTSA

SEQ ID NO: 488 - protein, 174 aa, Thermococcus kodakaraensis KOD1
  misc_feature (414542)..(414542): n is a or c or g or t.
  misc_feature (786890)..(786890): n is a or c or g or t.
  misc_feature (786907)..(786907): n is a or c or g or t.
  misc_feature (786944)..(786946): n is a or c or g or t.
  misc_feature (839139)..(839139): n is a or c or g or t.
  misc_feature (1128488)..(1128488): n is a or c or g or t.
  misc_feature (1128499)..(1128499): n is a or c or g or t.
  misc_feature (1128505)..(1128506): n is a or c or g or t.
  misc_feature (1128517)..(1128518): n is a or c or g or t.
  misc_feature (1128539)..(1128540): n is a or c or g or t.
  misc_feature (1561400)..(1561400): n is a or c or g or t.
  misc_feature (1561477)..(1561477): n is a or c or g or t.
  misc_feature (1561545)..(1561545): n is a or c or g or t.
  misc_feature (1767941)..(1767941): n is a or c or g or t.
MPKVGIIMGSDSDLPVMKAAAEVLEEFGVDYEITIVSAHRTPERMFEYAKTAEERGIEVIIAGAGGAAHLPGMTASITTLPVIGVPVKTSTLNGLDSLLSIVQMPRGVPVATVAINNAKNAALLALSILGVKYPEIREKLKEYRRRMREEVEEKAERLEEMGYEEYLQVTGQGK

SEQ ID NO: 489 - protein, 181 aa, Thermococcus kodakaraensis KOD1
  misc_feature (414542)..(414542): n is a or c or g or t.
  misc_feature (786890)..(786890): n is a or c or g or t.
  misc_feature (786907)..(786907): n is a or c or g or t.
  misc_feature (786944)..(786946): n is a or c or g or t.
  misc_feature (839139)..(839139): n is a or c or g or t.
  misc_feature (1128488)..(1128488): n is a or c or g or t.
  misc_feature (1128499)..(1128499): n is a or c or g or t.
  misc_feature (1128505)..(1128506): n is a or c or g or t.
  misc_feature (1128517)..(1128518): n is a or c or g or t.
  misc_feature (1128539)..(1128540): n is a or c or g or t.
  misc_feature (1561400)..(1561400): n is a or c or g or t.
  misc_feature (1561477)..(1561477): n is a or c or g or t.
  misc_feature (1561545)..(1561545): n is a or c or g or t.
  misc_feature (1767941)..(1767941): n is a or c or g or t.
MSVEEAIAKRRSIREYKDEPLSREELGQLLWACQGITHEEMRAAPSAGATYPFEIFVVVGRVDGLKPGIYHYDPFEHSLTLVKEGDFRRELQEAALNQEWVGKAAMDIVLVAFYERTTKYYGERGIRYVHMEAGHIGQNIYLQATALGLGTVAVGAFDDERVAEILGTKGAPLYIFPVGRA

SEQ ID NO: 490 - protein, 157 aa, Thermococcus kodakaraensis KOD1
  misc_feature (414542)..(414542): n is a or c or g or t.
  misc_feature (786890)..(786890): n is a or c or g or t.
  misc_feature (786907)..(786907): n is a or c or g or t.
  misc_feature (786944)..(786946): n is a or c or g or t.
  misc_feature (839139)..(839139): n is a or c or g or t.
  misc_feature (1128488)..(1128488): n is a or c or g or t.
  misc_feature (1128499)..(1128499): n is a or c or g or t.
  misc_feature (1128505)..(1128506): n is a or c or g or t.
  misc_feature (1128517)..(1128518): n is a or c or g or t.
  misc_feature (1128539)..(1128540): n is a or c or g or t.
  misc_feature (1561400)..(1561400): n is a or c or g or t.
  misc_feature (1561477)..(1561477): n is a or c or g or t.
  misc_feature (1561545)..(1561545): n is a or c or g or t.
  misc_feature (1767941)..(1767941): n is a or c or g or t.
VEKMEEKLILFVCVKNSARSQMAEAFFNHFNDDPRFRAMSAGTEPAEEIDPLARKAMEEIGISLEGQYPKLYTEEMADKAYIVITMGCLDKCPYAPPEKTWDWGLDDPYGQPIEKYREVRDEIKRRVLKLIDDLKAGKSREEIIGKKSAFSISISAK

SEQ ID NO: 491 - protein, 70 aa, Thermococcus kodakaraensis KOD1
  misc_feature (414542)..(414542): n is a or c or g or t.
  misc_feature (786890)..(786890): n is a or c or g or t.
  misc_feature (786907)..(786907): n is a or c or g or t.
  misc_feature (786944)..(786946): n is a or c or g or t.
  misc_feature (839139)..(839139): n is a or c or g or t.
  misc_feature (1128488)..(1128488): n is a or c or g or t.
  misc_feature (1128499)..(1128499): n is a or c or g or t.
  misc_feature (1128505)..(1128506): n is a or c or g or t.
  misc_feature (1128517)..(1128518): n is a or c or g or t.
  misc_feature (1128539)..(1128540): n is a or c or g or t.
  misc_feature (1561400)..(1561400): n is a or c or g or t.
  misc_feature (1561477)..(1561477): n is a or c or g or t.
  misc_feature (1561545)..(1561545): n is a or c or g or t.
  misc_feature (1767941)..(1767941): n is a or c or g or t.
MEDMESQVERLFLYAQNLLLKLRLKELQKDHVTLEDIERIVQEELTVDEDVEDITEIIRQMRERDYEFEY

SEQ ID NO: 492 - protein, 54 aa, Thermococcus kodakaraensis KOD1
  misc_feature (414542)..(414542): n is a or c or g or t.
  misc_feature (786890)..(786890): n is a or c or g or t.
  misc_feature (786907)..(786907): n is a or c or g or t.
  misc_feature (786944)..(786946): n is a or c or g or t.
  misc_feature (839139)..(839139): n is a or c or g or t.
  misc_feature (1128488)..(1128488): n is a or c or g or t.
  misc_feature (1128499)..(1128499): n is a or c or g or t.
  misc_feature (1128505)..(1128506): n is a or c or g or t.
  misc_feature (1128517)..(1128518): n is a or c or g or t.
  misc_feature (1128539)..(1128540): n is a or c or g or t.
  misc_feature (1561400)..(1561400): n is a or c or g or t.
  misc_feature (1561477)..(1561477): n is a or c or g or t.
  misc_feature (1561545)..(1561545): n is a or c or g or t.
  misc_feature (1767941)..(1767941): n is a or c or g or t.
VSGVGVITISVDDEVEKKFRELVEKKYGKIRGALGVAVTEAIKLWIKKVESEEK

SEQ ID NO: 493 - protein, 270 aa, Thermococcus kodakaraensis KOD1
  misc_feature (414542)..(414542): n is a or c or g or t.
  misc_feature (786890)..(786890): n is a or c or g or t.
  misc_feature (786907)..(786907): n is a or c or g or t.
  misc_feature (786944)..(786946): n is a or c or g or t.
  misc_feature (839139)..(839139): n is a or c or g or t.
  misc_feature (1128488)..(1128488): n is a or c or g or t.
  misc_feature (1128499)..(1128499): n is a or c or g or t.
  misc_feature (1128505)..(1128506): n is a or c or g or t.
  misc_feature (1128517)..(1128518): n is a or c or g or t.
  misc_feature (1128539)..(1128540): n is a or c or g or t.
  misc_feature (1561400)..(1561400): n is a or c or g or t.
  misc_feature (1561477)..(1561477): n is a or c or g or t.
  misc_feature (1561545)..(1561545): n is a or c or g or t.
  misc_feature (1767941)..(1767941): n is a or c or g or t.
VFPRTRMKMLFTSTTVDFLSRANLNLLGVGMTRIYHAVRFKGGTAYVLFDGCNWNCSFCVWRKVTRWSLCLPLETRRKLDYMWRTGRVRYLSVNEVVDLLKKARVTTAFLGGGEPTLDPELKALMRALRREGIKPWLVTNGENLDDEMVELAEGATFSIKALDDELHRRITGAPNGKAIKNFRRYAGTGKLVAETVFVPGLVECGEIERIARFIASISPEMRLRIDPLVQGVDIEKVDECIERVREILPKADRIRVKGSVEPPEVLYPEV

SEQ ID NO: 494 - protein, 429 aa, Thermococcus kodakaraensis KOD1
  misc_feature (414542)..(414542): n is a or c or g or t.
  misc_feature (786890)..(786890): n is a or c or g or t.
  misc_feature (786907)..(786907): n is a or c or g or t.
  misc_feature (786944)..(786946): n is a or c or g or t.
  misc_feature (839139)..(839139): n is a or c or g or t.
  misc_feature (1128488)..(1128488): n is a or c or g or t.
  misc_feature (1128499)..(1128499): n is a or c or g or t.
  misc_feature (1128505)..(1128506): n is a or c or g or t.
  misc_feature (1128517)..(1128518): n is a or c or g or t.
  misc_feature (1128539)..(1128540): n is a or c or g or t.
  misc_feature (1561400)..(1561400): n is a or c or g or t.
  misc_feature (1561477)..(1561477): n is a or c or g or t.
  misc_feature (1561545)..(1561545): n is a or c or g or t.
  misc_feature (1767941)..(1767941): n is a or c or g or t.
VMKMEPMELIALAIFIGVYGLIMSERIHRTVAAMVGASLVLLIKIVPWEKVPEYLDLDTILLLAGMMVVVNVARESGLFEYIAIKTAKLSKGSPMKVLLLFSVVTAVVSAFLDNVTTVLLLTPMLLYITKKMGVNPIPFLLSEVFASNIGGTATLIGDPPNIMIGSAANLSFNEFILNMGPIALVDLFATIGIIYLAYRAEMNSHKENEEAIKMTIMSLDERDAIRDPSLFRKSITVLIGVVIGFFFHDKLGVEPAVIALTGASILLLWSRASPEHALEKVEWATLFFFGGLFIIVGSLVETGLITQVANWMVSHIHSEGEAVLIISWFSAFSSAIVDNIPFTATMIPLIKAMGNHMNPYPLWWALSLGACLGGNGTAIGASANVVVIGIAHREGVRITFNDFLKVGMTIMVTTVAIGTAIIWLRYVGL

SEQ ID NO: 495 - protein, 424 aa, Thermococcus kodakaraensis KOD1
  misc_feature (414542)..(414542): n is a or c or g or t.
  misc_feature (786890)..(786890): n is a or c or g or t.
  misc_feature (786907)..(786907): n is a or c or g or t.
  misc_feature (786944)..(786946): n is a or c or g or t.
  misc_feature (839139)..(839139): n is a or c or g or t.
  misc_feature (1128488)..(1128488): n is a or c or g or t.
  misc_feature (1128499)..(1128499): n is a or c or g or t.
  misc_feature (1128505)..(1128506): n is a or c or g or t.
  misc_feature (1128517)..(1128518): n is a or c or g or t.
  misc_feature (1128539)..(1128540): n is a or c or g or t.
  misc_feature (1561400)..(1561400): n is a or c or g or t.
  misc_feature (1561477)..(1561477): n is a or c or g or t.
  misc_feature (1561545)..(1561545): n is a or c or g or t.
  misc_feature (1767941)..(1767941): n is a or c or g or t.
VIFMIVDADLHIHSRYSKAVSKAMTIPNLAENARFKGLEMVGTGDILNPNWEKELLKYTKKVDEGTYERNGIRFLLTTEVEDTRRVHHVLIFPNIETVREMRERLKPYSSDIESEGRPHLTLSAAEIADIANELDVLIGPAHAFTPWTSLYKEYDSLKEAYNGAKIHFLELGLSADSEMADMIKAHHKLTYLSNSDAHSPMPHRLGREFNRFEVNEATFEEIRKAILKRGRKIVLNAGLDPRLGKYHLTACSRCYTKYSLEEAKAFRWKCPKCGGRIKKGVRDRILELADTTERPKDRPPYLHLAPLAEIIAMVLGKGVETKAVRLVWERFLREFGSEIRVLVDVPVEELAKVHEEVAKAVWAYRKGKLIVISGGGGKYGEIKLPDEVRNARIEDLETIEVEVPNVEEKPKQRSITEFLRKSNK

SEQ ID NO: 496 - protein, 309 aa, Thermococcus kodakaraensis KOD1
  misc_feature (414542)..(414542): n is a or c or g or t.
  misc_feature (786890)..(786890): n is a or c or g or t.
  misc_feature (786907)..(786907): n is a or c or g or t.
  misc_feature (786944)..(786946): n is a or c or g or t.
  misc_feature (839139)..(839139): n is a or c or g or t.
  misc_feature (1128488)..(1128488): n is a or c or g or t.
  misc_feature (1128499)..(1128499): n is a or c or g or t.
  misc_feature (1128505)..(1128506): n is a or c or g or t.
  misc_feature (1128517)..(1128518): n is a or c or g or t.
  misc_feature (1128539)..(1128540): n is a or c or g or t.
  misc_feature (1561400)..(1561400): n is a or c or g or t.
  misc_feature (1561477)..(1561477): n is a or c or g or t.
  misc_feature (1561545)..(1561545): n is a or c or g or t.
  misc_feature (1767941)..(1767941): n is a or c or g or t.
MRESEIIELFLKHLKRHGELPLGDDAGALKIGDEWLVATNDMLVRKTDVPDIMTPEQVGFKAVTMNVSDVAAMGAEPIGFLFSLGLPEGLDEDYIEGIARGIGEALDYYKIPVLSADTNEADDLIIDGIALGKTKRLLTRSGAKPGDLVCVTGDIGRAFAGYLVWKYGLEVSESTRKALYEKFLEPIARVKEGIILSKSANSAIDISDGLSKELHLISKMSGVGIEISSGKLPIRGEVYEVAEVIGKSPVELALASGEEFELLFTVPPEKISELEVDFTVIGQVREGNGVYMGRKPLFPLGWEHFSRLD

SEQ ID NO: 497 - protein, 387 aa, Thermococcus kodakaraensis KOD1
  misc_feature (414542)..(414542): n is a or c or g or t.
  misc_feature (786890)..(786890): n is a or c or g or t.
  misc_feature (786907)..(786907): n is a or c or g or t.
  misc_feature (786944)..(786946): n is a or c or g or t.
  misc_feature (839139)..(839139): n is a or c or g or t.
  misc_feature (1128488)..(1128488): n is a or c or g or t.
  misc_feature (1128499)..(1128499): n is a or c or g or t.
  misc_feature (1128505)..(1128506): n is a or c or g or t.
  misc_feature (1128517)..(1128518): n is a or c or g or t.
  misc_feature (1128539)..(1128540): n is a or c or g or t.
  misc_feature (1561400)..(1561400): n is a or c or g or t.
  misc_feature (1561477)..(1561477): n is a or c or g or t.
  misc_feature (1561545)..(1561545): n is a or c or g or t.
  misc_feature (1767941)..(1767941): n is a or c or g or t.
METLKIALVSDWYYPKLGGVAVHMHDLALYLRERGHEVDIITNNRKTGKEDELRELGIGLVKVPGKIFPSASLNVSAFAKGYGLLEPLVRGYEVVHGHHAFTPLSLKAAMAARKLGKGSVVTTHSINYENSFTIRTMSRASYPYYRYHLTYPHRIIAVSKASREFIKRFTRVPVRIVPNGINIERFDIPVSKEEAKELLNLDGKVVLYVGRLEPRKGVGTLISAMKDVDGTLLVAGSGSMLPVLRNKAKLLGISNRVKFLGTVSYSILPLYYRASDVFVLPSLSEAFGIVLLEAMASGTPVVGTKVGGIPEIVDGCGMLVPPGNARALSSAINEILNNQNLERKLGKLGKRRVERVYDWSVVVKSVERVYRESLEEAEKDGSSYPHV

SEQ ID NO: 498 - protein, 303 aa, Thermococcus kodakaraensis KOD1
  misc_feature (414542)..(414542): n is a or c or g or t.
  misc_feature (786890)..(786890): n is a or c or g or t.
  misc_feature (786907)..(786907): n is a or c or g or t.
  misc_feature (786944)..(786946): n is a or c or g or t.
  misc_feature (839139)..(839139): n is a or c or g or t.
  misc_feature (1128488)..(1128488): n is a or c or g or t.
  misc_feature (1128499)..(1128499): n is a or c or g or t.
  misc_feature (1128505)..(1128506): n is a or c or g or t.
  misc_feature (1128517)..(1128518): n is a or c or g or t.
  misc_feature (1128539)..(1128540): n is a or c or g or t.
  misc_feature (1561400)..(1561400): n is a or c or g or t.
  misc_feature (1561477)..(1561477): n is a or c or g or t.
  misc_feature (1561545)..(1561545): n is a or c or g or t.
  misc_feature (1767941)..(1767941): n is a or c or g or t.
VRVLRRTHPNRWHIHKKEISWYVVVKMRPIEVIFYIEGLSNDKKALESAMGQTVESLKAEKGVEIKDIYVDEIVEDPDNDLLPYSGMIEARIRGPFEVLVDLAIRYAPAAVDLVSTNGIEIPAEQLTKILGGVSYLMGQLMEKFGPLAAYPKLDELPEPKVGYSREEIESMIIDERMLLYRFVVEVYGEDEKRVEADIKKALMYEGCRINKFAMQQQGENEKTGRKRFLVATELISGIETAFQLTGKYAPVAISVVEPEIVDLNPSEIQGVLSDLAGFAHELVIRPLKAMAIEKANTSFKLTR

SEQ ID NO: 499 - protein, 97 aa, Thermococcus kodakaraensis KOD1
  misc_feature (414542)..(414542): n is a or c or g or t.
  misc_feature (786890)..(786890): n is a or c or g or t.
  misc_feature (786907)..(786907): n is a or c or g or t.
  misc_feature (786944)..(786946): n is a or c or g or t.
  misc_feature (839139)..(839139): n is a or c or g or t.
  misc_feature (1128488)..(1128488): n is a or c or g or t.
  misc_feature (1128499)..(1128499): n is a or c or g or t.
  misc_feature (1128505)..(1128506): n is a or c or g or t.
  misc_feature (1128517)..(1128518): n is a or c or g or t.
  misc_feature (1128539)..(1128540): n is a or c or g or t.
  misc_feature (1561400)..(1561400): n is a or c or g or t.
  misc_feature (1561477)..(1561477): n is a or c or g or t.
  misc_feature (1561545)..(1561545): n is a or c or g or t.
  misc_feature (1767941)..(1767941): n is a or c or g or t.
MPTRRERIISLLEERDYSPSELARALDLHGKGSVKIILEDLKAIQKILKRDGKVLLIKPAECRNCGFVFKPEIKVPSRCPRCKSEWIEEPRFKIESK

SEQ ID NO: 500 - protein, 450 aa, Thermococcus kodakaraensis KOD1
  misc_feature (414542)..(414542): n is a or c or g or t.
  misc_feature (786890)..(786890): n is a or c or g or t.
  misc_feature (786907)..(786907): n is a or c or g or t.
  misc_feature (786944)..(786946): n is a or c or g or t.
  misc_feature (839139)..(839139): n is a or c or g or t.
  misc_feature (1128488)..(1128488): n is a or c or g or t.
  misc_feature (1128499)..(1128499): n is a or c or g or t.
  misc_feature (1128505)..(1128506): n is a or c or g or t.
  misc_feature (1128517)..(1128518): n is a or c or g or t.
  misc_feature (1128539)..(1128540): n is a or c or g or t.
  misc_feature (1561400)..(1561400): n is a or c or g or t.
  misc_feature (1561477)..(1561477): n is a or c or g or t.
  misc_feature (1561545)..(1561545): n is a or c or g or t.
  misc_feature (1767941)..(1767941): n is a or c or g or t.
VFDKLWQGMGMKRKVDEFMERHGLGVGDLVRVVKREGDERITFEGLVMPPYELSPGETLTIKLDNGYNIGILIDAIEGIEILEKAKEAPKMEFREVLPRKEGLPSVTILGTGGTIASRIDYKTGAVHAAFTAEELAKAVPEIFDIANITPKLLFNIMSEDMKPEYWKKIAHEAAKALNSDEDGVVIAHGTDTMGYTAAALSFMLRNLTKPVVLVGSQRSSDRPSSDAAMNLICATRMAVSDAAEVMVVMHGETSDTYCLAHRGTKVRKMHTSRRDTFRSINDVPIAKVWPDGKIEYLRDDYRKRGEGEVEVDDKFEEKVAILKIYPGVTSELLEFLVDRGYKGIVIEGTGLGHTPNDMIPAIERAVENGVAVCMTSQCLYGRVNLNVYSTGRRLLKAGVIPCEDMLPETAYVKLGWVLGHTDDLKEVRRMMLTNYAGEITPYTRFDTFLR

SEQ ID NO: 501 - protein, 149 aa, Thermococcus kodakaraensis KOD1
  misc_feature (414542)..(414542): n is a or c or g or t.
  misc_feature (786890)..(786890): n is a or c or g or t.
  misc_feature (786907)..(786907): n is a or c or g or t.
  misc_feature (786944)..(786946): n is a or c or g or t.
  misc_feature (839139)..(839139): n is a or c or g or t.
  misc_feature (1128488)..(1128488): n is a or c or g or t.
  misc_feature (1128499)..(1128499): n is a or c or g or t.
  misc_feature (1128505)..(1128506): n is a or c or g or t.
  misc_feature (1128517)..(1128518): n is a or c or g or t.
  misc_feature (1128539)..(1128540): n is a or c or g or t.
  misc_feature (1561400)..(1561400): n is a or c or g or t.
  misc_feature (1561477)..(1561477): n is a or c or g or t.
  misc_feature (1561545)..(1561545): n is a or c or g or t.
  misc_feature (1767941)..(1767941): n is a or c or g or t.
VVIDSNIWVEVLSGNSDVIELLDRVSEDFTLCITPTIYSEVSFVILGHYFTSKTGKKGVYALKKELKKNPELYEIVEKFDELLYELSEAGLLEFLGENEEVIRRSRKLRREYRLLPNDAMILAVCDVYGISKIVTLDDDFLRTHLEVLR

SEQ ID NO: 502 - protein, 168 aa, Thermococcus kodakaraensis KOD1
  misc_feature (414542)..(414542): n is a or c or g or t.
  misc_feature (786890)..(786890): n is a or c or g or t.
  misc_feature (786907)..(786907): n is a or c or g or t.
  misc_feature (786944)..(786946): n is a or c or g or t.
  misc_feature (839139)..(839139): n is a or c or g or t.
  misc_feature (1128488)..(1128488): n is a or c or g or t.
  misc_feature (1128499)..(1128499): n is a or c or g or t.
  misc_feature (1128505)..(1128506): n is a or c or g or t.
  misc_feature (1128517)..(1128518): n is a or c or g or t.
  misc_feature (1128539)..(1128540): n is a or c or g or t.
  misc_feature (1561400)..(1561400): n is a or c or g or t.
  misc_feature (1561477)..(1561477): n is a or c or g or t.
  misc_feature (1561545)..(1561545): n is a or c or g or t.
  misc_feature (1767941)..(1767941): n is a or c or g or t.
VKMKARFIVFYCITDDQPRGLDIKGYLKLFEPDTQTLTDALLQVAQTSEVITVLKANSGDYSVVYVVPGKTDGLPCREAYEFLVQREKGLGKVAEDIVGGDSRKSVLGGALVLVGIAVLFYVGYYYHALSEINNLLLFIGVFLSVFGGILKGYQKKRVRASAPRHRSE

SEQ ID NO: 503 - protein, 353 aa, Thermococcus kodakaraensis KOD1
  misc_feature (414542)..(414542): n is a or c or g or t.
  misc_feature (786890)..(786890): n is a or c or g or t.
  misc_feature (786907)..(786907): n is a or c or g or t.
  misc_feature (786944)..(786946): n is a or c or g or t.
  misc_feature (839139)..(839139): n is a or c or g or t.
  misc_feature (1128488)..(1128488): n is a or c or g or t.
  misc_feature (1128499)..(1128499): n is a or c or g or t.
  misc_feature (1128505)..(1128506): n is a or c or g or t.
  misc_feature (1128517)..(1128518): n is a or c or g or t.
  misc_feature (1128539)..(1128540): n is a or c or g or t.
  misc_feature (1561400)..(1561400): n is a or c or g or t.
  misc_feature (1561477)..(1561477): n is a or c or g or t.
  misc_feature (1561545)..(1561545): n is a or c or g or t.
  misc_feature (1767941)..(1767941): n is a or c or g or t.
MITMAEKMQAIMKTKPAYGAELVEVDVPKPGPGEVLIKVLATSICGTDLHIYEWNEWAQSRIKPPQIMGHEVAGEVVEVGPGVEDLQVGDYISVETHIVCGKCYACKHNRYHVCQNTKIFGVDMDGVFAHYAIVPAKNAWKNPKDMPPEYAALQEPLGNAVDTVLAGPIAGRSTLITGAGPLGLLGIAVAKASGAYPVIVSEPSEFRRKLAKKVGADYVVNPFEEDPVKFVMDITDGAGVEVFLEFSGAPKALEQGLKAVTPGGRVSLLGLFPREVTIDFNNLIIFKALEVHGITGRHLWETWYTVSSLIQSGKLNLDPIITHKYKGFDKFEEAFELMRAGKTGKVVFFPHKG

SEQ ID NO: 504 - protein, 82 aa, Thermococcus kodakaraensis KOD1
  misc_feature (414542)..(414542): n is a or c or g or t.
  misc_feature (786890)..(786890): n is a or c or g or t.
  misc_feature (786907)..(786907): n is a or c or g or t.
  misc_feature (786944)..(786946): n is a or c or g or t.
  misc_feature (839139)..(839139): n is a or c or g or t.
  misc_feature (1128488)..(1128488): n is a or c or g or t.
  misc_feature (1128499)..(1128499): n is a or c or g or t.
  misc_feature (1128505)..(1128506): n is a or c or g or t.
  misc_feature (1128517)..(1128518): n is a or c or g or t.
  misc_feature (1128539)..(1128540): n is a or c or g or t.
  misc_feature (1561400)..(1561400): n is a or c or g or t.
  misc_feature (1561477)..(1561477): n is a or c or g or t.
  misc_feature (1561545)..(1561545): n is a or c or g or t.
  misc_feature (1767941)..(1767941): n is a or c or g or t.
MEIVIPDDIITAMKLPRGEVERELRVDLAVILYQRGILPLGKAAKLAGMTKREFLEELAKRKVPRHYTEKELEEDLAFARGE

SEQ ID NO: 505 - protein, 78 aa, Thermococcus kodakaraensis KOD1
  misc_feature (414542)..(414542): n is a or c or g or t.
  misc_feature (786890)..(786890): n is a or c or g or t.
  misc_feature (786907)..(786907): n is a or c or g or t.
  misc_feature (786944)..(786946): n is a or c or g or t.
  misc_feature (839139)..(839139): n is a or c or g or t.
  misc_feature (1128488)..(1128488): n is a or c or g or t.
  misc_feature (1128499)..(1128499): n is a or c or g or t.
  misc_feature (1128505)..(1128506): n is a or c or g or t.
  misc_feature (1128517)..(1128518): n is a or c or g or t.
  misc_feature (1128539)..(1128540): n is a or c or g or t.
  misc_feature (1561400)..(1561400): n is a or c or g or t.
  misc_feature (1561477)..(1561477): n is a or c or g or t.
  misc_feature (1561545)..(1561545): n is a or c or g or t.
  misc_feature (1767941)..(1767941): n is a or c or g or t.
MSEEIIVKYDPNVDILYIQLSPKKPVDADMKGDVVMDLDENGEVVGIEIWRARELVLPEFLKFIERVKEEGKAVESQG

SEQ ID NO: 506 - protein, 577 aa, Thermococcus kodakaraensis KOD1
  misc_feature (414542)..(414542): n is a or c or g or t.
  misc_feature (786890)..(786890): n is a or c or g or t.
  misc_feature (786907)..(786907): n is a or c or g or t.
  misc_feature (786944)..(786946): n is a or c or g or t.
  misc_feature (839139)..(839139): n is a or c or g or t.
  misc_feature (1128488)..(1128488): n is a or c or g or t.
  misc_feature (1128499)..(1128499): n is a or c or g or t.
  misc_feature (1128505)..(1128506): n is a or c or g or t.
  misc_feature (1128517)..(1128518): n is a or c or g or t.
  misc_feature (1128539)..(1128540): n is a or c or g or t.
  misc_feature (1561400)..(1561400): n is a or c or g or t.
  misc_feature (1561477)..(1561477): n is a or c or g or t.
  misc_feature (1561545)..(1561545): n is a or c or g or t.
  misc_feature (1767941)..(1767941): n is a or c or g or t.
VMLMPKFDVSKRDLERLVGKTFSVEEWEDLFLYAKCELDDVWEENGEIYFKADSKDTNRPDLWSAEGIARQIRFALGFQKGLPKYEIEKSDVVVYVDEKLKDIRPYGVYAIVEGLNIDEEALRQMINLQEKVALTFGRRRREVAIGIFDFDKVKPPIYYRAAEKTEKFVPLGYDEEMTLEEILEKHEKGREYGHLIKDKPYYPLLVDSEGKVLSMPPVINSETTGRVTTETKNVFVDITGWDLNKVMLALNVVVTALAERGGKIKSVKVVYPDFEIETPDLTPKEFEVELDYIRKLAGLELSDGEIKELLERMMYEVELENRRAKLRYPAFRDDIMHARDVLEDVLIAYGYNEIEPEEPKLAVQGRGDKFIEFEDAVRELMVGFGLQEVMTFNLTNREAQYDRMNLPCGEHQEECRDYFNHPPAELVEIENPISPKWSALRNWLIPSLLDFLSQNTHEEYPQKLFEVGKATLIDESRETKTVSESKLAVALAHPRVTFTEAKEILEGVMRHLGFEYELEEAEHPSFIPGRVGKIIVNGETIGVIGEIHPAVLENWGIEMPVAAFELFLAPLYTEPYL

SEQ ID NO: 507 - protein, 282 aa, Thermococcus kodakaraensis KOD1
  misc_feature (414542)..(414542): n is a or c or g or t.
  misc_feature (786890)..(786890): n is a or c or g or t.
  misc_feature (786907)..(786907): n is a or c or g or t.
  misc_feature (786944)..(786946): n is a or c or g or t.
  misc_feature (839139)..(839139): n is a or c or g or t.
  misc_feature (1128488)..(1128488): n is a or c or g or t.
  misc_feature (1128499)..(1128499): n is a or c or g or t.
  misc_feature (1128505)..(1128506): n is a or c or g or t.
  misc_feature (1128517)..(1128518): n is a or c or g or t.
  misc_feature (1128539)..(1128540): n is a or c or g or t.
  misc_feature (1561400)..(1561400): n is a or c or g or t.
  misc_feature (1561477)..(1561477): n is a or c or g or t.
  misc_feature (1561545)..(1561545): n is a or c or g or t.
  misc_feature (1767941)..(1767941): n is a or c or g or t.
VSRKTILYRSRKVDAMKLALRVAYDGSAFYGFQRQPGVRTVEGEIIKVLQKLGIIESPEKNDFKGASRTDRGVSAFFNVVSFVPSERPDLARPEVLNHHLSDVWVLGIAEVPDDFHPRFWAKFKTYRYYLVNEGFDLSAMRECASLFVGRHDFSAFAKLEPGRDPIREVERVEVIERQGYLVIEVQGKSFLWEMVRRIVNALRFCGLGLLEAEEVERMLSGEYGKKIPPAPPEGLVLWHIEYPGIGFEGDEKGIKKARRDIFERYSRALTRAALFGDFLLEY

SEQ ID NO: 508 - protein, 79 aa, Thermococcus kodakaraensis KOD1
  misc_feature (414542)..(414542): n is a or c or g or t.
  misc_feature (786890)..(786890): n is a or c or g or t.
  misc_feature (786907)..(786907): n is a or c or g or t.
  misc_feature (786944)..(786946): n is a or c or g or t.
  misc_feature (839139)..(839139): n is a or c or g or t.
  misc_feature (1128488)..(1128488): n is a or c or g or t.
  misc_feature (1128499)..(1128499): n is a or c or g or t.
  misc_feature (1128505)..(1128506): n is a or c or g or t.
  misc_feature (1128517)..(1128518): n is a or c or g or t.
  misc_feature (1128539)..(1128540): n is a or c or g or t.
  misc_feature (1561400)..(1561400): n is a or c or g or t.
  misc_feature (1561477)..(1561477): n is a or c or g or t.
  misc_feature (1561545)..(1561545): n is a or c or g or t.
  misc_feature (1767941)..(1767941): n is a or c or g or t.
MCRIGGETMSEKQYLLDKTLERWKGQRVAVGIGSEISFSGILEDFDEEVILLKNVTDYAGNKARELIVKIDDMNWITLL

SEQ ID NO: 509 - protein, 232 aa, Thermococcus kodakaraensis KOD1
  misc_feature (414542)..(414542): n is a or c or g or t.
  misc_feature (786890)..(786890): n is a or c or g or t.
  misc_feature (786907)..(786907): n is a or c or g or t.
  misc_feature (786944)..(786946): n is a or c or g or t.
  misc_feature (839139)..(839139): n is a or c or g or t.
  misc_feature (1128488)..(1128488): n is a or c or g or t.
  misc_feature (1128499)..(1128499): n is a or c or g or t.
  misc_feature (1128505)..(1128506): n is a or c or g or t.
  misc_feature (1128517)..(1128518): n is a or c or g or t.
  misc_feature (1128539)..(1128540): n is a or c or g or t.
  misc_feature (1561400)..(1561400): n is a or c or g or t.
  misc_feature (1561477)..(1561477): n is a or c or g or t.
  misc_feature (1561545)..(1561545): n is a or c or g or t.
  misc_feature (1767941)..(1767941): n is a or c or g or t.
MRGYRYGHPLRLGCEGSHHRSASEIVVIALPTFSLQLKTFPVVKMLVLASASPRRREILSRFIREFQIIPSSASEECSIADPREHALELARRKAREVYERLGKKATVIGADTVVSIGGKILGKPGNEEEAFRMLKTLSGRMHLVTTGYCIIHRGEEHCGAVVTEVKFRELDEDLIWAYIRTGEPMDKAGAYGIQGKGGLFVEWIRGDYYNVVGFPIEIIWKLKELGFDVLSR

SEQ ID NO: 510 - protein, 272 aa, Thermococcus kodakaraensis KOD1
  misc_feature (414542)..(414542): n is a or c or g or t.
  misc_feature (786890)..(786890): n is a or c or g or t.
  misc_feature (786907)..(786907): n is a or c or g or t.
  misc_feature (786944)..(786946): n is a or c or g or t.
  misc_feature (839139)..(839139): n is a or c or g or t.
  misc_feature (1128488)..(1128488): n is a or c or g or t.
  misc_feature (1128499)..(1128499): n is a or c or g or t.
  misc_feature (1128505)..(1128506): n is a or c or g or t.
  misc_feature (1128517)..(1128518): n is a or c or g or t.
  misc_feature (1128539)..(1128540): n is a or c or g or t.
  misc_feature (1561400)..(1561400): n is a or c or g or t.
  misc_feature (1561477)..(1561477): n is a or c or g or t.
  misc_feature (1561545)..(1561545): n is a or c or g or t.
  misc_feature (1767941)..(1767941): n is a or c or g or t.
MLAEVIEETRKFAEKKGLFEKRVLMLFSGGKDSSLALYILKEAGLDVSALTFFHRWSWRETLNWAMRFTKKLSVEHYLVDITEGLLREAVGRKGPVCINCKKVMLWNAKWFALNSGFDVLAKGDNANDKIIGALLDQCEGDIRLCEIPRMGIPFFRPLIKYPAEIVEELAEEAGIRPYRMYEHARRRQWREGCPLQYIDKEEIVTPQLMDLAYKVNYEVSKVARRKRVRVSVRVPSFEIMCWDCDEETLEEVKSIIRRFGGKANAPAGKAEK

SEQ ID NO: 511 - protein, 101 aa, Thermococcus kodakaraensis KOD1
  misc_feature (414542)..(414542): n is a or c or g or t.
  misc_feature (786890)..(786890): n is a or c or g or t.
  misc_feature (786907)..(786907): n is a or c or g or t.
  misc_feature (786944)..(786946): n is a or c or g or t.
  misc_feature (839139)..(839139): n is a or c or g or t.
  misc_feature (1128488)..(1128488): n is a or c or g or t.
  misc_feature (1128499)..(1128499): n is a or c or g or t.
  misc_feature (1128505)..(1128506): n is a or c or g or t.
  misc_feature (1128517)..(1128518): n is a or c or g or t.
  misc_feature (1128539)..(1128540): n is a or c or g or t.
  misc_feature (1561400)..(1561400): n is a or c or g or t.
  misc_feature (1561477)..(1561477): n is a or c or g or t.
  misc_feature (1561545)..(1561545): n is a or c or g or t.
  misc_feature (1767941)..(1767941): n is a or c or g or t.
MNGTTPWPEAEGVVVVRKAVVLSYVGSHEHRDPNRVILKPLDVNDRGSAARLIGRKVVWRTPTGRKLVGKIVRTHGTRGEVKAVFKPGLPGQALGDYVEIL

SEQ ID NO: 512 - protein, 376 aa, Thermococcus kodakaraensis KOD1
  misc_feature (414542)..(414542): n is a or c or g or t.
  misc_feature (786890)..(786890): n is a or c or g or t.
  misc_feature (786907)..(786907): n is a or c or g or t.
  misc_feature (786944)..(786946): n is a or c or g or t.
  misc_feature (839139)..(839139): n is a or c or g or t.
  misc_feature (1128488)..(1128488): n is a or c or g or t.
  misc_feature (1128499)..(1128499): n is a or c or g or t.
  misc_feature (1128505)..(1128506): n is a or c or g or t.
  misc_feature (1128517)..(1128518): n is a or c or g or t.
  misc_feature (1128539)..(1128540): n is a or c or g or t.
  misc_feature (1561400)..(1561400): n is a or c or g or t.
  misc_feature (1561477)..(1561477): n is a or c or g or t.
  misc_feature (1561545)..(1561545): n is a or c or g or t.
  misc_feature (1767941)..(1767941): n is a or c or g or t.
MELVAVKEGLARILVPKAERIYDAPVFYNPVMSLNRDISVLAVKVLGPKRVLDALSATGIRGIRYALETPAEEVWLNDISEEAYGLMKKNASLNIDGELYEEGDRSYLWGEKLVVINKGDANRLMAENFRYFDFLDLDPFGSPVEFLDTALRSVRRNGVLAVTATDTGVLCGAYRNACLRKYLAEPIRGPLCHEAGLRILIGTVVRYAAKYDLGVEVLLAYHRDHYFRAFLKLKSGAKKADKSLSQLGFLWADKSGRFEYRRGFLPDKPGASGPLWLGPLKDESFVEELLESARDHPLAHKKTLSFLQLISEELDVPFHYDTHTLARACSLTPPKLDVIIQRLRELGHSATKTHFSPTSVKTDAPFGVVAEVMKNV

SEQ ID NO: 513 - protein, 765 aa, Thermococcus kodakaraensis KOD1
  misc_feature (414542)..(414542): n is a or c or g or t.
  misc_feature (786890)..(786890): n is a or c or g or t.
  misc_feature (786907)..(786907): n is a or c or g or t.
  misc_feature (786944)..(786946): n is a or c or g or t.
  misc_feature (839139)..(839139): n is a or c or g or t.
  misc_feature (1128488)..(1128488): n is a or c or g or t.
  misc_feature (1128499)..(1128499): n is a or c or g or t.
  misc_feature (1128505)..(1128506): n is a or c or g or t.
  misc_feature (1128517)..(1128518): n is a or c or g or t.
  misc_feature (1128539)..(1128540): n is a or c or g or t.
  misc_feature (1561400)..(1561400): n is a or c or g or t.
  misc_feature (1561477)..(1561477): n is a or c or g or t.
  misc_feature (1561545)..(1561545): n is a or c or g or t.
  misc_feature (1767941)..(1767941): n is a or c or g or t.
MKKGGLLLILLILVSIASGCISESNENQTATASTVPPTSVTPSQSSTPTTSTSTYGPSERTELKLPSVNYTPIYVGIEKGCPSGRVPVKFTYNPGNKTVKSVSLRGSFNNWGEWPMELKNGTWETTVCLRPGRYEYKYFINGQWVKDMSDDGTGRPYDPDADAYAPDGYGGKNAVRVVEGREAFYVEFDPRDPAYLSIADKRTVVRFEAKRDTVESAVLVTDHGNYTMKLQVWWDFGETWRAEMPVEPADYYILVTSSDGGKFAVLNTSESPFFHFDGVEGFPQLEWVSNGITYQIFPDRFNNGNKSNDALALDHDELILNQVNPGQPILSNWSDPITPLHCCHQYFGGDIKGITEKLDYLQSLGVTIIYINPIFLSGSAHGYDTYDYYRLDPKFGTEDELREFLDEAHRRGMRVIFDFVPNHCGIGNPAFLDVWEKGNESPYWDWFFVKKWPFKLGDGSAYVGWWGFGSLPKLNTANQEVREYLIGAALHWIEFGFDGIRVDVPNEVLDPGTFFPELRKAVKEKKPDAYLVGEIWTLSPEWVKGDRFDSLMNYALGRDILLNYAKGLLSGESAMKMMGRYYASYGENVVAMGFNLVDSHDTSRVLTDLGGGKLGDTPSNESIQRLKLLSTLLYALPGTPVTFQGDERGLLGDKGHYDEQRYPIQWDTVNEDVLNHYRALAELRKRVPALRSSAMRFYTAKGGVMAFFRGHHDEVLVVANSWKKPALLELPEGEWKVIWPEDFSPELLRGTVEVPAIGIIILERG

SEQ ID NO: 514 - protein, 571 aa, Thermococcus kodakaraensis KOD1
  misc_feature (414542)..(414542): n is a or c or g or t.
  misc_feature (786890)..(786890): n is a or c or g or t.
  misc_feature (786907)..(786907): n is a or c or g or t.
  misc_feature (786944)..(786946): n is a or c or g or t.
  misc_feature (839139)..(839139): n is a or c or g or t.
  misc_feature (1128488)..(1128488): n is a or c or g or t.
  misc_feature (1128499)..(1128499): n is a or c or g or t.
  misc_feature (1128505)..(1128506): n is a or c or g or t.
  misc_feature (1128517)..(1128518): n is a or c or g or t.
  misc_feature (1128539)..(1128540): n is a or c or g or t.
  misc_feature (1561400)..(1561400): n is a or c or g or t.
  misc_feature (1561477)..(1561477): n is a or c or g or t.
  misc_feature (1561545)..(1561545): n is a or c or g or t.
  misc_feature (1767941)..(1767941): n is a or c or g or t.
VMGEKPDKYEILQDLMRRRGFAWGSFEIYGGSRGFYDYGPLGATIKRKIERKIREAFQREGFFELETPDITPEKVFIASGHVEKFVDPLVECKKCGARFRADHLVEEALGIDTEGMSAEHLTQLIREHDIRCPECGGELSDVWYFNLMFETRIGPYGDQKGYLRPETAQGIFVNFRRLNAFARNKLPFGVFQIGKAYRNEISPRQGMLRLREFTQAEAEIFFNPNETEHPHFDEVKDEKLRLYPIEHQLKNLSMIELTAEEAVKKGYIMNTFFAYYMVMVKRVLLDIGIPEDKIRFRQQLPEERAHYSRDTWDAEIHSERFGWVECVGIANRGDYDLSRHMRESGADLTVLIHYDEPKIVKKLEVSLNMKRVGPKLKKDAKRINELIKGWGEEKKRELVELLEKEGKVTIEGYELEKDDFIIREVEEKITGEKIVPHVLEPSFGIDRPFYLLLENSLVIEEDRTYLRIKKDMAPIEVAVLPLVAKEPLKSIAYDIFRTLQKEGFIAVYDEKDTVGRRYMRYDEIGTPYCVTVDNQTPEDGTVTIRDRDTREQIRVKIEELPKKLRELIFES

SEQ ID NO: 515 - protein, 68 aa, Thermococcus kodakaraensis KOD1
  misc_feature (414542)..(414542): n is a or c or g or t.
  misc_feature (786890)..(786890): n is a or c or g or t.
  misc_feature (786907)..(786907): n is a or c or g or t.
  misc_feature (786944)..(786946): n is a or c or g or t.
  misc_feature (839139)..(839139): n is a or c or g or t.
  misc_feature (1128488)..(1128488): n is a or c or g or t.
  misc_feature (1128499)..(1128499): n is a or c or g or t.
  misc_feature (1128505)..(1128506): n is a or c or g or t.
  misc_feature (1128517)..(1128518): n is a or c or g or t.
  misc_feature (1128539)..(1128540): n is a or c or g or t.
  misc_feature (1561400)..(1561400): n is a or c or g or t.
  misc_feature (1561477)..(1561477): n is a or c or g or t.
  misc_feature (1561545)..(1561545): n is a or c or g or t.
  misc_feature (1767941)..(1767941): n is a or c or g or t.
VVGLGLLVIVVLLTYFLITHPLAEAERLFAEGKSKEAKGKLTIPLIISFITGNILGFILILVGLLTCG

SEQ ID NO: 516 - protein, 94 aa, Thermococcus kodakaraensis KOD1
  misc_feature (414542)..(414542): n is a or c or g or t.
  misc_feature (786890)..(786890): n is a or c or g or t.
  misc_feature (786907)..(786907): n is a or c or g or t.
  misc_feature (786944)..(786946): n is a or c or g or t.
  misc_feature (839139)..(839139): n is a or c or g or t.
  misc_feature (1128488)..(1128488): n is a or c or g or t.
  misc_feature (1128499)..(1128499): n is a or c or g or t.
  misc_feature (1128505)..(1128506): n is a or c or g or t.
  misc_feature (1128517)..(1128518): n is a or c or g or t.
  misc_feature (1128539)..(1128540): n is a or c or g or t.
  misc_feature (1561400)..(1561400): n is a or c or g or t.
  misc_feature (1561477)..(1561477): n is a or c or g or t.
  misc_feature (1561545)..(1561545): n is a or c or g or t.
  misc_feature (1767941)..(1767941): n is a or c or g or t.
MRKIRDIVSKLTLPLRFLWEFHRGFELYYIQGIKWEEEELENIFALILFGDYVGLPHPPTVLTYRLFPYVIRELYVMEQKSKKEVSMKSGWIGV

SEQ ID NO: 517 - protein, 334 aa, Thermococcus kodakaraensis KOD1
  misc_feature (414542)..(414542): n is a or c or g or t.
  misc_feature (786890)..(786890): n is a or c or g or t.
  misc_feature (786907)..(786907): n is a or c or g or t.
  misc_feature (786944)..(786946): n is a or c or g or t.
  misc_feature (839139)..(839139): n is a or c or g or t.
  misc_feature (1128488)..(1128488): n is a or c or g or t.
  misc_feature (1128499)..(1128499): n is a or c or g or t.
  misc_feature (1128505)..(1128506): n is a or c or g or t.
  misc_feature (1128517)..(1128518): n is a or c or g or t.
  misc_feature (1128539)..(1128540): n is a or c or g or t.
  misc_feature (1561400)..(1561400): n is a or c or g or t.
  misc_feature (1561477)..(1561477): n is a or c or g or t.
  misc_feature (1561545)..(1561545): n is a or c or g or t.
  misc_feature (1767941)..(1767941): n is a or c or g or t.
VVAMREFFLPKKDYRVVFFIGKGGVGKTTSSAAAAVALADKGYRTLIVSLDPAHNLGDVLMEKLSDKPKKIAENLYASELDMEKLIKSYLKHLEENLKHMYRYLTVINLEKYFEVLSFSPGIEEYATLEAVKEILMKGDEWDVIVFDTPPTGLTLRVLALPRISLIWTDKLIEIRRAILERRAAIANIHGEQEFVVEGERIKLPTKEEEDPVMKELKAYRKEVAFVESVLTDPDKTSVVAVMNPEMLPLYETERAYESLKKFRIPFNMIVMNKVFELKGEVPELKAKLEAQERVLMEVSEKFKGVDIVKIPIFPEEPRGVERLRELGGAIIGER

SEQ ID NO: 518 - protein, 260 aa, Thermococcus kodakaraensis KOD1
  misc_feature (414542)..(414542): n is a or c or g or t.
  misc_feature (786890)..(786890): n is a or c or g or t.
  misc_feature (786907)..(786907): n is a or c or g or t.
  misc_feature (786944)..(786946): n is a or c or g or t.
  misc_feature (839139)..(839139): n is a or c or g or t.
  misc_feature (1128488)..(1128488): n is a or c or g or t.
  misc_feature (1128499)..(1128499): n is a or c or g or t.
  misc_feature (1128505)..(1128506): n is a or c or g or t.
  misc_feature (1128517)..(1128518): n is a or c or g or t.
  misc_feature (1128539)..(1128540): n is a or c or g or t.
  misc_feature (1561400)..(1561400): n is a or c or g or t.
  misc_feature (1561477)..(1561477): n is a or c or g or t.
  misc_feature (1561545)..(1561545): n is a or c or g or t.
  misc_feature (1767941)..(1767941): n is a or c or g or t.
MEIYKAKFGNPERGWVVLVHGLGEHSGRYGKLISMLNEAGFAVYTFDWPGHGKSPGKRGHTSVEEAMEIIDSIIKELGEKPFLFGHSLGGLTVIRYAETRPDKIRGVVASSPALAKSPKTPGFMVALAKVLGRIAPGLTLSNGIDPNLLSRNPDAVKRYIEDPLVHDRISTKLGMSIFKNMELAHREADRIEVPILLLVGTGDVITPPEGSRKLFEELKVKDKEIREFEGAYHEIFEDPEWGEEFHKTIVEWLIKHSEKA

SEQ ID NO: 519 - protein, 308 aa, Thermococcus kodakaraensis KOD1
  misc_feature (414542)..(414542): n is a or c or g or t.
  misc_feature (786890)..(786890): n is a or c or g or t.
  misc_feature (786907)..(786907): n is a or c or g or t.
  misc_feature (786944)..(786946): n is a or c or g or t.
  misc_feature (839139)..(839139): n is a or c or g or t.
  misc_feature (1128488)..(1128488): n is a or c or g or t.
  misc_feature (1128499)..(1128499): n is a or c or g or t.
  misc_feature (1128505)..(1128506): n is a or c or g or t.
  misc_feature (1128517)..(1128518): n is a or c or g or t.
  misc_feature (1128539)..(1128540): n is a or c or g or t.
  misc_feature (1561400)..(1561400): n is a or c or g or t.
  misc_feature (1561477)..(1561477): n is a or c or g or t.
  misc_feature (1561545)..(1561545): n is a or c or g or t.
  misc_feature (1767941)..(1767941): n is a or c or g or t.
MIKNKLVVVTGGAGFIGSHIAWELIKDNDVVIIDNLYTGKEENVPPGAKLVKADIRDYEAIAELISNADYVFHEAAQVSVVESIRDPVFTEEVNVLGTLNIIKALLEGHGKLIFASSAAVYGDNPNLPLKETERPRPLSPYGVTKATAEEYLRVFHELYGLPVVSLRYFNVFGPRQSTNQYAGVISIFINRALKGEPLVIFGDGKQTRDFIYVKDVVKANLLVAESRKANGRVFNVATGRETTILELAMKIIEITGTTSSVVFDKPRPGDIRHSRADISEIRKLGFEPEWSLEEGLKKTVEWYAKNNP

SEQ ID NO: 520 - protein, 67 aa, Thermococcus kodakaraensis KOD1
  misc_feature (414542)..(414542): n is a or c or g or t.
  misc_feature (786890)..(786890): n is a or c or g or t.
  misc_feature (786907)..(786907): n is a or c or g or t.
  misc_feature (786944)..(786946): n is a or c or g or t.
  misc_feature (839139)..(839139): n is a or c or g or t.
  misc_feature (1128488)..(1128488): n is a or c or g or t.
  misc_feature (1128499)..(1128499): n is a or c or g or t.
  misc_feature (1128505)..(1128506): n is a or c or g or t.
  misc_feature (1128517)..(1128518): n is a or c or g or t.
  misc_feature (1128539)..(1128540): n is a or c or g or t.
  misc_feature (1561400)..(1561400): n is a or c or g or t.
  misc_feature (1561477)..(1561477): n is a or c or g or t.
  misc_feature (1561545)..(1561545): n is a or c or g or t.
  misc_feature (1767941)..(1767941): n is a or c or g or t.
MESAIEGLGIIKVNDSQNWELIRELMFRYSLLPSDATILATAIENGIEALATFDRDYSKVQELKIIP

SEQ ID NO: 521 - protein, 925 aa, Thermococcus kodakaraensis KOD1
  misc_feature (414542)..(414542): n is a or c or g or t.
  misc_feature (786890)..(786890): n is a or c or g or t.
  misc_feature (786907)..(786907): n is a or c or g or t.
  misc_feature (786944)..(786946): n is a or c or g or t.
  misc_feature (839139)..(839139): n is a or c or g or t.
  misc_feature (1128488)..(1128488): n is a or c or g or t.
  misc_feature (1128499)..(1128499): n is a or c or g or t.
  misc_feature (1128505)..(1128506): n is a or c or g or t.
  misc_feature (1128517)..(1128518): n is a or c or g or t.
  misc_feature (1128539)..(1128540): n is a or c or g or t.
  misc_feature (1561400)..(1561400): n is a or c or g or t.
  misc_feature (1561477)..(1561477): n is a or c or g or t.
  misc_feature (1561545)..(1561545): n is a or c or g or t.
  misc_feature (1767941)..(1767941): n is a or c or g or t.
MHPLLKKVIKERFGKLNRLQQDAFREVSSGKSVLIIAPTGSGKTEAAVLPVFNEILEEGLKPISALYIAPLKALNRDLLERLEWWGKKLGITVEVRHGDTSAYRKAKQTKNPPQMLIITPETLGVILTVKSLRKHLVNVKFVIVDEIAELVDNKRGAQLLLGLERLAEIADFRRIGMTATVGNEDEVREWLKADTIVKPNWKKAYRFHVLYPKPEEKDEELARELSVSPDIAARLRVLWEIVERHGKALIFTNTRQFAEILAHRLKVWGKPVEVHHGSLSREARINAERALKEGRIKALVCTSSMELGIDIGDVDVVIQYMSPRQVNRLVQRAGRAKHRIGEVSEAYIITTNVEDYIQSLIIAKHALEGRFEPVEPIGGLDVLAHFVVGLLVEYKRLPRERPYEIARRAYVYRDLSWEDYLDTLKVLEDARIIGYDEETNQLYLRRGAFQYYYENLSTIPDEVSWRVIDAKSGHIVGRLDESFVMDLEEGMEFVMGGKSWIVLKIDDEAKIIKARESPSIESAIPSWEGEMIPVPFSVAFAVGRLKRELAFDFRNALSLIEGVEFREEDLKRAFEEIRGEPFSTDRDIFVESTPKALIIHADFGNRANEAIGRIVHSLLILRYGRVFSVRAQAHAVVFKTPFQLNPEEVKHYLYQDPESVEFIVARSLRDSHAYRWRMLNVAKRFGALRRDAKIRRVERLFEGTVIERETLNELYHDKVDVKTAELVMEMLKAGSLRVKTALRKEPSTLARLNMTVGGEFLLSGILERDEVLELFKKRLLEHEVVLVCTNCGWHSKTKVARLRSIKERECPRCGSKMLAVAHPIDAEEFLPVLDKVRHGRPLEKKEERVYRKLLKAADLVDSYGFDAVLALASYGTGPDTAARILSQYKGEALLVALMERERDFIRTRRFWVDKKDNSNENKDKS

SEQ ID NO: 522 - protein, 1191 aa, Thermococcus kodakaraensis KOD1
  misc_feature (414542)..(414542): n is a or c or g or t.
  misc_feature (786890)..(786890): n is a or c or g or t.
  misc_feature (786907)..(786907): n is a or c or g or t.
  misc_feature (786944)..(786946): n is a or c or g or t.
  misc_feature (839139)..(839139): n is a or c or g or t.
  misc_feature (1128488)..(1128488): n is a or c or g or t.
  misc_feature (1128499)..(1128499): n is a or c or g or t.
  misc_feature (1128505)..(1128506): n is a or c or g or t.
  misc_feature (1128517)..(1128518): n is a or c or g or t.
  misc_feature (1128539)..(1128540): n is a or c or g or t.
  misc_feature (1561400)..(1561400): n is a or c or g or t.
  misc_feature (1561477)..(1561477): n is a or c or g or t.
  misc_feature (1561545)..(1561545): n is a or c or g or t.
  misc_feature (1767941)..(1767941): n is a or c or g or t.
VWMMPYIEKIEMKGFKSYGNKKVVVPLARGFTAIVGANGSGKSNIGDAVLFVLGGLSAKAMRASRISDLIFAGSKGEPPAKYAEVAMYFNNEDRGFPIDEDEVVIKRRVYPDGRSTYWLNGKRATRSEIIDLLSAAMISPEGYNLVLQGDITKFIKMSPIERRLIIDEISGIAEYDAKKEKALKELKQTEENLARVDLLIREVKAQLDKLEKERNDALRYLDLKEKLEKARVTLLLAEIKRLEKFIEEGGSREEEIEGQIKSLEDRLKEIAKEIVAKEKELAEIERQLEEKSGDGILEITRKISEVKSKIEVAKRNIENAQKEIEESQARLRKSKEELKHVSEEIEKSKGAIKRWGKRREQLLVQIKERETVRNELVIKLGEIDKRFSEAREEFDKVVAELEEAKKALYMKESEISKFEEEISRAKARITQFNARRNLLKEKIAEAKASLEAKRSELSQVEGKISKVESRHRKAEKELEEKTRELQKVESELAKAREELIKAEAQREVRGNRAVEFLKSQRIEGLYGTLGELISVPKSEYALAVEVALGGNYDNVVVEDDRVAEKAIKLLKEKKLGRLTFLPLNKIKPRSMREKPKLGIPAMDVVSYDPRFRNAVAYALGDTLIVNDMDEAREVGIGKVRMVTLGGELLERSGAITGGHYKPRGKLGVNVDEIRKRVEALEGRKEALEAQVNALKVEVKGLENELFELRMKKSELSKDVQVIQKELDSYLAEDRSLKEEIEENERLISELEKRIEESKGEMAKLRGRIERLEKKREKIKKALENPEARELNSKIREVEAEISKLKEELSRVESKLESLDSRINEELLPRKADLEEEIEGLVNKINALNAYIEENKNAITELEKELEELKTAEENVKDELKELREGREQIRVEIAELRKEKDELTSKLQELRIEANTLKVRLAQVETTLQEKRAELKHFDPALVRSIKEIPLEVEKLRQDIEKMEEEIRSLEPVNMKAIEDFEVVERRYLELSSKREQVLAEKESIEEFIQEIEGQKRQVFLQTLNAIAKNFSELFAKLSPGGEAKLILENPEDPFSGGLEIEAKPAGKDVKRIEAMSGGEKAIIALAFVFAIQRYKPAPFYLLDEIDAHLDDANVKRVADLIKEASQNSQFIVITHRDVMMAQADRIIGVSMRNGVSKVVSLSLEKARKILEEIRKKDEAEHREMFGRLEA

SEQ ID NO: 523 - protein, 221 aa, Thermococcus kodakaraensis KOD1
  misc_feature (414542)..(414542): n is a or c or g or t.
  misc_feature (786890)..(786890): n is a or c or g or t.
  misc_feature (786907)..(786907): n is a or c or g or t.
  misc_feature (786944)..(786946): n is a or c or g or t.
  misc_feature (839139)..(839139): n is a or c or g or t.
  misc_feature (1128488)..(1128488): n is a or c or g or t.
  misc_feature (1128499)..(1128499): n is a or c or g or t.
  misc_feature (1128505)..(1128506): n is a or c or g or t.
  misc_feature (1128517)..(1128518): n is a or c or g or t.
  misc_feature (1128539)..(1128540): n is a or c or g or t.
  misc_feature (1561400)..(1561400): n is a or c or g or t.
  misc_feature (1561477)..(1561477): n is a or c or g or t.
  misc_feature (1561545)..(1561545): n is a or c or g or t.
  misc_feature (1767941)..(1767941): n is a or c or g or t.
MESRFEPEITPVDILLQLVQMGKVDPWNIDIVDLTEKYIERLREMKELDLRISARAILAASILVRMKSEALLYSDEEQDKGDEEKERIRVDVEPLAPPLRRAERYYTFEDLIEALMDALEEAERRKPRKRKREEVEEEIFVVDDFRVDIEKHVNRLYEIVRKLYSETREPIRFWDLVFDPQPKIIARTFLYLLFLSNMGKVDLLQEEPFGEILVVPLEENS

SEQ ID NO: 524 - protein, 83 aa, Thermococcus kodakaraensis KOD1
  misc_feature (414542)..(414542): n is a or c or g or t.
  misc_feature (786890)..(786890): n is a or c or g or t.
  misc_feature (786907)..(786907): n is a or c or g or t.
  misc_feature (786944)..(786946): n is a or c or g or t.
  misc_feature (839139)..(839139): n is a or c or g or t.
  misc_feature (1128488)..(1128488): n is a or c or g or t.
  misc_feature (1128499)..(1128499): n is a or c or g or t.
  misc_feature (1128505)..(1128506): n is a or c or g or t.
  misc_feature (1128517)..(1128518): n is a or c or g or t.
  misc_feature (1128539)..(1128540): n is a or c or g or t.
  misc_feature (1561400)..(1561400): n is a or c or g or t.
  misc_feature (1561477)..(1561477): n is a or c or g or t.
  misc_feature (1561545)..(1561545): n is a or c or g or t.
  misc_feature (1767941)..(1767941): n is a or c or g or t.
VVIRMQIVEIDIKLPYKERGVILSKIVSKFGGRIKDIHFHPPDPKGIGEVRVELEVENGKSIISELKRLLKGGRFSFRILSEA

SEQ ID NO: 525 - protein, 138 aa, Thermococcus kodakaraensis KOD1
  misc_feature (414542)..(414542): n is a or c or g or t.
  misc_feature (786890)..(786890): n is a or c or g or t.
  misc_feature (786907)..(786907): n is a or c or g or t.
  misc_feature (786944)..(786946): n is a or c or g or t.
  misc_feature (839139)..(839139): n is a or c or g or t.
  misc_feature (1128488)..(1128488): n is a or c or g or t.
  misc_feature (1128499)..(1128499): n is a or c or g or t.
  misc_feature (1128505)..(1128506): n is a or c or g or t.
  misc_feature (1128517)..(1128518): n is a or c or g or t.
  misc_feature (1128539)..(1128540): n is a or c or g or t.
  misc_feature (1561400)..(1561400): n is a or c or g or t.
  misc_feature (1561477)..(1561477): n is a or c or g or t.
  misc_feature (1561545)..(1561545): n is a or c or g or t.
  misc_feature (1767941)..(1767941): n is a or c or g or t.
VLIMVEDKKREVKKRPVDEFAWQEYDLEEFKRTFPALARELEEEPGLSIDAYRTSEEEALEEEELELQDFSGYNPTIIDFLRRCETDDEALEIINWMEERGEITHEMAKELRIVLAKKGVRAFGPKKEWGWYERHGRH

SEQ ID NO: 526 - protein, 597 aa, Thermococcus kodakaraensis KOD1
  misc_feature (414542)..(414542): n is a or c or g or t.
  misc_feature (786890)..(786890): n is a or c or g or t.
  misc_feature (786907)..(786907): n is a or c or g or t.
  misc_feature (786944)..(786946): n is a or c or g or t.
  misc_feature (839139)..(839139): n is a or c or g or t.
  misc_feature (1128488)..(1128488): n is a or c or g or t.
  misc_feature (1128499)..(1128499): n is a or c or g or t.
  misc_feature (1128505)..(1128506): n is a or c or g or t.
  misc_feature (1128517)..(1128518): n is a or c or g or t.
  misc_feature (1128539)..(1128540): n is a or c or g or t.
  misc_feature (1561400)..(1561400): n is a or c or g or t.
  misc_feature (1561477)..(1561477): n is a or c or g or t.
  misc_feature (1561545)..(1561545): n is a or c or g or t.
  misc_feature (1767941)..(1767941): n is a or c or g or t.
VVRMPRIAVIDYDKCNPDKCGHFLCERVCPVNRMGGEAIIIDEENYRPIIQEASCTGCGICVHKCPFNAITIVNLPEELEEGCVHRYGINAFVLYRLPVVKEGMVVGVLGPNGTGKTTAVKILSGQLIPNLCGNNDNWDNVIKAFRGNELQNYFEKLKKGEIRPIVKPQYVDLIPKAVKGKVRDLLKKADETGKFDEVVKELELENILDREIQQLSGGELQRVAIAAALLRNAHFYFFDEPSSYLDIRQRLRIAKTIRRLAESGKNVLTVEHDLALLDYMSDIIHVVYGKPGAYGIFSQPKSTRNGINEFLRGYLRDENVRFRPFEITFTKTGERKAQEGEILVQYPRLVKEYENGSFRLEVEGGELYVGEVVGIVGPNGIGKTTFVKMLAGVEKPTEGEVDWSLTVSYKPQYIKTDYEGTVFDLLSKIDASKLMSNFYKTELLNPLGIPDLYDRQVNELSGGELQRVAITACLIRDADIYLIDEPSAHLDVEQRLAVSKAIRSLMAKNEKTALIVEHDVMMVDYLSDRLIVFEGEPGKYGRALPPMGMREGMNRFLANIGITFRRDPDTGRPRANKEGSVKDREQKERGEYYYLSA

SEQ ID NO: 527 - protein, 139 aa, Thermococcus kodakaraensis KOD1
  misc_feature (414542)..(414542): n is a or c or g or t.
  misc_feature (786890)..(786890): n is a or c or g or t.
  misc_feature (786907)..(786907): n is a or c or g or t.
  misc_feature (786944)..(786946): n is a or c or g or t.
  misc_feature (839139)..(839139): n is a or c or g or t.
  misc_feature (1128488)..(1128488): n is a or c or g or t.
  misc_feature (1128499)..(1128499): n is a or c or g or t.
  misc_feature (1128505)..(1128506): n is a or c or g or t.
  misc_feature (1128517)..(1128518): n is a or c or g or t.
  misc_feature (1128539)..(1128540): n is a or c or g or t.
  misc_feature (1561400)..(1561400): n is a or c or g or t.
  misc_feature (1561477)..(1561477): n is a or c or g or t.
  misc_feature (1561545)..(1561545): n is a or c or g or t.
  misc_feature (1767941)..(1767941): n is a or c or g or t.
VMPVDLRAPIRVYMTKKLIGVKPDDTVKRAGEVMVEFDIGSLVVVDENGDVVGFLTKGDIIRRMVIPGLPNTTPVKEIMTKDLVTVPSTAPLGEVLDLLSKKGIKHVLVEEEGKIVGIFSISDLLEASRRRLETAIAAE

SEQ ID NO: 528 - protein, 136 aa, Thermococcus kodakaraensis KOD1
  misc_feature (414542)..(414542): n is a or c or g or t.
  misc_feature (786890)..(786890): n is a or c or g or t.
  misc_feature (786907)..(786907): n is a or c or g or t.
  misc_feature (786944)..(786946): n is a or c or g or t.
  misc_feature (839139)..(839139): n is a or c or g or t.
  misc_feature (1128488)..(1128488): n is a or c or g or t.
  misc_feature (1128499)..(1128499): n is a or c or g or t.
  misc_feature (1128505)..(1128506): n is a or c or g or t.
  misc_feature (1128517)..(1128518): n is a or c or g or t.
  misc_feature (1128539)..(1128540): n is a or c or g or t.
  misc_feature (1561400)..(1561400): n is a or c or g or t.
  misc_feature (1561477)..(1561477): n is a or c or g or t.
  misc_feature (1561545)..(1561545): n is a or c or g or t.
  misc_feature (1767941)..(1767941): n is a or c or g or t.
MDDLRTQLEELKKRLEVLEESIDPVDELMLSIKARLKKRLEGGALPGIDEEKAAKTLKALANPDRIRILKMLAEGPMGFKEIKETLGVESPTVSHHLKLLVKTGMVKKGEKYELSSNGRLFLRLLEIITVLDEVEE

SEQ ID NO: 529 - protein, 222 aa, Thermococcus kodakaraensis KOD1
  misc_feature (414542)..(414542): n is a or c or g or t.
  misc_feature (786890)..(786890): n is a or c or g or t.
  misc_feature (786907)..(786907): n is a or c or g or t.
  misc_feature (786944)..(786946): n is a or c or g or t.
  misc_feature (839139)..(839139): n is a or c or g or t.
  misc_feature (1128488)..(1128488): n is a or c or g or t.
  misc_feature (1128499)..(1128499): n is a or c or g or t.
  misc_feature (1128505)..(1128506): n is a or c or g or t.
  misc_feature (1128517)..(1128518): n is a or c or g or t.
  misc_feature (1128539)..(1128540): n is a or c or g or t.
  misc_feature (1561400)..(1561400): n is a or c or g or t.
  misc_feature (1561477)..(1561477): n is a or c or g or t.
  misc_feature (1561545)..(1561545): n is a or c or g or t.
  misc_feature (1767941)..(1767941): n is a or c or g or t.
VKVMAMIFENVKMVEISAVNGKAEIEGWENDHAEVSYTLHGEAEVEVEQRGEKLIIREEPKKRFFNLLGKSGWAEITVKVPRKATVRASTVNGEIMARNVSFEKVSTVNGRIELENCEAGEISNVNGRVRAYLALAKSLKASSVNGPIELEIEELEGDAKISNVNGSIALALSDFCDARVKASRVNGAITFEGIDPENPVIGTGEFEVKVSTVNGNIVVRRI

SEQ ID NO: 530 - protein, 334 aa, Thermococcus kodakaraensis KOD1
  misc_feature (414542)..(414542): n is a or c or g or t.
  misc_feature (786890)..(786890): n is a or c or g or t.
  misc_feature (786907)..(786907): n is a or c or g or t.
  misc_feature (786944)..(786946): n is a or c or g or t.
  misc_feature (839139)..(839139): n is a or c or g or t.
  misc_feature (1128488)..(1128488): n is a or c or g or t.
  misc_feature (1128499)..(1128499): n is a or c or g or t.
  misc_feature (1128505)..(1128506): n is a or c or g or t.
  misc_feature (1128517)..(1128518): n is a or c or g or t.
  misc_feature (1128539)..(1128540): n is a or c or g or t.
  misc_feature (1561400)..(1561400): n is a or c or g or t.
  misc_feature (1561477)..(1561477): n is a or c or g or t.
  misc_feature (1561545)..(1561545): n is a or c or g or t.
  misc_feature (1767941)..(1767941): n is a or c or g or t.
MRFNRDFWLFAVGRFVSQLGWAVQDVALPLYVLDKTHSGSMMTAFILAEMIPALIVMPFAGVVGDRYNRKKLMVWFDIARGILLFGVLAFNLLELHQLIVVQVIMAVMGTFFGSATSAMFPDLVEPDELERANSITASMNILARLIGPALGGFIYAIGGIRLAILINAVSFFGSGLFEILIKYEWKTRELESFSQVVEDLKEGISYLLSNRYLRTLMFFALFMIAFGQPFGAVLMPYSFREVLKFSSYQFGLLESAFMLGALAGNMLVGIKFGRKAGRYLFHALLLDGVMILLFTWAISPLSSLNKAGAFLFLATINVLWGAIDGLFQPSPLTR

SEQ ID NO: 531 - protein, 744 aa, Thermococcus kodakaraensis KOD1
  misc_feature (414542)..(414542): n is a or c or g or t.
  misc_feature (786890)..(786890): n is a or c or g or t.
  misc_feature (786907)..(786907): n is a or c or g or t.
  misc_feature (786944)..(786946): n is a or c or g or t.
  misc_feature (839139)..(839139): n is a or c or g or t.
  misc_feature (1128488)..(1128488): n is a or c or g or t.
  misc_feature (1128499)..(1128499): n is a or c or g or t.
  misc_feature (1128505)..(1128506): n is a or c or g or t.
  misc_feature (1128517)..(1128518): n is a or c or g or t.
  misc_feature (1128539)..(1128540): n is a or c or g or t.
  misc_feature (1561400)..(1561400): n is a or c or g or t.
  misc_feature (1561477)..(1561477): n is a or c or g or t.
  misc_feature (1561545)..(1561545): n is a or c or g or t.
  misc_feature (1767941)..(1767941): n is a or c or g or t.
VVKMVRYMVTSALPYANGPIHAGHLAGAYLPADIFVRYLRLKGEEVLFICGTDEHGTPITFRALKEGRSPREIVDEFHEHIKTTFERAKISFDFFGRTELPVHYRLSQEFFLKALENGHLVKKVTKQAYCEHDKMFLPDRYVIGTCPYCGAENQRGDQCEVCGHPLTPEILINPRCNICGNPITFKDSAHYYIRMQDFEERLKKWVESQEHWKPNVRNTVLGWINEGLEERAITRDLDWGIPVPLDDEDVKGKVLYVWFEAPIGYISITIEHLKREGKENEWKKFWLNLDGETKVIHFIGKDNIPFHAIFWPAFLMAYGKYRDEEVEAEWNLPYDIPANEYLNLEGKKFSTSRNWAIWVHEFLDVWPADYLRYYLTAIMPETRDSDFSFEDFKKKINEELVNNLGNFVHRAMTFVNRYFDGVVPERGELNDLDRQALEEIEKAFKETGELISNYRFKDALKRVMELAIFGNRYFDYQKPWKTAKENRERTATTVNVSLQIVKALGILLEPFLPDASEKIWHLLNLEEVKKWSFEELPAGHRVRKAFPMFRKVTDGEIIYFIVNYIGRGNPDSAKILLNKYYKQEDVVKVTLERFGEKRKDEALALLKSIYGDEFKGEKPEKAGKAEKKEKVKEGKKMEYVSFDEFAKLDLRVGKIIEVNDHPNADRLYVVKVDLGDEVRQLVAGLKKYYKPEELLGHYVVIIANLEPKKLRGVESQGMLLAADDGERVALLMPDKEVKLGARIR

SEQ ID NO: 532 - protein, 157 aa, Thermococcus kodakaraensis KOD1
  misc_feature (414542)..(414542): n is a or c or g or t.
  misc_feature (786890)..(786890): n is a or c or g or t.
  misc_feature (786907)..(786907): n is a or c or g or t.
  misc_feature (786944)..(786946): n is a or c or g or t.
  misc_feature (839139)..(839139): n is a or c or g or t.
  misc_feature (1128488)..(1128488): n is a or c or g or t.
  misc_feature (1128499)..(1128499): n is a or c or g or t.
  misc_feature (1128505)..(1128506): n is a or c or g or t.
  misc_feature (1128517)..(1128518): n is a or c or g or t.
  misc_feature (1128539)..(1128540): n is a or c or g or t.
  misc_feature (1561400)..(1561400): n is a or c or g or t.
  misc_feature (1561477)..(1561477): n is a or c or g or t.
  misc_feature (1561545)..(1561545): n is a or c or g or t.
  misc_feature (1767941)..(1767941): n is a or c or g or t.
VITMNYLEIKVLDENGEGKPLKDFVLGRWTVLYFYPKDNTPGCTTEAKEFSELIEEFEKLGVQVIGVSRDSPGSHRKFREKHNLKVKLLSDPNAELHKALGAWGKKKRYGKEYEGAIRSTFILNPEGEIVWKKINVRAKGHAAKVLEEVKKLIGSEE

SEQ ID NO: 533 - protein, 100 aa, Thermococcus kodakaraensis KOD1
  misc_feature (414542)..(414542): n is a or c or g or t.
  misc_feature (786890)..(786890): n is a or c or g or t.
  misc_feature (786907)..(786907): n is a or c or g or t.
  misc_feature (786944)..(786946): n is a or c or g or t.
  misc_feature (839139)..(839139): n is a or c or g or t.
  misc_feature (1128488)..(1128488): n is a or c or g or t.
  misc_feature (1128499)..(1128499): n is a or c or g or t.
  misc_feature (1128505)..(1128506): n is a or c or g or t.
  misc_feature (1128517)..(1128518): n is a or c or g or t.
  misc_feature (1128539)..(1128540): n is a or c or g or t.
  misc_feature (1561400)..(1561400): n is a or c or g or t.
  misc_feature (1561477)..(1561477): n is a or c or g or t.
  misc_feature (1561545)..(1561545): n is a or c or g or t.
  misc_feature (1767941)..(1767941): n is a or c or g or t.
MLAKYPFELPKDRPLTKREIAQALRWAIEAELDAINIYEQLAAGIEDEKIKHIFLDVANEEKEHFGEFLAALFEVDEELAKYMKEGFKEVEEETGIKVKL

SEQ ID NO: 534 - protein, 58 aa, Thermococcus kodakaraensis KOD1
  misc_feature (414542)..(414542): n is a or c or g or t.
  misc_feature (786890)..(786890): n is a or c or g or t.
  misc_feature (786907)..(786907): n is a or c or g or t.
  misc_feature (786944)..(786946): n is a or c or g or t.
  misc_feature (839139)..(839139): n is a or c or g or t.
  misc_feature (1128488)..(1128488): n is a or c or g or t.
  misc_feature (1128499)..(1128499): n is a or c or g or t.
  misc_feature (1128505)..(1128506): n is a or c or g or t.
  misc_feature (1128517)..(1128518): n is a or c or g or t.
  misc_feature (1128539)..(1128540): n is a or c or g or t.
  misc_feature (1561400)..(1561400): n is a or c or g or t.
  misc_feature (1561477)..(1561477): n is a or c or g or t.
  misc_feature (1561545)..(1561545): n is a or c or g or t.
  misc_feature (1767941)..(1767941): n is a or c or g or t.
VKRFAEMHLEIEKDMIQTYQKMAVKMTHPPFKGLAEAIVENEREHHRLLAELIAKYKE

SEQ ID NO: 535 - protein, 412 aa, Thermococcus kodakaraensis KOD1
  misc_feature (414542)..(414542): n is a or c or g or t.
  misc_feature (786890)..(786890): n is a or c or g or t.
  misc_feature (786907)..(786907): n is a or c or g or t.
  misc_feature (786944)..(786946): n is a or c or g or t.
  misc_feature (839139)..(839139): n is a or c or g or t.
  misc_feature (1128488)..(1128488): n is a or c or g or t.
  misc_feature (1128499)..(1128499): n is a or c or g or t.
  misc_feature (1128505)..(1128506): n is a or c or g or t.
  misc_feature (1128517)..(1128518): n is a or c or g or t.
  misc_feature (1128539)..(1128540): n is a or c or g or t.
  misc_feature (1561400)..(1561400): n is a or c or g or t.
  misc_feature (1561477)..(1561477): n is a or c or g or t.
  misc_feature (1561545)..(1561545): n is a or c or g or t.
  misc_feature (1767941)..(1767941): n is a or c or g or t.
MTELFNSKLCAICKGRKLLCGRPTCPILERFRVAQSVEKKLNKRHLFGSSPPSIFVGEHGYPKVRIGPLVPPIEGNTSHLDSPLKWENKTIKDILYYRSLLVMGETRADVSVRKSGRVLGEIQELAMSIRPVDSEVILKRKPVVKVVPSEFAPPLGPRAELLDFELTENPKIPRRTDYVVGDELKAEQAIMRLYNWGFDEYYIIRLLSAGLLGIDRKLVPTRWSITAVQDTIGKNLRREILGYPEINSYEVYFHEFLGNRYAVLLMPQSYAFELLEVWLKGSLFGSAEPQVIHDYEDFRGIKGYAKETTGAYYAARLSVLEHLRKRRRQARIIVFREVTPAYYAPVGVWQIRVGVKKALENPVGRFEILNEALEAVRKLLEHPLERYLQRSYILGHLAKQKTLDQWLGKVLT

SEQ ID NO: 536 - protein, 373 aa, Thermococcus kodakaraensis KOD1
  misc_feature (414542)..(414542): n is a or c or g or t.
  misc_feature (786890)..(786890): n is a or c or g or t.
  misc_feature (786907)..(786907): n is a or c or g or t.
  misc_feature (786944)..(786946): n is a or c or g or t.
  misc_feature (839139)..(839139): n is a or c or g or t.
  misc_feature (1128488)..(1128488): n is a or c or g or t.
  misc_feature (1128499)..(1128499): n is a or c or g or t.
  misc_feature (1128505)..(1128506): n is a or c or g or t.
  misc_feature (1128517)..(1128518): n is a or c or g or t.
  misc_feature (1128539)..(1128540): n is a or c or g or t.
  misc_feature (1561400)..(1561400): n is a or c or g or t.
  misc_feature (1561477)..(1561477): n is a or c or g or t.
  misc_feature (1561545)..(1561545): n is a or c or g or t.
  misc_feature (1767941)..(1767941): n is a or c or g or t.
VRKKLTLISLDGNGVYNLKHMPFLSELAENGEFAVVDSIFPTLTDLVHTSVMTGVWPRDHGVVENGYYDRIADRKVNFYEYEVAFNPHKVIKAPTIVDILRGKGVRTASVSGYTMPPFSGTDVRIFPPFFASNEMYRKHGRDWRKDVWVLNSALYLYEECKPDLLLVHFASIDGMQHDHGPLSEGAMKAVETVDTAVRTLWERLKDEYVFIIFADHGQEEVHTWVNLKTYLKERGIDVLRVSSGGGVHVYLKDPNQSEEAFEALRRAPGVKEVFFREELPHLDNPNSGELIVSAKPGYWFCSHRMCRGVKGASHWVRGMHGSMNEPVMKVPLVLWGFENVELDEPSLMDIAPTVLKFFGIEKPMNMVGKSLIR

SEQ ID NO: 537 - protein, 67 aa, Thermococcus kodakaraensis KOD1
  misc_feature (414542)..(414542): n is a or c or g or t.
  misc_feature (786890)..(786890): n is a or c or g or t.
  misc_feature (786907)..(786907): n is a or c or g or t.
  misc_feature (786944)..(786946): n is a or c or g or t.
  misc_feature (839139)..(839139): n is a or c or g or t.
  misc_feature (1128488)..(1128488): n is a or c or g or t.
  misc_feature (1128499)..(1128499): n is a or c or g or t.
  misc_feature (1128505)..(1128506): n is a or c or g or t.
  misc_feature (1128517)..(1128518): n is a or c or g or t.
  misc_feature (1128539)..(1128540): n is a or c or g or t.
  misc_feature (1561400)..(1561400): n is a or c or g or t.
  misc_feature (1561477)..(1561477): n is a or c or g or t.
  misc_feature (1561545)..(1561545): n is a or c or g or t.
  misc_feature (1767941)..(1767941): n is a or c or g or t.
MIRVKVLGRGIEKEIEWQKGVTVADVLRAVGFNTESAIARVNGRVALEEEKVEDGAYVEVIPVVSGG

SEQ ID NO: 538 - protein, 97 aa, Thermococcus kodakaraensis KOD1
  misc_feature (414542)..(414542): n is a or c or g or t.
  misc_feature (786890)..(786890): n is a or c or g or t.
  misc_feature (786907)..(786907): n is a or c or g or t.
  misc_feature (786944)..(786946): n is a or c or g or t.
  misc_feature (839139)..(839139): n is a or c or g or t.
  misc_feature (1128488)..(1128488): n is a or c or g or t.
  misc_feature (1128499)..(1128499): n is a or c or g or t.
  misc_feature (1128505)..(1128506): n is a or c or g or t.
  misc_feature (1128517)..(1128518): n is a or c or g or t.
  misc_feature (1128539)..(1128540): n is a or c or g or t.
  misc_feature (1561400)..(1561400): n is a or c or g or t.
  misc_feature (1561477)..(1561477): n is a or c or g or t.
  misc_feature (1561545)..(1561545): n is a or c or g or t.
  misc_feature (1767941)..(1767941): n is a or c or g or t.
VRGMKYPKQIRTYCPFCKRHTIHKVEKVKKRPRSELSAGQRRFRRKLKGYTGFPRPNPAGREKPVKKLDLRFRCTVCGKAHTRGQGFRVKKFELVEV

SEQ ID NO: 539 - protein, 267 aa, Thermococcus kodakaraensis KOD1
  misc_feature (414542)..(414542): n is a or c or g or t.
  misc_feature (786890)..(786890): n is a or c or g or t.
  misc_feature (786907)..(786907): n is a or c or g or t.
  misc_feature (786944)..(786946): n is a or c or g or t.
  misc_feature (839139)..(839139): n is a or c or g or t.
  misc_feature (1128488)..(1128488): n is a or c or g or t.
  misc_feature (1128499)..(1128499): n is a or c or g or t.
  misc_feature (1128505)..(1128506): n is a or c or g or t.
  misc_feature (1128517)..(1128518): n is a or c or g or t.
  misc_feature (1128539)..(1128540): n is a or c or g or t.
  misc_feature (1561400)..(1561400): n is a or c or g or t.
  misc_feature (1561477)..(1561477): n is a or c or g or t.
  misc_feature (1561545)..(1561545): n is a or c or g or t.
  misc_feature (1767941)..(1767941): n is a or c or g or t.
MKETMIYLLERPQLRDPVFIEGLPGIGLVGKLAADHLIQELEAVKFAELYSPHFMHQVLIKKGSIVELMKNEFYYWVNPDEDGRDLIIITGDQQVPPTDSPGHYEVVGKMLDLVQELGVREIITMGGYQVPELQGEPRVLAAVTHEELVEYYKKKLEGCSVEVIWREDEGGAIVGAAGLLLGMGKLRSMYGVSLLGESLGYIVDPKAAKAVLSAVTKILGIEVDMTALEERAKETEEILQKVQEMQRAMLEQGMPQSTQEEEDRGYL

SEQ ID NO: 540 - protein, 323 aa, Thermococcus kodakaraensis KOD1
  misc_feature (414542)..(414542): n is a or c or g or t.
  misc_feature (786890)..(786890): n is a or c or g or t.
  misc_feature (786907)..(786907): n is a or c or g or t.
  misc_feature (786944)..(786946): n is a or c or g or t.
  misc_feature (839139)..(839139): n is a or c or g or t.
  misc_feature (1128488)..(1128488): n is a or c or g or t.
  misc_feature (1128499)..(1128499): n is a or c or g or t.
  misc_feature (1128505)..(1128506): n is a or c or g or t.
  misc_feature (1128517)..(1128518): n is a or c or g or t.
  misc_feature (1128539)..(1128540): n is a or c or g or t.
  misc_feature (1561400)..(1561400): n is a or c or g or t.
  misc_feature (1561477)..(1561477): n is a or c or g or t.
  misc_feature (1561545)..(1561545): n is a or c or g or t.
  misc_feature (1767941)..(1767941): n is a or c or g or t.
MVKNMEELMKAIQEKNCGELKRVLYYRVDDLSDEQLKEVLEKAEEIAKECNDWELYKLVLYYYHEILGIDKISEFEKLAKEKDEFELKFHLADLYYLIGELEKSLELFRGLLEEEVAKGNVEHAARIYYSMAMIHEEIQEYEKALELIEKAEELYEKMGDERELLRLRIYKGYVTFEAGDTYRGKAIIAGVLPKILEDRELLVEAHLSFEEIFEEYEDYEAALQECLYALVYGRGTDYEDIAFGALMDVLWQLFLDDDFETVYLNIDMFINAFPEWADFFEAVKALALFKDGKIEDEEVKKAIEKVKDPRLLEMLELLGEAEL

SEQ ID NO: 541 - protein, 424 aa, Thermococcus kodakaraensis KOD1
  misc_feature (414542)..(414542): n is a or c or g or t.
  misc_feature (786890)..(786890): n is a or c or g or t.
  misc_feature (786907)..(786907): n is a or c or g or t.
  misc_feature (786944)..(786946): n is a or c or g or t.
  misc_feature (839139)..(839139): n is a or c or g or t.
  misc_feature (1128488)..(1128488): n is a or c or g or t.
  misc_feature (1128499)..(1128499): n is a or c or g or t.
  misc_feature (1128505)..(1128506): n is a or c or g or t.
  misc_feature (1128517)..(1128518): n is a or c or g or t.
  misc_feature (1128539)..(1128540): n is a or c or g or t.
  misc_feature (1561400)..(1561400): n is a or c or g or t.
  misc_feature (1561477)..(1561477): n is a or c or g or t.
  misc_feature (1561545)..(1561545): n is a or c or g or t.
  misc_feature (1767941)..(1767941): n is a or c or g or t.
VRGMKIQGKIWDLSEDGLGILRREEKPLYVPFAYPYDFVKARRVKRRFGRRIVTDFELLDPSPLRQRPRCRHFGFCGGCLWQGLKYKEQLRLKVELFEKITGISADIKGSPKVWGFRNVSNFIVSTTGIGLKKYGNPFDVEDLFECPVFSEKTLDYLRALRSFLAETGLKPWDLKRKTGDVHYLQVREGKFTREIMVNLISHSPPSPNTTEAFLGYFSFADSLYWSVKTDKRDDPRGEPQLIGGSPYIHERIGEVTYLIHPNSFFQTNSYALPLLIKAVENFASGEMILDLYAGVGTFGVWLAKRRFQVEGIELNPFAVEIANKNAEINNVDATFKVGRAEETPIGKYDTVVVDPPRKGLKEVAETLARSEIGKVVYVSCNPKAFKLDYENHLKKAYTIEDAVLIDMFPHTPHVEAVISLKRKH

SEQ ID NO: 542 - protein, 115 aa, Thermococcus kodakaraensis KOD1
  misc_feature (414542)..(414542): n is a or c or g or t.
  misc_feature (786890)..(786890): n is a or c or g or t.
  misc_feature (786907)..(786907): n is a or c or g or t.
  misc_feature (786944)..(786946): n is a or c or g or t.
  misc_feature (839139)..(839139): n is a or c or g or t.
  misc_feature (1128488)..(1128488): n is a or c or g or t.
  misc_feature (1128499)..(1128499): n is a or c or g or t.
  misc_feature (1128505)..(1128506): n is a or c or g or t.
  misc_feature (1128517)..(1128518): n is a or c or g or t.
  misc_feature (1128539)..(1128540): n is a or c or g or t.
  misc_feature (1561400)..(1561400): n is a or c or g or t.
  misc_feature (1561477)..(1561477): n is a or c or g or t.
  misc_feature (1561545)..(1561545): n is a or c or g or t.
  misc_feature (1767941)..(1767941): n is a or c or g or t.
MKSRVVERFKFEAAHAVIIDGQAEEIHGHTFRLEVAVEGPLKNGYVMDFLELRRIVENIIKELDHKNLNSLFKNPTTENIALWIAEEIQEKLPGGVQLKRIVLWEGDENGVEFEF

SEQ ID NO: 543 - protein, 112 aa, Thermococcus kodakaraensis KOD1
  misc_feature (414542)..(414542): n is a or c or g or t.
  misc_feature (786890)..(786890): n is a or c or g or t.
  misc_feature (786907)..(786907): n is a or c or g or t.
  misc_feature (786944)..(786946): n is a or c or g or t.
  misc_feature (839139)..(839139): n is a or c or g or t.
  misc_feature (1128488)..(1128488): n is a or c or g or t.
  misc_feature (1128499)..(1128499): n is a or c or g or t.
  misc_feature (1128505)..(1128506): n is a or c or g or t.
  misc_feature (1128517)..(1128518): n is a or c or g or t.
  misc_feature (1128539)..(1128540): n is a or c or g or t.
  misc_feature (1561400)..(1561400): n is a or c or g or t.
  misc_feature (1561477)..(1561477): n is a or c or g or t.
  misc_feature (1561545)..(1561545): n is a or c or g or t.
  misc_feature (1767941)..(1767941): n is a or c or g or t.
VTPITPFYLEVVSMEAVRAYELQLELQQIRTLRQSLELKMKELEYAEGIITSLKSERRIYRAFSDLLVEITRDEAIEHIERSRLVYKREIEKLKKREKEIMEELSKLKAPLS

SEQ ID NO: 544 - protein, 259 aa, Thermococcus kodakaraensis KOD1
  misc_feature (414542)..(414542): n is a or c or g or t.
  misc_feature (786890)..(786890): n is a or c or g or t.
  misc_feature (786907)..(786907): n is a or c or g or t.
  misc_feature (786944)..(786946): n is a or c or g or t.
  misc_feature (839139)..(839139): n is a or c or g or t.
  misc_feature (1128488)..(1128488): n is a or c or g or t.
  misc_feature (1128499)..(1128499): n is a or c or g or t.
  misc_feature (1128505)..(1128506): n is a or c or g or t.
  misc_feature (1128517)..(1128518): n is a or c or g or t.
  misc_feature (1128539)..(1128540): n is a or c or g or t.
  misc_feature (1561400)..(1561400): n is a or c or g or t.
  misc_feature (1561477)..(1561477): n is a or c or g or t.
  misc_feature (1561545)..(1561545): n is a or c or g or t.
  misc_feature (1767941)..(1767941): n is a or c or g or t.
MRILVTNDDGIYSNGIRAAVKALSSLGEVYVVAPLFQRSASGRAMTLHRPIRARLVDVPGAKVAYGIDGTPTDSVIFALARFGDFDLAVSGINLGENLSTEITVSGTASAAIEAATHEVPSIAISLEVDWKKTLGEGEGIDFSVASHFLKRITRAVLEKGLPEGVDMLNVNVPSNATPETEIAITRLARKRYCPTIEERVDPRGHPYYWIVGQKREEFEPGTDAYALKIERKVSVTPINIDMTARVNFEEVRKVLFAQP

SEQ ID NO: 545 - protein, 475 aa, Thermococcus kodakaraensis KOD1
  misc_feature (414542)..(414542): n is a or c or g or t.
  misc_feature (786890)..(786890): n is a or c or g or t.
  misc_feature (786907)..(786907): n is a or c or g or t.
  misc_feature (786944)..(786946): n is a or c or g or t.
  misc_feature (839139)..(839139): n is a or c or g or t.
  misc_feature (1128488)..(1128488): n is a or c or g or t.
  misc_feature (1128499)..(1128499): n is a or c or g or t.
  misc_feature (1128505)..(1128506): n is a or c or g or t.
  misc_feature (1128517)..(1128518): n is a or c or g or t.
  misc_feature (1128539)..(1128540): n is a or c or g or t.
  misc_feature (1561400)..(1561400): n is a or c or g or t.
  misc_feature (1561477)..(1561477): n is a or c or g or t.
  misc_feature (1561545)..(1561545): n is a or c or g or t.
  misc_feature (1767941)..(1767941): n is a or c or g or t.
MWYHPKTFFIGRPFSVEVENMLDIKLIRENPEIVKRDLIKRGETEKLKWIDEILELDKKWRENLKKINQLRKERNQLAVQIGKRKKAGEPIDDLLKRSNEIVKQIEELEKENEELKKKIDYYLWRLPNITHESVPVGESDEDNVPIRFWGKAKVWEGFLETFKEQSLGKMEYEVLSWRPRLHVDMLELLRGADLERAAKVSGARFYYLLNELVILDLALIRFALDKLIEKGFTPVIPPYMVRRFVEEGATTFDDFEDVIYKVEGEDLYLIPTAEHPLAGMHANEILDGKDLPLLYVGVSPCFRKEAGTAGKDTKGIFRVHQFHKVEQFVYSRPEESWEWHERIIANAEEIFQALEIPYRVVNICTGDLGYVAAKKYDIEAWMAGQGKFREVVSASNCTDWQARRLNIRFRDKTHEKPRFVHTLNSTAIATSRAIVAILENHQTEEGVVKLPKALWKYTGFKEILPAHMKEKCCQD

SEQ ID NO: 546 - protein, 328 aa, Thermococcus kodakaraensis KOD1
  misc_feature (414542)..(414542): n is a or c or g or t.
  misc_feature (786890)..(786890): n is a or c or g or t.
  misc_feature (786907)..(786907): n is a or c or g or t.
  misc_feature (786944)..(786946): n is a or c or g or t.
  misc_feature (839139)..(839139): n is a or c or g or t.
  misc_feature (1128488)..(1128488): n is a or c or g or t.
  misc_feature (1128499)..(1128499): n is a or c or g or t.
  misc_feature (1128505)..(1128506): n is a or c or g or t.
  misc_feature (1128517)..(1128518): n is a or c or g or t.
  misc_feature (1128539)..(1128540): n is a or c or g or t.
  misc_feature (1561400)..(1561400): n is a or c or g or t.
  misc_feature (1561477)..(1561477): n is a or c or g or t.
  misc_feature (1561545)..(1561545): n is a or c or g or t.
  misc_feature (1767941)..(1767941): n is a or c or g or t.
MSEALVVENLVKKYGDFEAVKGVSFKVKRGEIFAFLGPNGAGKTTTVHVLTTLLRPTSGRAIVAGHDVVEEPMEVRKRIGIVFQDPSLDRELTAWENMYIHGRIYGLKGSELREKIERLLKFVELWEFKDKPVKTFSGGMQRRLEIARSLLHEPEVLFLDEPTIGLDPQTRAHIWDYIRAMKEEHNMTIFLTTHYMDEAEMLADRIAIIDHGKIIAEGTAEKLKKLVGNDVIYFKLDAPEELKCLESGFIRGCKVLPDGRVALEVENAAEALPGLFELANERGIRILEVTYHRPTLNDVFLHLTGREIRDEGPENPMASFVRMRMRRR

SEQ ID NO: 547 - protein, 737 aa, Thermococcus kodakaraensis KOD1
  misc_feature (414542)..(414542): n is a or c or g or t.
  misc_feature (786890)..(786890): n is a or c or g or t.
  misc_feature (786907)..(786907): n is a or c or g or t.
  misc_feature (786944)..(786946): n is a or c or g or t.
  misc_feature (839139)..(839139): n is a or c or g or t.
  misc_feature (1128488)..(1128488): n is a or c or g or t.
  misc_feature (1128499)..(1128499): n is a or c or g or t.
  misc_feature (1128505)..(1128506): n is a or c or g or t.
  misc_feature (1128517)..(1128518): n is a or c or g or t.
  misc_feature (1128539)..(1128540): n is a or c or g or t.
  misc_feature (1561400)..(1561400): n is a or c or g or t.
  misc_feature (1561477)..(1561477): n is a or c or g or t.
  misc_feature (1561545)..(1561545): n is a or c or g or t.
  misc_feature (1767941)..(1767941): n is a or c or g or t.
VLNRGFNKSLFEHSWWLQSRVHEDGERMPWTQDIVRMLSREDIIEYLAEVLDKMGFRNHEKVADRSRWGVDIVAVRDDPLAGTEKLLIKVHTGSLASSKEVSVFGDLIDRYKADRGILISPLGFTKDARTVVAKEYRARIILWDAEKLAKTFSNYGIKVPEIKPQESEEKAEETPLTKFELDAPLLFEFSPEGVLKAIAREASRKYPIKPEDIKISFLKVYLSTAYIISWSAREGESEEKGKALVFSEEKIVSQAQSDPKLATPVKKALLNDRSEIYATEREIESSLSPSESVLVLKNTLSEKLGVPESNITIHERKKVYVPTKAEAELKVGANRARAVVDPNTNEVQLDVSELPDEYFLQTVTEILMDRIGEEPLESKIERNNGKVKVFGKTERFNFEFKFNGYTGAVVYEESLITDEALRELISNKYPAGTILDIEKGKKVAIVEVGLKEGIVILEVNLENGELKEITTLPSPEEAFKKAKPIIENNFPVKNLKLVSSRVLEHKFLEITMEGEGGKATAKIDGDTKDVLDYFVEITPQKAEELVLAKYPGYRTLGVSESDEVYTVEIENDKHKVTVKATKDGKILEEADRVLKKEVAEKIAEEKVKDIDETAEIKGIRLDGDWVVEFQGGSKVGKLVLDRKTGEVKEENVRFTELALEEAFHEHLKKLYGETELKTERLTHYKEEGYIHIKVAGKNSLYYARIDTKTGKILSEDRAPIKGITAKLKQLQLESKYK

SEQ ID NO: 548 - protein, 288 aa, Thermococcus kodakaraensis KOD1
  misc_feature (414542)..(414542): n is a or c or g or t.
  misc_feature (786890)..(786890): n is a or c or g or t.
  misc_feature (786907)..(786907): n is a or c or g or t.
  misc_feature (786944)..(786946): n is a or c or g or t.
  misc_feature (839139)..(839139): n is a or c or g or t.
  misc_feature (1128488)..(1128488): n is a or c or g or t.
  misc_feature (1128499)..(1128499): n is a or c or g or t.
  misc_feature (1128505)..(1128506): n is a or c or g or t.
  misc_feature (1128517)..(1128518): n is a or c or g or t.
  misc_feature (1128539)..(1128540): n is a or c or g or t.
  misc_feature (1561400)..(1561400): n is a or c or g or t.
  misc_feature (1561477)..(1561477): n is a or c or g or t.
  misc_feature (1561545)..(1561545): n is a or c or g or t.
  misc_feature (1767941)..(1767941): n is a or c or g or t.
MMLRNIGLDSSARFAFQSHAHTDHFVSGEVIFATKATKYLSHLRKGGFYREVEFAKTFYIGDFKAKLYPAGHMLGSAGIKLWLENGTLFYTGDTKWFKLRTAEKSRFPKADVLIIEATFGVPSFTFPSPREAEKKLVAFVEEALDRGKRPTLYVNQMGKAQEVMKILDVHGITVRPSREMLKVARVYSKFGVKFGNITHEGDVVLRSYRSPKVENSLSPWELTVSGFGRLKLSNHADFWELMKIIEKVKPERIFTVYGFSREFSRILTGLGYEAHPIDKDSDIYGLLF

SEQ ID NO: 549 - protein, 105 aa, Thermococcus kodakaraensis KOD1
  misc_feature (414542)..(414542): n is a or c or g or t.
  misc_feature (786890)..(786890): n is a or c or g or t.
  misc_feature (786907)..(786907): n is a or c or g or t.
  misc_feature (786944)..(786946): n is a or c or g or t.
  misc_feature (839139)..(839139): n is a or c or g or t.
  misc_feature (1128488)..(1128488): n is a or c or g or t.
  misc_feature (1128499)..(1128499): n is a or c or g or t.
  misc_feature (1128505)..(1128506): n is a or c or g or t.
  misc_feature (1128517)..(1128518): n is a or c or g or t.
  misc_feature (1128539)..(1128540): n is a or c or g or t.
  misc_feature (1561400)..(1561400): n is a or c or g or t.
  misc_feature (1561477)..(1561477): n is a or c or g or t.
  misc_feature (1561545)..(1561545): n is a or c or g or t.
  misc_feature (1767941)..(1767941): n is a or c or g or t.
VLFSYFEHGGGGMQRLRKKPKWVTGLRPRLETLFSERAIGEGLLVGRGTIRGDMVEVTQLKFSGGRVKKPIVEVEGNELRFIYPIKNGESLEGIYYSLMGFLSRV

SEQ ID NO: 550 - protein, 304 aa, Thermococcus kodakaraensis KOD1
  misc_feature (414542)..(414542): n is a or c or g or t.
  misc_feature (786890)..(786890): n is a or c or g or t.
  misc_feature (786907)..(786907): n is a or c or g or t.
  misc_feature (786944)..(786946): n is a or c or g or t.
  misc_feature (839139)..(839139): n is a or c or g or t.
  misc_feature (1128488)..(1128488): n is a or c or g or t.
  misc_feature (1128499)..(1128499): n is a or c or g or t.
  misc_feature (1128505)..(1128506): n is a or c or g or t.
  misc_feature (1128517)..(1128518): n is a or c or g or t.
  misc_feature (1128539)..(1128540): n is a or c or g or t.
  misc_feature (1561400)..(1561400): n is a or c or g or t.
  misc_feature (1561477)..(1561477): n is a or c or g or t.
  misc_feature (1561545)..(1561545): n is a or c or g or t.
  misc_feature (1767941)..(1767941): n is a or c or g or t.
MMGCSQRWQSSRLRWQPSRFYCTRCILKWCGTMKFAGISLNEPRIMGVINISPESFYKGSVRNDEEKLIETALRMVEEGASFIDIGAKSTAPYLETQIPVEEEIRRAVWAVKTIRNHVDVPISIDTTNAKVAEEAIKAGADIINDVTGLKGDPEMPKVAADYGTPVVLCAHGEVRNLSDPVRTVMDFLQESLRIAERHGIEDVAVDPAIGFLRPEWPPWYVWDSKVIANLNLLKSLGKPILVGVSRKSFIGAITGRQDPSERLAGSLSATAIAVLKGADIIRTHDVKETIDTVKVASFIRKFSP

SEQ ID NO: 551 - protein, 271 aa, Thermococcus kodakaraensis KOD1
  misc_feature (414542)..(414542): n is a or c or g or t.
  misc_feature (786890)..(786890): n is a or c or g or t.
  misc_feature (786907)..(786907): n is a or c or g or t.
  misc_feature (786944)..(786946): n is a or c or g or t.
  misc_feature (839139)..(839139): n is a or c or g or t.
  misc_feature (1128488)..(1128488): n is a or c or g or t.
  misc_feature (1128499)..(1128499): n is a or c or g or t.
  misc_feature (1128505)..(1128506): n is a or c or g or t.
  misc_feature (1128517)..(1128518): n is a or c or g or t.
  misc_feature (1128539)..(1128540): n is a or c or g or t.
  misc_feature (1561400)..(1561400): n is a or c or g or t.
  misc_feature (1561477)..(1561477): n is a or c or g or t.
  misc_feature (1561545)..(1561545): n is a or c or g or t.
  misc_feature (1767941)..(1767941): n is a or c or g or t.
VIPVEIGVTIYPHFITKDKSLASILADIKIKDYDFVSLFPHTLGLIKNGVVVEKKLRSLETTLKGVGINYIIRMPTSMNLRDHVYHSRHFRVARAVADVAIKLGAKVIVMQSGKTGRLDLEIEALQSLADMLKPFDIKIALENTFSVKDTLYVVENVNRDNVGFALDVAHAFLSAQGNEEKLLDDVKLGTDKTIILMVHDNFGKLFPQVEPEDALAYGVGDLHLLPGEGKIPFGKVLKLFGDVPILLKVKDPEKFPKIPTKQGLIDLLLSL

SEQ ID NO: 552 - protein, 295 aa, Thermococcus kodakaraensis KOD1
  misc_feature (414542)..(414542): n is a or c or g or t.
  misc_feature (786890)..(786890): n is a or c or g or t.
  misc_feature (786907)..(786907): n is a or c or g or t.
  misc_feature (786944)..(786946): n is a or c or g or t.
  misc_feature (839139)..(839139): n is a or c or g or t.
  misc_feature (1128488)..(1128488): n is a or c or g or t.
  misc_feature (1128499)..(1128499): n is a or c or g or t.
  misc_feature (1128505)..(1128506): n is a or c or g or t.
  misc_feature (1128517)..(1128518): n is a or c or g or t.
  misc_feature (1128539)..(1128540): n is a or c or g or t.
  misc_feature (1561400)..(1561400): n is a or c or g or t.
  misc_feature (1561477)..(1561477): n is a or c or g or t.
  misc_feature (1561545)..(1561545): n is a or c or g or t.
  misc_feature (1767941)..(1767941): n is a or c or g or t.
VDEREALIKAGEIARQVKKEVVDLIKPGAKLYDIAEFVERRIVELGGKPAFPCNLSINEIAAHYTPYKGDGTVLKEGDYLKLDIGVHVDGYIADTAVTFRVGMEEDELMEAAREALENAIATVRAGVMIRDVARAIEETIRGKGFNPIVNLSGHKVERYKLHAGVSVPNVYREADTYVLQEGDVFAIEPFATTGAGQVIEVPPALIFMYLRDRPVRMLQARRLLMHIKKNYKTLPFAYRWLQDFLPEGQLKLALAQLEKAGAIYAYPILREVRGGMVAQFEHTVIVEKEGAYITT

SEQ ID NO: 553 - protein, 83 aa, Thermococcus kodakaraensis KOD1
  misc_feature (414542)..(414542): n is a or c or g or t.
  misc_feature (786890)..(786890): n is a or c or g or t.
  misc_feature (786907)..(786907): n is a or c or g or t.
  misc_feature (786944)..(786946): n is a or c or g or t.
  misc_feature (839139)..(839139): n is a or c or g or t.
  misc_feature (1128488)..(1128488): n is a or c or g or t.
  misc_feature (1128499)..(1128499): n is a or c or g or t.
  misc_feature (1128505)..(1128506): n is a or c or g or t.
  misc_feature (1128517)..(1128518): n is a or c or g or t.
  misc_feature (1128539)..(1128540): n is a or c or g or t.
  misc_feature (1561400)..(1561400): n is a or c or g or t.
  misc_feature (1561477)..(1561477): n is a or c or g or t.
  misc_feature (1561545)..(1561545): n is a or c or g or t.
  misc_feature (1767941)..(1767941): n is a or c or g or t.
MKALSKRVQIKRSFQKSKTILEKVRDPKDIPFLDVVYNAKADVLITYDRKHLLRIRNKEKKFKLGRHEFYILTPKEFIEFYKK

SEQ ID NO: 554 - protein, 391 aa, Thermococcus kodakaraensis KOD1
  misc_feature (414542)..(414542): n is a or c or g or t.
  misc_feature (786890)..(786890): n is a or c or g or t.
  misc_feature (786907)..(786907): n is a or c or g or t.
  misc_feature (786944)..(786946): n is a or c or g or t.
  misc_feature (839139)..(839139): n is a or c or g or t.
  misc_feature (1128488)..(1128488): n is a or c or g or t.
  misc_feature (1128499)..(1128499): n is a or c or g or t.
  misc_feature (1128505)..(1128506): n is a or c or g or t.
  misc_feature (1128517)..(1128518): n is a or c or g or t.
  misc_feature (1128539)..(1128540): n is a or c or g or t.
  misc_feature (1561400)..(1561400): n is a or c or g or t.
  misc_feature (1561477)..(1561477): n is a or c or g or t.
  misc_feature (1561545)..(1561545): n is a or c or g or t.
  misc_feature (1767941)..(1767941): n is a or c or g or t.
MVGIQVQEVMTDNFQKIDINAPLSEAIGIFEKEDPDLILVFDGNLYKGVLTQDLIIRSHLKWDPTKAKVRDVYKPAPVIKPDEDLSKAAKLMIEVDLRSLPVGESKAEIIGVVNDMAVLERVAQEKFGKGKVEEYMTKDVITLKPSDTVAKALAVMRDHAISRIPIVNDEGKLEGLVTLHDLIIRFIKPRFRAQAGEVAGEKIPPFSMPLRDVMIRGVITILPDATVREAVATMKDNDIDGLVVVNEDNKVVGILTVKDLLLPISKMTEKEARFYLQLGGDASILSDFTRERIIQDIKRFVDGYEDLLGQEGIIYLYIRRFPEKLRGVHLYQARMRVVTDRGTFVATGETWGAIQAVHDALRAIERQLLQKAELEKDVRYAKRFIEKLGLA

SEQ ID NO: 555 - protein, 293 aa, Thermococcus kodakaraensis KOD1
  misc_feature (414542)..(414542): n is a or c or g or t.
  misc_feature (786890)..(786890): n is a or c or g or t.
  misc_feature (786907)..(786907): n is a or c or g or t.
  misc_feature (786944)..(786946): n is a or c or g or t.
  misc_feature (839139)..(839139): n is a or c or g or t.
  misc_feature (1128488)..(1128488): n is a or c or g or t.
  misc_feature (1128499)..(1128499): n is a or c or g or t.
  misc_feature (1128505)..(1128506): n is a or c or g or t.
  misc_feature (1128517)..(1128518): n is a or c or g or t.
  misc_feature (1128539)..(1128540): n is a or c or g or t.
  misc_feature (1561400)..(1561400): n is a or c or g or t.
  misc_feature (1561477)..(1561477): n is a or c or g or t.
  misc_feature (1561545)..(1561545): n is a or c or g or t.
  misc_feature (1767941)..(1767941): n is a or c or g or t.
MGAFEAFSRTITLITRAKKLYILALLLALLAAPFQAYLAPADFSVLENQTSTTQGNVIMEEHGLSEEQVSDIMGSMENLGKLFVILLLLGSLFQYGIVKGALVYGEGSEVSLVELIRESILHFPGVLLINLFYGFIGLVFIVVSMIPIGIGLLTLPAGGILVLIGIGLIILTAAMLTTMSVLAVPLYADREDLGAAFEAFGAVLKNLPSSVGFGFLLWIGVLVIGLISGTVSLVSLAFPENIAGYVSAFLGAPFEAVVYELLWIGGVEFYRELKRKEELKKFEEEMKELGIEL

SEQ ID NO: 556 - protein, 169 aa, Thermococcus kodakaraensis KOD1
  misc_feature (414542)..(414542): n is a or c or g or t.
  misc_feature (786890)..(786890): n is a or c or g or t.
  misc_feature (786907)..(786907): n is a or c or g or t.
  misc_feature (786944)..(786946): n is a or c or g or t.
  misc_feature (839139)..(839139): n is a or c or g or t.
  misc_feature (1128488)..(1128488): n is a or c or g or t.
  misc_feature (1128499)..(1128499): n is a or c or g or t.
  misc_feature (1128505)..(1128506): n is a or c or g or t.
  misc_feature (1128517)..(1128518): n is a or c or g or t.
  misc_feature (1128539)..(1128540): n is a or c or g or t.
  misc_feature (1561400)..(1561400): n is a or c or g or t.
  misc_feature (1561477)..(1561477): n is a or c or g or t.
  misc_feature (1561545)..(1561545): n is a or c or g or t.
  misc_feature (1767941)..(1767941): n is a or c or g or t.
VRGMAGTVSRIVHFEDEEKFIDDIDFALERFSYLASRYGHNPIKGVVLWDYIAIEDNEDVKVFRVGEFPFVEGMLKLDLEKIRTLEGYFDEMESKWDELTVEEINAYVEMMNEALGERRVFYDAYSLGLDRNTAYIIIDIHALHYLAGILEGEEKELLDEAAEVLLRYI

SEQ ID NO: 557 - protein, 89 aa, Thermococcus kodakaraensis KOD1
  misc_feature (414542)..(414542): n is a or c or g or t.
  misc_feature (786890)..(786890): n is a or c or g or t.
  misc_feature (786907)..(786907): n is a or c or g or t.
  misc_feature (786944)..(786946): n is a or c or g or t.
  misc_feature (839139)..(839139): n is a or c or g or t.
  misc_feature (1128488)..(1128488): n is a or c or g or t.
  misc_feature (1128499)..(1128499): n is a or c or g or t.
  misc_feature (1128505)..(1128506): n is a or c or g or t.
  misc_feature (1128517)..(1128518): n is a or c or g or t.
  misc_feature (1128539)..(1128540): n is a or c or g or t.
  misc_feature (1561400)..(1561400): n is a or c or g or t.
  misc_feature (1561477)..(1561477): n is a or c or g or t.
  misc_feature (1561545)..(1561545): n is a or c or g or t.
  misc_feature (1767941)..(1767941): n is a or c or g or t.
VVAMLFKKRGVFTEEDAKKVVEWMGAHPEEKELIVMAEVVENTAKRRLWDFARAVKLMADMTGEEREVRVEILEGFVSEKVKGIDVEEL

SEQ ID NO: 558 - protein, 253 aa, Thermococcus kodakaraensis KOD1
  misc_feature (414542)..(414542): n is a or c or g or t.
  misc_feature (786890)..(786890): n is a or c or g or t.
  misc_feature (786907)..(786907): n is a or c or g or t.
  misc_feature (786944)..(786946): n is a or c or g or t.
  misc_feature (839139)..(839139): n is a or c or g or t.
  misc_feature (1128488)..(1128488): n is a or c or g or t.
  misc_feature (1128499)..(1128499): n is a or c or g or t.
  misc_feature (1128505)..(1128506): n is a or c or g or t.
  misc_feature (1128517)..(1128518): n is a or c or g or t.
  misc_feature (1128539)..(1128540): n is a or c or g or t.
  misc_feature (1561400)..(1561400): n is a or c or g or t.
  misc_feature (1561477)..(1561477): n is a or c or g or t.
  misc_feature (1561545)..(1561545): n is a or c or g or t.
  misc_feature (1767941)..(1767941): n is a or c or g or t.
MRVIMAEVFNSWQGEGGSVEGSAFGRRQIFVRFAGCDLHCAWCDSREYIDASRVSSWRYEVKPFTGRFEYRPNPASVEEVVEAVLRLDTGDIHSISYTGGEPTLQVKPLMALMERMKELGFDNFLETHGGLPELIRDVAPLTDYASVDIKDESAKATEDWKGLVLREVESIRILKEAGAKTYAKLVVTSETKVENVQWYASLLKGLAPLVIQPREPIEVSQAKLMEFYREAARIMGRKNVGLSFQVHKYLNVL

SEQ ID NO: 559 - protein, 182 aa, Thermococcus kodakaraensis KOD1
  misc_feature (414542)..(414542): n is a or c or g or t.
  misc_feature (786890)..(786890): n is a or c or g or t.
  misc_feature (786907)..(786907): n is a or c or g or t.
  misc_feature (786944)..(786946): n is a or c or g or t.
  misc_feature (839139)..(839139): n is a or c or g or t.
  misc_feature (1128488)..(1128488): n is a or c or g or t.
  misc_feature (1128499)..(1128499): n is a or c or g or t.
  misc_feature (1128505)..(1128506): n is a or c or g or t.
  misc_feature (1128517)..(1128518): n is a or c or g or t.
  misc_feature (1128539)..(1128540): n is a or c or g or t.
  misc_feature (1561400)..(1561400): n is a or c or g or t.
  misc_feature (1561477)..(1561477): n is a or c or g or t.
  misc_feature (1561545)..(1561545): n is a or c or g or t.
  misc_feature (1767941)..(1767941): n is a or c or g or t.
MKRPLPLLLALLVATAGCMSEGGVKMEKTLEVGSVFHDGEFIPKEYTCEGDDTNPPIYIGNIPAEAKSLVIIVDDPDAPAGTFTHWIAWNIPPVGEIPSWVPRKPETDEPFHIVQGKNDFGRIGYNGPCPPRGHGVHHYHFKVYALDTELKLEPGSSRKELEKAMEGHVIAWGEVVGLYERK

SEQ ID NO: 560 - protein, 433 aa, Thermococcus kodakaraensis KOD1
  misc_feature (414542)..(414542): n is a or c or g or t.
  misc_feature (786890)..(786890): n is a or c or g or t.
  misc_feature (786907)..(786907): n is a or c or g or t.
  misc_feature (786944)..(786946): n is a or c or g or t.
  misc_feature (839139)..(839139): n is a or c or g or t.
  misc_feature (1128488)..(1128488): n is a or c or g or t.
  misc_feature (1128499)..(1128499): n is a or c or g or t.
  misc_feature (1128505)..(1128506): n is a or c or g or t.
  misc_feature (1128517)..(1128518): n is a or c or g or t.
  misc_feature (1128539)..(1128540): n is a or c or g or t.
  misc_feature (1561400)..(1561400): n is a or c or g or t.
  misc_feature (1561477)..(1561477): n is a or c or g or t.
  misc_feature (1561545)..(1561545): n is a or c or g or t.
  misc_feature (1767941)..(1767941): n is a or c or g or t.
MENVEVVEKPVLKVGIEEKVEPAKAFVFGLQHVLAMFGATVTVPLVVGGAVGLSGDQIAMMIQAVLLAMGIATLLQTIIGTRYPIVQGSSFAFIPGLISIGSTIGMAAVQGALIVGGLIEGLVGWLGIIGKVRKLFTPLVTGVTITLIGFSLANVALMNFFNAYADPNGTNVWKAVLVATVTFLTTVFVALKAKGSLKAMPVVVGAAVGYLISIPLGLTNFSLIESLPMLSIPKPFPWGAPVFDTAAIAILLFAFMVSIIESVGDYHAIATVTGAEITEKHIGRGIGTEGLACSIAGFLGACGTTSYSENIGVVALTKVGSRHVVQVGAIILIFLSLFPKFAGLLASMPAPVLGGLTLALYGMISVTGLRLIKEKVEFTDRNVLILAAALIAGLGAPQLPESLFHALPRILSSILESGMAVGAITAIILERIL

SEQ ID NO: 561 - protein, 35 aa, Thermococcus kodakaraensis KOD1
  misc_feature (414542)..(414542): n is a or c or g or t.
  misc_feature (786890)..(786890): n is a or c or g or t.
  misc_feature (786907)..(786907): n is a or c or g or t.
  misc_feature (786944)..(786946): n is a or c or g or t.
  misc_feature (839139)..(839139): n is a or c or g or t.
  misc_feature (1128488)..(1128488): n is a or c or g or t.
  misc_feature (1128499)..(1128499): n is a or c or g or t.
  misc_feature (1128505)..(1128506): n is a or c or g or t.
  misc_feature (1128517)..(1128518): n is a or c or g or t.
  misc_feature (1128539)..(1128540): n is a or c or g or t.
  misc_feature (1561400)..(1561400): n is a or c or g or t.
  misc_feature (1561477)..(1561477): n is a or c or g or t.
  misc_feature (1561545)..(1561545): n is a or c or g or t.
  misc_feature (1767941)..(1767941): n is a or c or g or t.
MPNAIARPTREAMAAKYQFSIPRVKVTLNPLTVIW

SEQ ID NO: 562 - protein, 784 aa, Thermococcus kodakaraensis KOD1
  misc_feature (414542)..(414542): n is a or c or g or t.
  misc_feature (786890)..(786890): n is a or c or g or t.
  misc_feature (786907)..(786907): n is a or c or g or t.
  misc_feature (786944)..(786946): n is a or c or g or t.
  misc_feature (839139)..(839139): n is a or c or g or t.
  misc_feature (1128488)..(1128488): n is a or c or g or t.
  misc_feature (1128499)..(1128499): n is a or c or g or t.
  misc_feature (1128505)..(1128506): n is a or c or g or t.
  misc_feature (1128517)..(1128518): n is a or c or g or t.
  misc_feature (1128539)..(1128540): n is a or c or g or t.
  misc_feature (1561400)..(1561400): n is a or c or g or t.
  misc_feature (1561477)..(1561477): n is a or c or g or t.
  misc_feature (1561545)..(1561545): n is a or c or g or t.
  misc_feature (1767941)..(1767941): n is a or c or g or t.
MPDPQLCQRRVPTVDRGNTCQFSPRVSPFEGLLQRYLEVLDVYIRHLDVKPHGKELVYYPLQLFELVPFKPAFKFMNSLLGMNEEISRYPDVFSPSIPFVELYPYEALLSFVLTYVVLHTHPLSKLAGEVFKGWVVVGPVVRMVYKEVQERVRLALRQALDEMLHEAGKEWDGEITFDDTPSIELGDFGTAVSFQLARVFRKAPKFIAEELVGRVKEKLPEEIRDVKAVNGYINFYLDYEFFGKALVREILEKGEKYGESELGSGKKVIVEHTSVNPTKPLHMGHARNAVLGDTMARIMRKLGYTVEVQNYIDDLGVQFAQVLWGYLNLKEEFERIEAELREKGLKEDFIDHVMGLLYVEVNKKLEENPEVDKEVRELMKKLEEGDNEIAEVGRKLAERVVRAQMLTTYRMGITYDLLSWESDIMKSGIFGEAYGLIEKNENFFWATEGKYKGAFVMDLRKLFPDMKNPFLVLRRSDGTATYTGKDIAYHLWKFGKVKADMLYKLWDRVEDHETWTTAPDGKEMPGKFGRADIVINVIGAEQKHPQMAIKYALQLLGFEDAAENFHHLAYEHVVRPEGSFSGRKGTWVGFTVDEVLNEAVQRARELVEQKNPNLSDEEKDEIAEAVGVGAVRYNLVKYSPDKVITFRWEDVLNFEGDSAPYLQYAHARCASILRKAEESGVETDWNALLEKADFSKLTNREKELIKFLAKFPEVLESAGRDVKPHLVPAYLNELASLFNRFYMDHPVLKAEEGIREERLLLVLAVKQVLRNGLDVLGIKAPERM

SEQ ID NO: 563 - protein, 85 aa, Thermococcus kodakaraensis KOD1
  misc_feature (414542)..(414542): n is a or c or g or t.
  misc_feature (786890)..(786890): n is a or c or g or t.
  misc_feature (786907)..(786907): n is a or c or g or t.
  misc_feature (786944)..(786946): n is a or c or g or t.
  misc_feature (839139)..(839139): n is a or c or g or t.
  misc_feature (1128488)..(1128488): n is a or c or g or t.
  misc_feature (1128499)..(1128499): n is a or c or g or t.
  misc_feature (1128505)..(1128506): n is a or c or g or t.
  misc_feature (1128517)..(1128518): n is a or c or g or t.
  misc_feature (1128539)..(1128540): n is a or c or g or t.
  misc_feature (1561400)..(1561400): n is a or c or g or t.
  misc_feature (1561477)..(1561477): n is a or c or g or t.
  misc_feature (1561545)..(1561545): n is a or c or g or t.
  misc_feature (1767941)..(1767941): n is a or c or g or t.
VEVKARVEIVWHYGDDAKARAIAEAIQVDNESMPEELKKSLNVQTRWVDGDVITKVKYSGEIDTLIKALDDIVFSVKIAEDSVEV

SEQ ID NO: 564 - protein, 200 aa, Thermococcus kodakaraensis KOD1
  misc_feature (414542)..(414542): n is a or c or g or t.
  misc_feature (786890)..(786890): n is a or c or g or t.
  misc_feature (786907)..(786907): n is a or c or g or t.
  misc_feature (786944)..(786946): n is a or c or g or t.
  misc_feature (839139)..(839139): n is a or c or g or t.
  misc_feature (1128488)..(1128488): n is a or c or g or t.
  misc_feature (1128499)..(1128499): n is a or c or g or t.
  misc_feature (1128505)..(1128506): n is a or c or g or t.
  misc_feature (1128517)..(1128518): n is a or c or g or t.
  misc_feature (1128539)..(1128540): n is a or c or g or t.
  misc_feature (1561400)..(1561400): n is a or c or g or t.
  misc_feature (1561477)..(1561477): n is a or c or g or t.
  misc_feature (1561545)..(1561545): n is a or c or g or t.
  misc_feature (1767941)..(1767941): n is a or c or g or t.
MARGNPRKRAAAAKDKWKMKEWYIVYAPDFFGSKEIGLTPADDPEKVIGRVIETTLKDLTGDFTKGHVKLYFQVYDVKGQNAYTKFKGHTLARSYIRSLVRRRTTRVDGIFNITTKDGYKLRVMGMVIAYRRIQTSQERAIRKIIQDIIYKKAEELNFADFVLQSVNGQIASEIAKEARKIYPIKRAEVRKIKVLAEPSA

SEQ ID NO: 565 - protein, 88 aa, Thermococcus kodakaraensis KOD1
  misc_feature (414542)..(414542): n is a or c or g or t.
  misc_feature (786890)..(786890): n is a or c or g or t.
  misc_feature (786907)..(786907): n is a or c or g or t.
  misc_feature (786944)..(786946): n is a or c or g or t.
  misc_feature (839139)..(839139): n is a or c or g or t.
  misc_feature (1128488)..(1128488): n is a or c or g or t.
  misc_feature (1128499)..(1128499): n is a or c or g or t.
  misc_feature (1128505)..(1128506): n is a or c or g or t.
  misc_feature (1128517)..(1128518): n is a or c or g or t.
  misc_feature (1128539)..(1128540): n is a or c or g or t.
  misc_feature (1561400)..(1561400): n is a or c or g or t.
  misc_feature (1561477)..(1561477): n is a or c or g or t.
  misc_feature (1561545)..(1561545): n is a or c or g or t.
  misc_feature (1767941)..(1767941): n is a or c or g or t.
MLGDRVMGSATKHIQAEIDERLYLMLKSISIRTGKPLKELLQEAIEKYVEIEEKELKQKAKNDPIWKIVGKGELEENASEDEEWGLTE

SEQ ID NO: 566 - protein, 490 aa, Thermococcus kodakaraensis KOD1
  misc_feature (414542)..(414542): n is a or c or g or t.
  misc_feature (786890)..(786890): n is a or c or g or t.
  misc_feature (786907)..(786907): n is a or c or g or t.
  misc_feature (786944)..(786946): n is a or c or g or t.
  misc_feature (839139)..(839139): n is a or c or g or t.
  misc_feature (1128488)..(1128488): n is a or c or g or t.
  misc_feature (1128499)..(1128499): n is a or c or g or t.
  misc_feature (1128505)..(1128506): n is a or c or g or t.
  misc_feature (1128517)..(1128518): n is a or c or g or t.
  misc_feature (1128539)..(1128540): n is a or c or g or t.
  misc_feature (1561400)..(1561400): n is a or c or g or t.
  misc_feature (1561477)..(1561477): n is a or c or g or t.
  misc_feature (1561545)..(1561545): n is a or c or g or t.
  misc_feature (1767941)..(1767941): n is a or c or g or t.
VMLMRILILGGGILGRLIAEALRGEFEVTIIEKDELRAQTLSEGGLNVVHGDFSYTATLLKAGIDKADLLVITTMDLETIKKTVYVVRSNSKNIPIVTVLPDGTTIESIKEDLKASFEADLNIDYAITPMDAIRDALLAVIHRIGEKKNLNLLLKKLRELRESADTLGIIMHDNPDPDSIASATALAAIAQTLGFKTKIFHGGEITHHENRAFINLLGIELTKVSRGSYEIKRMPFLALVDCQPNGNLTILEEADLERIKIVIDHHQVLQHLSELLPEDAFTDIRPEVNSASSILVEYLRGMNYPLTPALATALFYGIYVDTKKFSKLSPVDLKAIEFLAGKVDYEILDKIEHPDISTETAEILARAILNRRMYKNVVISNVGFIKNRDALAEAADFLLRLEGITTVLVFGIVEDYIEMSARTRDVRVNIGKVMKEAFGEIGSGGGHARAGGARIPLGLFKLAKDKNSLLRLAEEAITEKFLEALNIKEG

SEQ ID NO: 567 - protein, 150 aa, Thermococcus kodakaraensis KOD1
  misc_feature (414542)..(414542): n is a or c or g or t.
  misc_feature (786890)..(786890): n is a or c or g or t.
  misc_feature (786907)..(786907): n is a or c or g or t.
  misc_feature (786944)..(786946): n is a or c or g or t.
  misc_feature (839139)..(839139): n is a or c or g or t.
  misc_feature (1128488)..(1128488): n is a or c or g or t.
  misc_feature (1128499)..(1128499): n is a or c or g or t.
  misc_feature (1128505)..(1128506): n is a or c or g or t.
  misc_feature (1128517)..(1128518): n is a or c or g or t.
  misc_feature (1128539)..(1128540): n is a or c or g or t.
  misc_feature (1561400)..(1561400): n is a or c or g or t.
  misc_feature (1561477)..(1561477): n is a or c or g or t.
  misc_feature (1561545)..(1561545): n is a or c or g or t.
  misc_feature (1767941)..(1767941): n is a or c or g or t.
MATVYDVPGDLLVERVAKALKEVPEIKPPEWAPFVKTGRHKERLPEQEDWWYYRVASVFRKVYIDGPVGIERLRTWYGGRKNRGHAPEHFYKAGGSIIRKALQQLEAAGFVQKVPGEGRIVTPKGQSFLDKIATELKKELEEQIPELKKY

SEQ ID NO: 568 - protein, 110 aa, Thermococcus kodakaraensis KOD1
  misc_feature (414542)..(414542): n is a or c or g or t.
  misc_feature (786890)..(786890): n is a or c or g or t.
  misc_feature (786907)..(786907): n is a or c or g or t.
  misc_feature (786944)..(786946): n is a or c or g or t.
  misc_feature (839139)..(839139): n is a or c or g or t.
  misc_feature (1128488)..(1128488): n is a or c or g or t.
  misc_feature (1128499)..(1128499): n is a or c or g or t.
  misc_feature (1128505)..(1128506): n is a or c or g or t.
  misc_feature (1128517)..(1128518): n is a or c or g or t.
  misc_feature (1128539)..(1128540): n is a or c or g or t.
  misc_feature (1561400)..(1561400): n is a or c or g or t.
  misc_feature (1561477)..(1561477): n is a or c or g or t.
  misc_feature (1561545)..(1561545): n is a or c or g or t.
  misc_feature (1767941)..(1767941): n is a or c or g or t.
VVKGSHMDASLIIKILDEKGEVSLDTWKVVSIKENDDGTADILYKNKHVGSDGDPVFLWIYANIVEEDDDVRVLERITFKKEDILWLVRYVFPKVKVIRGLPNSPPAGGV

SEQ ID NO: 569 - protein, 300 aa, Thermococcus kodakaraensis KOD1
  misc_feature (414542)..(414542): n is a or c or g or t.
  misc_feature (786890)..(786890): n is a or c or g or t.
  misc_feature (786907)..(786907): n is a or c or g or t.
  misc_feature (786944)..(786946): n is a or c or g or t.
  misc_feature (839139)..(839139): n is a or c or g or t.
  misc_feature (1128488)..(1128488): n is a or c or g or t.
  misc_feature (1128499)..(1128499): n is a or c or g or t.
  misc_feature (1128505)..(1128506): n is a or c or g or t.
  misc_feature (1128517)..(1128518): n is a or c or g or t.
  misc_feature (1128539)..(1128540): n is a or c or g or t.
  misc_feature (1561400)..(1561400): n is a or c or g or t.
  misc_feature (1561477)..(1561477): n is a or c or g or t.
  misc_feature (1561545)..(1561545): n is a or c or g or t.
  misc_feature (1767941)..(1767941): n is a or c or g or t.
VSGKRVCPVCGSTEFIYDPSRGEIVCKVCGYVIEENVVDEGPEWRAFDPGQREKRARVGAPESILLHDKGLSTDIGIDRSLTGLMREKMYRLRKWQSRLRVSDAAERNLAFALSELDRLASNLSLPKHVEEEAARLYREAVRKGLIRGRSIEAVIAACVYAACRLLKVPRTLDEIADVSRVDKKEIGRSFRFIARHLNLTPKKLFVKPTDYVNKFADELGLSEKVRRRAIEILEEAYQRGLTSGKSPAGLVAAALYIASLMEGEKRTQREVAEVARVTEVTVRNRYKELVEKLNLKVPIA

SEQ ID NO: 570 - protein, 19 aa, Thermococcus kodakaraensis KOD1
  misc_feature (414542)..(414542): n is a or c or g or t.
  misc_feature (786890)..(786890): n is a or c or g or t.
  misc_feature (786907)..(786907): n is a or c or g or t.
  misc_feature (786944)..(786946): n is a or c or g or t.
  misc_feature (839139)..(839139): n is a or c or g or t.
  misc_feature (1128488)..(1128488): n is a or c or g or t.
  misc_feature (1128499)..(1128499): n is a or c or g or t.
  misc_feature (1128505)..(1128506): n is a or c or g or t.
  misc_feature (1128517)..(1128518): n is a or c or g or t.
  misc_feature (1128539)..(1128540): n is a or c or g or t.
  misc_feature (1561400)..(1561400): n is a or c or g or t.
  misc_feature (1561477)..(1561477): n is a or c or g or t.
  misc_feature (1561545)..(1561545): n is a or c or g or t.
  misc_feature (1767941)..(1767941): n is a or c or g or t.
VIYQPAAFKINYPDLFFGV

SEQ ID NO: 571 - protein, 77 aa, Thermococcus kodakaraensis KOD1
  misc_feature (414542)..(414542): n is a or c or g or t.
  misc_feature (786890)..(786890): n is a or c or g or t.
  misc_feature (786907)..(786907): n is a or c or g or t.
  misc_feature (786944)..(786946): n is a or c or g or t.
  misc_feature (839139)..(839139): n is a or c or g or t.
  misc_feature (1128488)..(1128488): n is a or c or g or t.
  misc_feature (1128499)..(1128499): n is a or c or g or t.
  misc_feature (1128505)..(1128506): n is a or c or g or t.
  misc_feature (1128517)..(1128518): n is a or c or g or t.
  misc_feature (1128539)..(1128540): n is a or c or g or t.
  misc_feature (1561400)..(1561400): n is a or c or g or t.
  misc_feature (1561477)..(1561477): n is a or c or g or t.
  misc_feature (1561545)..(1561545): n is a or c or g or t.
  misc_feature (1767941)..(1767941): n is a or c or g or t.
VADFGIFGLLEAFLLGLFLRESEREHETFVFVCSLMIYALDSGIDALILMFIIGALIFQDLRLTIIGTRTTPRTGSS

SEQ ID NO: 572 - protein, 1111 aa, Thermococcus kodakaraensis KOD1
  misc_feature (414542)..(414542): n is a or c or g or t.
  misc_feature (786890)..(786890): n is a or c or g or t.
  misc_feature (786907)..(786907): n is a or c or g or t.
  misc_feature (786944)..(786946): n is a or c or g or t.
  misc_feature (839139)..(839139): n is a or c or g or t.
  misc_feature (1128488)..(1128488): n is a or c or g or t.
  misc_feature (1128499)..(1128499): n is a or c or g or t.
  misc_feature (1128505)..(1128506): n is a or c or g or t.
  misc_feature (1128517)..(1128518): n is a or c or g or t.
  misc_feature (1128539)..(1128540): n is a or c or g or t.
  misc_feature (1561400)..(1561400): n is a or c or g or t.
  misc_feature (1561477)..(1561477): n is a or c or g or t.
  misc_feature (1561545)..(1561545): n is a or c or g or t.
  misc_feature (1767941)..(1767941): n is a or c or g or t.
MPNNGGVAMNRKVLSLLIVAVMVLSVVPAVLPGTLAAQNSPENHSVIRTLEDTLDKSLLLSSYKTGLRWVSPEEYSKITGIKFKPLTESAFKEALMNAPYYPGRETMAILPSTTGYKVSSGLSLPPMVFNNLYLPPIGDQGYIGSCNAWSSTYYVWTYMMNWWRDNPYPRTPDVIMNPSFTYNLINGGVDEGSNPWDAMTLISTVGAVPLDAFPLYTYPPKEAFTNGTLTNYTLYYEWYNEAISRWPNITQWMIAPRNSGNDYMWQASLYEYQVPGQWYIIDLSNDTQWQYLKQLLAAGYVVQYAYGVSFPFDAVNIFDSADEILQALDYWASYVATATNNETYYQWVNETYLSNETFIQGLKQTFMPYTETKAFYDFTKETGWWEVWSKYIEVKYGRTYSLIKGGHAVTIVGYDDRVKTADGYGVVRIANSWGQNWGDGGYFYMSYEDIRFGEESFQLAWVYVPKAANYQPKLMSVVGIAHPLRGEVIDGTYDPSTYMPVHEAGIPIVAEVNGTPVWGMNFLDFYHDYLPENVIPYLANNRTLLYRKLPQAHPFPNSPMAFDVSGLGEGLAYYMEETGDAPTYMTIYTNVSDIIPDNITGEIYNFTLLYQGPTGDYMLLASADITNGTIPDGGWKVIPIEVPIVQYGSLTLSNSSTINFGNFSVDVLSLVPLKGAYVSIDGKEYQLSEENGGYYFYGTEIDQKLKLPAGTYNYTVVVVYPNGKEVALPTRTVTIEGPTVDILSPVNTVYNTSTVEVVVNVTDPYATVTNVKAYLNGKPLNLTASGSLYVATLTNLTNGEYKLTVIANDTTGAYGIATRLFVVHTSAKVTEVIVNNETNVTIGVVGGSANVTAENNTIVANVSTSSGEFTVEIPVVNNIPAVVVNASSVDTVVAGGSNATLVAGWNATLTEVSTKTTPVDTKGNKKVYSVTITANVSIGENGVAVVALRDVNISKVYVIKNGQKVQLTTNKSNSLGYYYKEGNVIFVVLKEDPIIVAQGTKEVTVPSESGISITTLNFLGYRWYNIYHEEFNETYQKALELGVDNETLQKALELHKEAEKYYEEAIEITDGNILAYLSDPRLIRPLRLAYLNEMKAVKLLLEAIEELEAQG

SEQ ID NO: 573 - protein, 99 aa, Thermococcus kodakaraensis KOD1
  misc_feature (414542)..(414542): n is a or c or g or t.
  misc_feature (786890)..(786890): n is a or c or g or t.
  misc_feature (786907)..(786907): n is a or c or g or t.
  misc_feature (786944)..(786946): n is a or c or g or t.
  misc_feature (839139)..(839139): n is a or c or g or t.
  misc_feature (1128488)..(1128488): n is a or c or g or t.
  misc_feature (1128499)..(1128499): n is a or c or g or t.
  misc_feature (1128505)..(1128506): n is a or c or g or t.
  misc_feature (1128517)..(1128518): n is a or c or g or t.
  misc_feature (1128539)..(1128540): n is a or c or g or t.
  misc_feature (1561400)..(1561400): n is a or c or g or t.
  misc_feature (1561477)..(1561477): n is a or c or g or t.
  misc_feature (1561545)..(1561545): n is a or c or g or t.
  misc_feature (1767941)..(1767941): n is a or c or g or t.
MIYVKVYRVQGEVLLAACDEELLGKTFREGELKLEVKERFYRGELVEEDRLKELLDEATIANLTGERCVSKAIELGYVDPERVLRIQGVPHAQMARLFF

SEQ ID NO: 574 - protein, 393 aa, Thermococcus kodakaraensis KOD1
  misc_feature (414542)..(414542): n is a or c or g or t.
  misc_feature (786890)..(786890): n is a or c or g or t.
  misc_feature (786907)..(786907): n is a or c or g or t.
  misc_feature (786944)..(786946): n is a or c or g or t.
  misc_feature (839139)..(839139): n is a or c or g or t.
  misc_feature (1128488)..(1128488): n is a or c or g or t.
  misc_feature (1128499)..(1128499): n is a or c or g or t.
  misc_feature (1128505)..(1128506): n is a or c or g or t.
  misc_feature (1128517)..(1128518): n is a or c or g or t.
  misc_feature (1128539)..(1128540): n is a or c or g or t.
  misc_feature (1561400)..(1561400): n is a or c or g or t.
  misc_feature (1561477)..(1561477): n is a or c or g or t.
  misc_feature (1561545)..(1561545): n is a or c or g or t.
  misc_feature (1767941)..(1767941): n is a or c or g or t.
VRAVSERFCYRCGISEREGGPLIEGLCQVCYRKENPVLLIENEINTELCQNCGSYKKRGVWVDPHSYELEELIFEVAENALLEALEDSFSDKIREYEVVSPEELEETEEIPVGRAIVSFEPVDYHIEYFPAIITYEVRVKARTHELQRELHDERKKVTVYVRQTVCPRCQKFLGGYFEAILQVRAEDRPLTEEERKAIGKLVEEKVDEIMRKDRMGFIQDTIEKEEGLDFYMGSTSAARKLAQAIKERFGGKISEAYELVGMDRQTSREVYRTSVSVRIPKFQRGDIVTDKRGTVYEVERVDGKGMTLRNLSTGESEHKDWKTLSREGVDTVEHEESEAMVTSIGRDEVQLMDMESYETYEIEKPGVELTEGDVYRVVSVKGKRYIRGRKEGE

SEQ ID NO: 575 - protein, 445 aa, Thermococcus kodakaraensis KOD1
  misc_feature (414542)..(414542): n is a or c or g or t.
  misc_feature (786890)..(786890): n is a or c or g or t.
  misc_feature (786907)..(786907): n is a or c or g or t.
  misc_feature (786944)..(786946): n is a or c or g or t.
  misc_feature (839139)..(839139): n is a or c or g or t.
  misc_feature (1128488)..(1128488): n is a or c or g or t.
  misc_feature (1128499)..(1128499): n is a or c or g or t.
  misc_feature (1128505)..(1128506): n is a or c or g or t.
  misc_feature (1128517)..(1128518): n is a or c or g or t.
  misc_feature (1128539)..(1128540): n is a or c or g or t.
  misc_feature (1561400)..(1561400): n is a or c or g or t.
  misc_feature (1561477)..(1561477): n is a or c or g or t.
  misc_feature (1561545)..(1561545): n is a or c or g or t.
  misc_feature (1767941)..(1767941): n is a or c or g or t.
VMVMERKTVVVIGGGAAGMSTASRVKRLKPEWDVKVFEATEWVSHAPCGIPYVVEGISPKEKLMHYPPEVFIKKRGIDLHLKAEVIEVEQGRVRVREEDGEKTYEWDYLVFANGASPQVPAIEGIDLPGVFTADLPPDAVAITEYLEKNPVENVVVIGTGYIAIEMAEAFVERGKNVTLIGRSERVLRKTFDKEITDIVEEKLRNHLNLRLEEVTLRIEGKERVERVVTDAGEYPADLVIVATGIKPNTELARGLGVRIGETGAIWTNDRMQTSVENVYAAGDVAETKHLITGRRVWMPLAPAGNKMGYVAGSNIAGKEIHFPGVLGTSITKFLDLEIGKTGLTEAEAMKEGYDVRTAFIKAGTRPHYYPGSKTIWLKGVVDNETNRLLGVQAVGGDILPRIDTAAAMITAGFTTKDVFFTDLAYAPPFAPVWDPLIVLARVLKF

SEQ ID NO: 576 - protein, 197 aa, Thermococcus kodakaraensis KOD1
  misc_feature (414542)..(414542): n is a or c or g or t.
  misc_feature (786890)..(786890): n is a or c or g or t.
  misc_feature (786907)..(786907): n is a or c or g or t.
  misc_feature (786944)..(786946): n is a or c or g or t.
  misc_feature (839139)..(839139): n is a or c or g or t.
  misc_feature (1128488)..(1128488): n is a or c or g or t.
  misc_feature (1128499)..(1128499): n is a or c or g or t.
  misc_feature (1128505)..(1128506): n is a or c or g or t.
  misc_feature (1128517)..(1128518): n is a or c or g or t.
  misc_feature (1128539)..(1128540): n is a or c or g or t.
  misc_feature (1561400)..(1561400): n is a or c or g or t.
  misc_feature (1561477)..(1561477): n is a or c or g or t.
  misc_feature (1561545)..(1561545): n is a or c or g or t.
  misc_feature (1767941)..(1767941): n is a or c or g or t.
VKPMHPGGFLEVITGPMFAGKTTELIKRVERQIFAKRKAALFKPAIDNRYSEREVVAHNGLRYEAFVVPTTEKGVERIKEITLNEGYEVIGIDEVQFFPMSVVEALNELADQGIYVIASGLNLDFKGDPFPVTKELLVRADNIVYLTAVCTVCGKPATRSQRLIDGKPAPRNSPVILVGGRESYEARCREHHLVPDE

SEQ ID NO: 577 - protein, 74 aa, Thermococcus kodakaraensis KOD1
  misc_feature (414542)..(414542): n is a or c or g or t.
  misc_feature (786890)..(786890): n is a or c or g or t.
  misc_feature (786907)..(786907): n is a or c or g or t.
  misc_feature (786944)..(786946): n is a or c or g or t.
  misc_feature (839139)..(839139): n is a or c or g or t.
  misc_feature (1128488)..(1128488): n is a or c or g or t.
  misc_feature (1128499)..(1128499): n is a or c or g or t.
  misc_feature (1128505)..(1128506): n is a or c or g or t.
  misc_feature (1128517)..(1128518): n is a or c or g or t.
  misc_feature (1128539)..(1128540): n is a or c or g or t.
  misc_feature (1561400)..(1561400): n is a or c or g or t.
  misc_feature (1561477)..(1561477): n is a or c or g or t.
  misc_feature (1561545)..(1561545): n is a or c or g or t.
  misc_feature (1767941)..(1767941): n is a or c or g or t.
MVNTKKLKNEFPKHEQAKGGGVTMARNKPFAKKLRLAKAAKQNRRVPVWVIVKTNRKVITHPKRRHWRRTKLKE

SEQ ID NO: 578 - protein, 1125 aa, Thermococcus kodakaraensis KOD1
  misc_feature (414542)..(414542): n is a or c or g or t.
  misc_feature (786890)..(786890): n is a or c or g or t.
  misc_feature (786907)..(786907): n is a or c or g or t.
  misc_feature (786944)..(786946): n is a or c or g or t.
  misc_feature (839139)..(839139): n is a or c or g or t.
  misc_feature (1128488)..(1128488): n is a or c or g or t.
  misc_feature (1128499)..(1128499): n is a or c or g or t.
  misc_feature (1128505)..(1128506): n is a or c or g or t.
  misc_feature (1128517)..(1128518): n is a or c or g or t.
  misc_feature (1128539)..(1128540): n is a or c or g or t.
  misc_feature (1561400)..(1561400): n is a or c or g or t.
  misc_feature (1561477)..(1561477): n is a or c or g or t.
  misc_feature (1561545)..(1561545): n is a or c or g or t.
  misc_feature (1767941)..(1767941): n is a or c or g or t.
MKVDELPIDERIKRVIKERGIEELYPPQAEALKSGVLEGKNLVLAIPTASGKTLVSEIVMVNKLLSEGGKAVYLVPLKALAEEKYREFKEWEVLGLRVAATTGDYDSTDEWLGRYDIIVATAEKFDSLLRHGASWIKDVKLVVADEVHLIGSYDRGATLEMILTHMLGKAQILALSATVGNAEELAEWLDASLVVSDWRPVELRKGVFHLGQLFWEDGKIDHYPENWESLVLDAVKKGKQALVFVNTRRSAEKEAISLSSKVSKLLTKPETRRLEELISSIEDNPTTEKLKRALKGGVAFHHAGLSRAERTLIEDAFRNGLIKVITATPTLCMHPDTYVVTKSGAKKVSELTEGDEVLTHTGTFKKVIQPLRREHKGRLLVIKAYGTVPVKITPEHMVWVVKQIRHKSHYSDGRQVIWWEFEGPEWMTAQELKERLESETDPKVSYMLLQPIPEPSVDADKIPLRKEVYVVNQHGKTDKLHPSVKRTPEYLPLNFETARLIGLWIAEGSTSKNGVIKFDISSNEEDLTEFITGTIRKYFPHAKIVVKDHERNRRTVRFCNKRFAEWLRENIGHGADNKSIPPLLLLNKNREVRLGLLRGLIEGDGYVRRESQRRANYISYSTVSPSLAYQLQLLVASLGYTSSIHRSIRTEGIGKTRKPIYDVKVSGKSYYSLLEELGFEVPQRGNRTYNVNRTWKNYLLLKVRSIEEEEYEGDVYNLEVEGDESYSVGFIVHNSAGINLPAFRVIIRDTKRYANFGWTDIPVLEIQQMMGRAGRPKYDKVGEAIIVARTEDPKKLIDRYIHGKPEKLFSMLANEQAFRSQVLALITNFGVEDFRELVDFLSRTFYAHQRGDTSSLEYKAKDIVYFLIENEFIDMDVENRFIALPFGRRTSQLYIDPLTAKKFKDAFPAIERNPNPFGIFQLLASTPDMATLTARRREMEDYLDLAYEMEEHLYSSIPYYEDSRFQGFLGQVKTAKVLLDWINEVPEARIYETYNIDPGDLYRILELADWLMYSLIELYKLFEPKEDVLQYLRDLHLRLRHGVREELLELVKLPNIGRRRARALYNAGFRSVEDILRAKPKDLLQVEGIGLKIIEGIYRHLGVEYTISEKEKPKKRKGNLYDFLK

SEQ ID NO: 579 - protein, 160 aa, Thermococcus kodakaraensis KOD1
  misc_feature (414542)..(414542): n is a or c or g or t.
  misc_feature (786890)..(786890): n is a or c or g or t.
  misc_feature (786907)..(786907): n is a or c or g or t.
  misc_feature (786944)..(786946): n is a or c or g or t.
  misc_feature (839139)..(839139): n is a or c or g or t.
  misc_feature (1128488)..(1128488): n is a or c or g or t.
  misc_feature (1128499)..(1128499): n is a or c or g or t.
  misc_feature (1128505)..(1128506): n is a or c or g or t.
  misc_feature (1128517)..(1128518): n is a or c or g or t.
  misc_feature (1128539)..(1128540): n is a or c or g or t.
  misc_feature (1561400)..(1561400): n is a or c or g or t.
  misc_feature (1561477)..(1561477): n is a or c or g or t.
  misc_feature (1561545)..(1561545): n is a or c or g or t.
  misc_feature (1767941)..(1767941): n is a or c or g or t.
MKLSRSFEKLFNPLPQSRQGETMSELFEEVEVEAYVYPTEDIEKVKKAMLNLIPDLEFEAFDRGDYIILTAKTRSRKALSRLYELFRGQAILDTARSFLEEGYFGEEIIIKVNKQAAYAGVVNFNEESPLGPITIIIRTKDPQRLMKWLAPRTKDGVPIE

SEQ ID NO: 580 - protein, 318 aa, Thermococcus kodakaraensis KOD1
  misc_feature (414542)..(414542): n is a or c or g or t.
  misc_feature (786890)..(786890): n is a or c or g or t.
  misc_feature (786907)..(786907): n is a or c or g or t.
  misc_feature (786944)..(786946): n is a or c or g or t.
  misc_feature (839139)..(839139): n is a or c or g or t.
  misc_feature (1128488)..(1128488): n is a or c or g or t.
  misc_feature (1128499)..(1128499): n is a or c or g or t.
  misc_feature (1128505)..(1128506): n is a or c or g or t.
  misc_feature (1128517)..(1128518): n is a or c or g or t.
  misc_feature (1128539)..(1128540): n is a or c or g or t.
  misc_feature (1561400)..(1561400): n is a or c or g or t.
  misc_feature (1561477)..(1561477): n is a or c or g or t.
  misc_feature (1561545)..(1561545): n is a or c or g or t.
  misc_feature (1767941)..(1767941): n is a or c or g or t.
VDSTAKIHYGRDRQKYAEWVKRRTPSMAKKYIPLLDKYLWGKKANTPEELRKIIESIPPTKKGNPNRHAYLAIRSYINFLVDTGRIRKSEAIDFKAVIPNIKTNARAESAKVITSEDIREMFSQLKGKNETILRARKLYLKLLAFTGLRGDEVRELMNQFDPRVVEETFKAFGLPEEWRKKIAVYDMERVKLPTRRHGTKRGYVAVFPAELVRELEWFASTGYKLTADNSDKHKLFRDYTKVKDLALLRKFWQNFMNDNVMSTVPNPPADAFHLIEFLQGRAPKTVGGRNYRWNVRNAVRIYYYMVDRLKEELGILEL

SEQ ID NO: 581 - protein, 64 aa, Thermococcus kodakaraensis KOD1
  misc_feature (414542)..(414542): n is a or c or g or t.
  misc_feature (786890)..(786890): n is a or c or g or t.
  misc_feature (786907)..(786907): n is a or c or g or t.
  misc_feature (786944)..(786946): n is a or c or g or t.
  misc_feature (839139)..(839139): n is a or c or g or t.
  misc_feature (1128488)..(1128488): n is a or c or g or t.
  misc_feature (1128499)..(1128499): n is a or c or g or t.
  misc_feature (1128505)..(1128506): n is a or c or g or t.
  misc_feature (1128517)..(1128518): n is a or c or g or t.
  misc_feature (1128539)..(1128540): n is a or c or g or t.
  misc_feature (1561400)..(1561400): n is a or c or g or t.
  misc_feature (1561477)..(1561477): n is a or c or g or t.
  misc_feature (1561545)..(1561545): n is a or c or g or t.
  misc_feature (1767941)..(1767941): n is a or c or g or t.
VVLVAKVDNVEIVGRVSANGRVVIPKDIRDLLNIEDGDFVRLVITEVIKVPKSAKTGSNNKKKR

SEQ ID NO: 582 - protein, 230 aa, Thermococcus kodakaraensis KOD1
  misc_feature (414542)..(414542): n is a or c or g or t.
  misc_feature (786890)..(786890): n is a or c or g or t.
  misc_feature (786907)..(786907): n is a or c or g or t.
  misc_feature (786944)..(786946): n is a or c or g or t.
  misc_feature (839139)..(839139): n is a or c or g or t.
  misc_feature (1128488)..(1128488): n is a or c or g or t.
  misc_feature (1128499)..(1128499): n is a or c or g or t.
  misc_feature (1128505)..(1128506): n is a or c or g or t.
  misc_feature (1128517)..(1128518): n is a or c or g or t.
  misc_feature (1128539)..(1128540): n is a or c or g or t.
  misc_feature (1561400)..(1561400): n is a or c or g or t.
  misc_feature (1561477)..(1561477): n is a or c or g or t.
  misc_feature (1561545)..(1561545): n is a or c or g or t.
  misc_feature (1767941)..(1767941): n is a or c or g or t.
MIIAFDFDGTLADTYSCIEDAFKRALEKRYRWLPGKALWAKLLTKIEFQFERPTFGKHKGKIKSPFFMRTKFFETWFEERAKLSKPIDDAPELLKKLKEQGHTVISFSAEDFIDGMKVKRLKAMGIYDLFDDVIVFGRDLTIEEAFKLVREKYGDDIFIWVDDKPWRFIGHGDENTEYVWYYFPITAKFVEKKREMLALIPHLHVIRDLWSLFDVIKNVERQRRSAKEKA

SEQ ID NO: 583 - protein, 225 aa, Thermococcus kodakaraensis KOD1
  misc_feature (414542)..(414542): n is a or c or g or t.
  misc_feature (786890)..(786890): n is a or c or g or t.
  misc_feature (786907)..(786907): n is a or c or g or t.
  misc_feature (786944)..(786946): n is a or c or g or t.
  misc_feature (839139)..(839139): n is a or c or g or t.
  misc_feature (1128488)..(1128488): n is a or c or g or t.
  misc_feature (1128499)..(1128499): n is a or c or g or t.
  misc_feature (1128505)..(1128506): n is a or c or g or t.
  misc_feature (1128517)..(1128518): n is a or c or g or t.
  misc_feature (1128539)..(1128540): n is a or c or g or t.
  misc_feature (1561400)..(1561400): n is a or c or g or t.
  misc_feature (1561477)..(1561477): n is a or c or g or t.
  misc_feature (1561545)..(1561545): n is a or c or g or t.
  misc_feature (1767941)..(1767941): n is a or c or g or t.
MKPKPLPEKALKLGKNVIIADVHLGYEIAMAKEGFYLPRVFHDVVRNLKNIIQREKPKGLIINGDFKHSFVPEWREKTELRTFLEEVSPLVSEIVLVRGNHDVGVLWLKELGVEIVDELEIGRWKLVHGHKLVEGENFIIGHEHPAIRLRDEVGAVIKVPAFLMGKHLIVLPAFSPWAYGNDVLREIVSPFLKYRREDFRVLVPVGREVLDFGTLSKLQEALKRL

SEQ ID NO: 584 - protein, 623 aa, Thermococcus kodakaraensis KOD1
  misc_feature (414542)..(414542): n is a or c or g or t.
  misc_feature (786890)..(786890): n is a or c or g or t.
  misc_feature (786907)..(786907): n is a or c or g or t.
  misc_feature (786944)..(786946): n is a or c or g or t.
  misc_feature (839139)..(839139): n is a or c or g or t.
  misc_feature (1128488)..(1128488): n is a or c or g or t.
  misc_feature (1128499)..(1128499): n is a or c or g or t.
  misc_feature (1128505)..(1128506): n is a or c or g or t.
  misc_feature (1128517)..(1128518): n is a or c or g or t.
  misc_feature (1128539)..(1128540): n is a or c or g or t.
  misc_feature (1561400)..(1561400): n is a or c or g or t.
  misc_feature (1561477)..(1561477): n is a or c or g or t.
  misc_feature (1561545)..(1561545): n is a or c or g or t.
  misc_feature (1767941)..(1767941): n is a or c or g or t.
MNALERLEKLLDKEQFEKVKAIDNPELHEFLAEWIEWLEPDKVFVCTDSPEDEGYVRWKALYYGEERMLETPNHTVHYDNYYDQARDKANTAILLPGGKKLPYINTKDRDEGLKEIRELMKGIMKGKELFVCFFVLGPKNSIFTIPAVQLTDSAYVAHSEFILYRKGYEEFKRLGRSARFFRFVHSAGELDERKTSKNLDKRRIYIDLEDETVYSVNTQYGGNTIGLKKLAFRLTIKRAVEEGWLSEHMFLMRVNGPHGRKTYFTGAYPSMCGKTSTAMIPWENIVGDDLTFILPVNGIARGANVEKGVFGIIQGVNPEDDPIIWQVLHSPVEIIFSNVLVKDGKPYWNDMGIEIPDEGENHSGKWWRGKKDAEGNEIPPSHKNARFTVSLEHFPNVDMEALENPCGVEVGGMIFGGRDADTWPPVREAFNWEHGVITMGASLESETTAATLGKEGVRAFNPMAILDFMSVHLGDYLRNYLEFGRKLKKTPKIFAVNYFLRENGVWLNHKLDKAVWLKWMELRVHGDVEAIETPIGYIPKYKDLAKLFKDVLNKEYTKEDYERQFKIRVPELLAKIDRIEEIYRKLDNVPEELFKVLEEERQRLLEAREKYGDYISPFALEGE

SEQ ID NO: 585 - protein, 436 aa, Thermococcus kodakaraensis KOD1
  misc_feature (414542)..(414542): n is a or c or g or t.
  misc_feature (786890)..(786890): n is a or c or g or t.
  misc_feature (786907)..(786907): n is a or c or g or t.
  misc_feature (786944)..(786946): n is a or c or g or t.
  misc_feature (839139)..(839139): n is a or c or g or t.
  misc_feature (1128488)..(1128488): n is a or c or g or t.
  misc_feature (1128499)..(1128499): n is a or c or g or t.
  misc_feature (1128505)..(1128506): n is a or c or g or t.
  misc_feature (1128517)..(1128518): n is a or c or g or t.
  misc_feature (1128539)..(1128540): n is a or c or g or t.
  misc_feature (1561400)..(1561400): n is a or c or g or t.
  misc_feature (1561477)..(1561477): n is a or c or g or t.
  misc_feature (1561545)..(1561545): n is a or c or g or t.
  misc_feature (1767941)..(1767941): n is a or c or g or t.
MDQTQKWTMYLIFLVAGFATGIGSLGLFPQFWLHYGLTGLVVHLGFLLVFTLVAIFETERVMKSGYYFVELYRKVLQRPAMILAIAVTIIAFLSYYTANVMLILLGPYVGTETIGRLVAKIIMLALIFVIITRAKEKTFTIMSLGSLFFIAVAIITAILFKVKIPPTAAFLATAKHMAYSWQPLSLSLIRAAAERALYGVGLGFGFYIMLGSFINERFNAKTIIGVGILMQVVVSLLATLTIIYAIAPSSPERLFFYAYGGEEDALQLIKDLPDILSGYSYLLILIGLSIFFAGLTSILPTAEVGVQIIASVFRISRTKAATYLIAASLLLGIPDSVPSVADMMLRAVTIATFFMAIYELYPVISSRALKILNSKLSPLEMGVAAVAITFFIVEGLYSMYTAAKKGDLYLLSPVIALIIILFGILGDKIWVTEAPE

SEQ ID NO: 586 - protein, 276 aa, Thermococcus kodakaraensis KOD1
  misc_feature (414542)..(414542): n is a or c or g or t.
  misc_feature (786890)..(786890): n is a or c or g or t.
  misc_feature (786907)..(786907): n is a or c or g or t.
  misc_feature (786944)..(786946): n is a or c or g or t.
  misc_feature (839139)..(839139): n is a or c or g or t.
  misc_feature (1128488)..(1128488): n is a or c or g or t.
  misc_feature (1128499)..(1128499): n is a or c or g or t.
  misc_feature (1128505)..(1128506): n is a or c or g or t.
  misc_feature (1128517)..(1128518): n is a or c or g or t.
  misc_feature (1128539)..(1128540): n is a or c or g or t.
  misc_feature (1561400)..(1561400): n is a or c or g or t.
  misc_feature (1561477)..(1561477): n is a or c or g or t.
  misc_feature (1561545)..(1561545): n is a or c or g or t.
  misc_feature (1767941)..(1767941): n is a or c or g or t.
VFSMPANEEKFREEILSKIPPRNEPPLPPNWLHIEMLERFRVLRFAPLREGMNVLEIGCGAHAITTVPLAYLVDETGRVVAVDKARWHFFEEITSVAGLKHRIIPMKLDARELPFPFKAFDLAVLVHGIRSLKNEETIVKVISEMLRVSDRVFIAESLPIANNERQRAHLELYNLRQEIFEALFGEKDDLHYFPLEKLEEFVERAGGRIVESGTFEPNLPHYLAYIPREYVSQIKDEKKRTELLERWDRAYEKWKNGAEHPPVGWLIAESEVNRNP

SEQ ID NO: 587 - protein, 280 aa, Thermococcus kodakaraensis KOD1
  misc_feature (414542)..(414542): n is a or c or g or t.
  misc_feature (786890)..(786890): n is a or c or g or t.
  misc_feature (786907)..(786907): n is a or c or g or t.
  misc_feature (786944)..(786946): n is a or c or g or t.
  misc_feature (839139)..(839139): n is a or c or g or t.
  misc_feature (1128488)..(1128488): n is a or c or g or t.
  misc_feature (1128499)..(1128499): n is a or c or g or t.
  misc_feature (1128505)..(1128506): n is a or c or g or t.
  misc_feature (1128517)..(1128518): n is a or c or g or t.
  misc_feature (1128539)..(1128540): n is a or c or g or t.
  misc_feature (1561400)..(1561400): n is a or c or g or t.
  misc_feature (1561477)..(1561477): n is a or c or g or t.
  misc_feature (1561545)..(1561545): n is a or c or g or t.
  misc_feature (1767941)..(1767941): n is a or c or g or t.
VVAMVEKFVSAERPQTEEGMQYHIACKPGDVARYVLLPGDPERVPKISSLWDEAREIAFHREYRTHTGKYKGVPISVTSTGIGGPSTAIAIEELAAIGADTFIRVGSTGAIQPGIEIGDLIIAKAAVRLEGTSKQYVRVEYPAVADLEVTLALIEAAESLGVRYHIGITASTDSFYLGQGRPGLNGYFPSFARNLVDDLRQARVTNFEMEAATLYTLANIYGLRAGCVCAVFANRVTNEFGKAGEKEAALVASEAVKILAEWDEEKERAGKRVWHPGMRG

SEQ ID NO: 588 - protein, 176 aa, Thermococcus kodakaraensis KOD1
  misc_feature (414542)..(414542): n is a or c or g or t.
  misc_feature (786890)..(786890): n is a or c or g or t.
  misc_feature (786907)..(786907): n is a or c or g or t.
  misc_feature (786944)..(786946): n is a or c or g or t.
  misc_feature (839139)..(839139): n is a or c or g or t.
  misc_feature (1128488)..(1128488): n is a or c or g or t.
  misc_feature (1128499)..(1128499): n is a or c or g or t.
  misc_feature (1128505)..(1128506): n is a or c or g or t.
  misc_feature (1128517)..(1128518): n is a or c or g or t.
  misc_feature (1128539)..(1128540): n is a or c or g or t.
  misc_feature (1561400)..(1561400): n is a or c or g or t.
  misc_feature (1561477)..(1561477): n is a or c or g or t.
  misc_feature (1561545)..(1561545): n is a or c or g or t.
  misc_feature (1767941)..(1767941): n is a or c or g or t.
VNELKRWVATVDLVTLEVESDPTFKFKCIENCGLCCERLEIPLRDEDIERIEGLGYNTWEFVDYEKLFYRGDKFLGYAIKKNPVTDACVFLDPETKKCKIYNHRPLACRLYPFVFVKHGERMEIYIKEDSFCPGINHPDGKPVTKDFLMKEYWDIIEEYRQKVIHKGQKTQVNASV

SEQ ID NO: 589 - protein, 51 aa, Thermococcus kodakaraensis KOD1
  misc_feature (414542)..(414542): n is a or c or g or t.
  misc_feature (786890)..(786890): n is a or c or g or t.
  misc_feature (786907)..(786907): n is a or c or g or t.
  misc_feature (786944)..(786946): n is a or c or g or t.
  misc_feature (839139)..(839139): n is a or c or g or t.
  misc_feature (1128488)..(1128488): n is a or c or g or t.
  misc_feature (1128499)..(1128499): n is a or c or g or t.
  misc_feature (1128505)..(1128506): n is a or c or g or t.
  misc_feature (1128517)..(1128518): n is a or c or g or t.
  misc_feature (1128539)..(1128540): n is a or c or g or t.
  misc_feature (1561400)..(1561400): n is a or c or g or t.
  misc_feature (1561477)..(1561477): n is a or c or g or t.
  misc_feature (1561545)..(1561545): n is a or c or g or t.
  misc_feature (1767941)..(1767941): n is a or c or g or t.
VRGMSNIHCTMRRKIGINEKISRNMATTEIAAPTTFPVKKRAMPSRYQTIM

SEQ ID NO: 590 - protein, 388 aa, Thermococcus kodakaraensis KOD1
  misc_feature (414542)..(414542): n is a or c or g or t.
  misc_feature (786890)..(786890): n is a or c or g or t.
  misc_feature (786907)..(786907): n is a or c or g or t.
  misc_feature (786944)..(786946): n is a or c or g or t.
  misc_feature (839139)..(839139): n is a or c or g or t.
  misc_feature (1128488)..(1128488): n is a or c or g or t.
  misc_feature (1128499)..(1128499): n is a or c or g or t.
  misc_feature (1128505)..(1128506): n is a or c or g or t.
  misc_feature (1128517)..(1128518): n is a or c or g or t.
  misc_feature (1128539)..(1128540): n is a or c or g or t.
  misc_feature (1561400)..(1561400): n is a or c or g or t.
  misc_feature (1561477)..(1561477): n is a or c or g or t.
  misc_feature (1561545)..(1561545): n is a or c or g or t.
  misc_feature (1767941)..(1767941): n is a or c or g or t.
VITMELHFDMTYEDAYREVYEMVKPKYKLFTAGPVACFPEVLAIMSVQMFSHRSAEAKAVHVDTLNRLKAFLEADKGEIILFPSSGTGFMEAAVRNTIPRGGKVLVTVIGAFGKRFADVVNANGREAVILEKEPGKAIKPEELDDALRKNPDVHAVTITYNETSTGVLNPLPELAKVVQEHDKLLFVDAVSAMGGADIKFDKWGLDMIFASSQKAFGVPPGLAVAAVSERVFEIAEKMPERGWYFDLPLYKKFNEKKKGTPSTPPLPQIFGLNVVLRIVEKMGGKEAWLDMYRKRSEMIREGVKEMGLGILAEPGYESPTITAVVVPEGMKGVDVYNAMRERGFELAKGYGSVAEKTFRIGNMGYMTFDDIREMLDNLREVIEELKKK

SEQ ID NO: 591 - protein, 24 aa, Thermococcus kodakaraensis KOD1
  misc_feature (414542)..(414542): n is a or c or g or t.
  misc_feature (786890)..(786890): n is a or c or g or t.
  misc_feature (786907)..(786907): n is a or c or g or t.
  misc_feature (786944)..(786946): n is a or c or g or t.
  misc_feature (839139)..(839139): n is a or c or g or t.
  misc_feature (1128488)..(1128488): n is a or c or g or t.
  misc_feature (1128499)..(1128499): n is a or c or g or t.
  misc_feature (1128505)..(1128506): n is a or c or g or t.
  misc_feature (1128517)..(1128518): n is a or c or g or t.
  misc_feature (1128539)..(1128540): n is a or c or g or t.
  misc_feature (1561400)..(1561400): n is a or c or g or t.
  misc_feature (1561477)..(1561477): n is a or c or g or t.
  misc_feature (1561545)..(1561545): n is a or c or g or t.
  misc_feature (1767941)..(1767941): n is a or c or g or t.
VYTMRGLTKLLIGKLTWEKTQRFT

SEQ ID NO: 592 - protein, 374 aa, Thermococcus kodakaraensis KOD1
  misc_feature (414542)..(414542): n is a or c or g or t.
  misc_feature (786890)..(786890): n is a or c or g or t.
  misc_feature (786907)..(786907): n is a or c or g or t.
  misc_feature (786944)..(786946): n is a or c or g or t.
  misc_feature (839139)..(839139): n is a or c or g or t.
  misc_feature (1128488)..(1128488): n is a or c or g or t.
  misc_feature (1128499)..(1128499): n is a or c or g or t.
  misc_feature (1128505)..(1128506): n is a or c or g or t.
  misc_feature (1128517)..(1128518): n is a or c or g or t.
  misc_feature (1128539)..(1128540): n is a or c or g or t.
  misc_feature (1561400)..(1561400): n is a or c or g or t.
  misc_feature (1561477)..(1561477): n is a or c or g or t.
  misc_feature (1561545)..(1561545): n is a or c or g or t.
  misc_feature (1767941)..(1767941): n is a or c or g or t.
MEILLLIAIMLATAKVMGYLFERIGQPVVLGQIFGGLLIGIFFETNPVIAQFSNLGVLLLLFMAGLESELEEFKRVGKQSVFVAGVGVIVAFLFGFGVAYFFVPFHEAVLYGALMTPTSVSITVKVLMELRKLNTREGTTILAAAVVDDVLGILVLTVAISMIKGGSVNYSSLAEVLISVSLLLFFFLYFGPEIADRVFRYVSKIDLPESETAFALVFLIVFAYLAEHLNLASILGAYLTGLALGQIPKKKAIMEHMNVLGYSLFIPLFFVEVGMRIELSYILHAGLFAVLYTTAAIVSKVIGCGLGARLGGFDWAASLRIGVGMIPRMGVELAMLAVAMSSGVISGDALTVAILMIFTTTIITPPLLKWLYSR

SEQ ID NO: 593 - protein, 476 aa, Thermococcus kodakaraensis KOD1
  misc_feature (414542)..(414542): n is a or c or g or t.
  misc_feature (786890)..(786890): n is a or c or g or t.
  misc_feature (786907)..(786907): n is a or c or g or t.
  misc_feature (786944)..(786946): n is a or c or g or t.
  misc_feature (839139)..(839139): n is a or c or g or t.
  misc_feature (1128488)..(1128488): n is a or c or g or t.
  misc_feature (1128499)..(1128499): n is a or c or g or t.
  misc_feature (1128505)..(1128506): n is a or c or g or t.
  misc_feature (1128517)..(1128518): n is a or c or g or t.
  misc_feature (1128539)..(1128540): n is a or c or g or t.
  misc_feature (1561400)..(1561400): n is a or c or g or t.
  misc_feature (1561477)..(1561477): n is a or c or g or t.
  misc_feature (1561545)..(1561545): n is a or c or g or t.
  misc_feature (1767941)..(1767941): n is a or c or g or t.
VLGRKRVLVMLLITIIGVSIVSLVVAITWRLSEEEPLRIFGYDVYKFEGSGHYAIFYPMPDGTIKLLKTGKIGIFPTFVKVPRNAWLKEYANRENTLKAMPTPIVIFVNDKGLGIASLKGSKVKLKELEIPEISKITTASAHSCPKDYIPEGYRYCIPKNPERNWIRVITSKTVTEKISFLGLRIDNHVLKDIDFDMRLFLSEATYSHWTAGIDVGPVTLTTTKFGESFKGKGLKLEYTTPREVNPQSSMWSRYVNLDVKYVVTVYGVLAYDRYTGKYTEMPLILTYPLEILTTGSYKIYETPDGSQKYVESKPGSTFYTPSITREPHYLEIPGSADSERILINQGDGRGLIIDEWLNESWHLSSESSFSIPIGPAAVKALEKEGVLKKYPQVRRILNSISLTIGFHKTANQRSMLIYRLQATPREDCYALRYYQKLDVAEDYNKVKVPMFLVTVTNGKSPGFCDPRTGLCTTSTG

SEQ ID NO: 594 - protein, 493 aa, Thermococcus kodakaraensis KOD1
  misc_feature (414542)..(414542): n is a or c or g or t.
  misc_feature (786890)..(786890): n is a or c or g or t.
  misc_feature (786907)..(786907): n is a or c or g or t.
  misc_feature (786944)..(786946): n is a or c or g or t.
  misc_feature (839139)..(839139): n is a or c or g or t.
  misc_feature (1128488)..(1128488): n is a or c or g or t.
  misc_feature (1128499)..(1128499): n is a or c or g or t.
  misc_feature (1128505)..(1128506): n is a or c or g or t.
  misc_feature (1128517)..(1128518): n is a or c or g or t.
  misc_feature (1128539)..(1128540): n is a or c or g or t.
  misc_feature (1561400)..(1561400): n is a or c or g or t.
  misc_feature (1561477)..(1561477): n is a or c or g or t.
  misc_feature (1561545)..(1561545): n is a or c or g or t.
  misc_feature (1767941)..(1767941): n is a or c or g or t.
MGGCTMEAQTQMLIVLVGYLLFLISVGIYQGRKTKSSKDFAIAGRQLPGWVAALSERATGESAWALLGLPGFAFAAGLAAIWPAIGCVLGIVVAWVIFAPRLRREAEKYDASTFVDYIAKRHPDAEKWIRILGSLTIAFFFFFYVGAQFIGGGKTLNALFDIDPKIGMIITAMIILPYTVAGGLKSVAYTDTIQAIVMIVTLIIAPIVGIHYISTHHDVFAHSVTEALKASGPEYSTILGGLAGSAAIIFVIAEFSWFFGYLGGMPQLSIRFMAIKDEENAKLARNVGVAWTIIAYIGALLIGWIGIAIFGPSGLADQEQVMPEVMLKLFPPALAAVFITGAVAAMLSTADSLLILASTELSENFLRPFVLAKDMDPRRGLTISRITTIALGIIALIMAFIVPSDLIYTIVGYTWAGIGDTFSVIVILTLFWKKFHGKAVPPTIIAGLLFTVFWVSSGLDAKVSARLMTFIVTAIVAVVATYAIKPENTRTGA

SEQ ID NO: 595 - protein, 29 aa, Thermococcus kodakaraensis KOD1
  misc_feature (414542)..(414542): n is a or c or g or t.
  misc_feature (786890)..(786890): n is a or c or g or t.
  misc_feature (786907)..(786907): n is a or c or g or t.
  misc_feature (786944)..(786946): n is a or c or g or t.
  misc_feature (839139)..(839139): n is a or c or g or t.
  misc_feature (1128488)..(1128488): n is a or c or g or t.
  misc_feature (1128499)..(1128499): n is a or c or g or t.
  misc_feature (1128505)..(1128506): n is a or c or g or t.
  misc_feature (1128517)..(1128518): n is a or c or g or t.
  misc_feature (1128539)..(1128540): n is a or c or g or t.
  misc_feature (1561400)..(1561400): n is a or c or g or t.
  misc_feature (1561477)..(1561477): n is a or c or g or t.
  misc_feature (1561545)..(1561545): n is a or c or g or t.
  misc_feature (1767941)..(1767941): n is a or c or g or t.
MVKVSAEARAEVASNTAKKTIKMRLMAIT

SEQ ID NO: 596 - protein, 260 aa, Thermococcus kodakaraensis KOD1
  misc_feature (414542)..(414542): n is a or c or g or t.
  misc_feature (786890)..(786890): n is a or c or g or t.
  misc_feature (786907)..(786907): n is a or c or g or t.
  misc_feature (786944)..(786946): n is a or c or g or t.
  misc_feature (839139)..(839139): n is a or c or g or t.
  misc_feature (1128488)..(1128488): n is a or c or g or t.
  misc_feature (1128499)..(1128499): n is a or c or g or t.
  misc_feature (1128505)..(1128506): n is a or c or g or t.
  misc_feature (1128517)..(1128518): n is a or c or g or t.
  misc_feature (1128539)..(1128540): n is a or c or g or t.
  misc_feature (1561400)..(1561400): n is a or c or g or t.
  misc_feature (1561477)..(1561477): n is a or c or g or t.
  misc_feature (1561545)..(1561545): n is a or c or g or t.
  misc_feature (1767941)..(1767941): n is a or c or g or t.
MVTKSKFKGVVTMIKRVKTGIPGMDEILHGGIPERNVVLLSGGPGTGKSIFSQQFLWNGLQMGEPGIYVALEEHPVQVRQNMAQFGWDVRKYEEEGLFAMVDAFTAGIGKSKEYEKYIVHDLTDIREFIDVLRTAVKDIGAKRLVVDSVTTLYINKPAMARSIVMQLKRVLAGLGVTSIFVSQISVGERGFGGPGVEHGVDGIIRLDLDEIDGELKRSLIVWKMRGTSHSMRRHPFDITDKGIIVYPDKVLKRKAVIELE

SEQ ID NO: 597 - protein, 230 aa, Thermococcus kodakaraensis KOD1
  misc_feature (414542)..(414542): n is a or c or g or t.
  misc_feature (786890)..(786890): n is a or c or g or t.
  misc_feature (786907)..(786907): n is a or c or g or t.
  misc_feature (786944)..(786946): n is a or c or g or t.
  misc_feature (839139)..(839139): n is a or c or g or t.
  misc_feature (1128488)..(1128488): n is a or c or g or t.
  misc_feature (1128499)..(1128499): n is a or c or g or t.
  misc_feature (1128505)..(1128506): n is a or c or g or t.
  misc_feature (1128517)..(1128518): n is a or c or g or t.
  misc_feature (1128539)..(1128540): n is a or c or g or t.
  misc_feature (1561400)..(1561400): n is a or c or g or t.
  misc_feature (1561477)..(1561477): n is a or c or g or t.
  misc_feature (1561545)..(1561545): n is a or c or g or t.
  misc_feature (1767941)..(1767941): n is a or c or g or t.
VMYVIIMGAGRVGYLVAKMLEEDGHDVTIIEMDRDRAKELSLMINGLVIEGDATDTKTLEEANIKQADAFAALTGRDDANLLACILAKSLNPNIKTSLRVSNPKNRRIFEEVKDLKKYFDFVISPEEIAAEYISRNIVTPGFDRVLFPKEGAEIVRFTIDENSKVAGKLVKDLNLPRDALIVAIYDGKGNLIIPSGDTKLPEKGQIIIFAKNSALKEVKELFEDRKEESE

SEQ ID NO: 598 - protein, 663 aa, Thermococcus kodakaraensis KOD1
  misc_feature (414542)..(414542): n is a or c or g or t.
  misc_feature (786890)..(786890): n is a or c or g or t.
  misc_feature (786907)..(786907): n is a or c or g or t.
  misc_feature (786944)..(786946): n is a or c or g or t.
  misc_feature (839139)..(839139): n is a or c or g or t.
  misc_feature (1128488)..(1128488): n is a or c or g or t.
  misc_feature (1128499)..(1128499): n is a or c or g or t.
  misc_feature (1128505)..(1128506): n is a or c or g or t.
  misc_feature (1128517)..(1128518): n is a or c or g or t.
  misc_feature (1128539)..(1128540): n is a or c or g or t.
  misc_feature (1561400)..(1561400): n is a or c or g or t.
  misc_feature (1561477)..(1561477): n is a or c or g or t.
  misc_feature (1561545)..(1561545): n is a or c or g or t.
  misc_feature (1767941)..(1767941): n is a or c or g or t.
VFRPEEMVKLEVITLNRYKDTLLTYLHEAGAVEVREVKVELAQKDTPNEYHRKAASYSISMSRLVEFLGTYRKAAGGGIKEFFFPKEKPKRTYRYERLEKLIKDVEEFLGKVEPEIKAIEGRMNSLSTEIERIKEQIGILDILTPLNIDVSYLRHCGVVEVTVGLVDRTRVKELADALKKETENHVAIITKEASDKALVVIVNLARDHDKVNTLLAKFSVEKLEIPEGEGTPKELMKEYSKKLAEKEKELEEAKKEASKLAEKYYDDVLFYKELVDNERDKSTVLPMLARTNMTFALTGWVPRPDVQKILEGIKRITEGKAYINVREPRKEELEEMPVKLKNPGWARPFEMLTEMYGVPRHDEIDPTPIIAFTYSFFFGFMLTDFLYGLIVGIVAALLVKGHKKFNDGTYKFAYILLWSAFFTMLLGALFGSYFGNAADIMLQYITGDQNAHAWRLLDPLREPMPMLLAALAIGLAHLFLGYTLGFVIKWKNGDRKGAVFEQLPWMIIIIGVALLASQREGLDAAAKAILGTGIALFAVGELVINGGLAALMIISDFFGFVGNWLSYARLMALALATGGIAMVINVLVGMVWAIKFLYIGPIIGLIIFFGGQLFSTAINALGAFVHALRLHYVEFFGTFYSGEGKRFEPFKSKREVSKLELEV

SEQ ID NO: 599 - protein, 102 aa, Thermococcus kodakaraensis KOD1
  misc_feature (414542)..(414542): n is a or c or g or t.
  misc_feature (786890)..(786890): n is a or c or g or t.
  misc_feature (786907)..(786907): n is a or c or g or t.
  misc_feature (786944)..(786946): n is a or c or g or t.
  misc_feature (839139)..(839139): n is a or c or g or t.
  misc_feature (1128488)..(1128488): n is a or c or g or t.
  misc_feature (1128499)..(1128499): n is a or c or g or t.
  misc_feature (1128505)..(1128506): n is a or c or g or t.
  misc_feature (1128517)..(1128518): n is a or c or g or t.
  misc_feature (1128539)..(1128540): n is a or c or g or t.
  misc_feature (1561400)..(1561400): n is a or c or g or t.
  misc_feature (1561477)..(1561477): n is a or c or g or t.
  misc_feature (1561545)..(1561545): n is a or c or g or t.
  misc_feature (1767941)..(1767941): n is a or c or g or t.
MKIAVLGDSDTVLGFRLAGVHEAYAFEETPLDIERLKNKLNELIEREDVGIILITERLAEKVEIPDVKLPIILQVPDKSGSKLGEKALREIVRRAIGVELKR

SEQ ID NO: 600 - protein, 336 aa, Thermococcus kodakaraensis KOD1
  misc_feature (414542)..(414542): n is a or c or g or t.
  misc_feature (786890)..(786890): n is a or c or g or t.
  misc_feature (786907)..(786907): n is a or c or g or t.
  misc_feature (786944)..(786946): n is a or c or g or t.
  misc_feature (839139)..(839139): n is a or c or g or t.
  misc_feature (1128488)..(1128488): n is a or c or g or t.
  misc_feature (1128499)..(1128499): n is a or c or g or t.
  misc_feature (1128505)..(1128506): n is a or c or g or t.
  misc_feature (1128517)..(1128518): n is a or c or g or t.
  misc_feature (1128539)..(1128540): n is a or c or g or t.
  misc_feature (1561400)..(1561400): n is a or c or g or t.
  misc_feature (1561477)..(1561477): n is a or c or g or t.
  misc_feature (1561545)..(1561545): n is a or c or g or t.
  misc_feature (1767941)..(1767941): n is a or c or g or t.
MGRIIRVTGPLVVADGMKGAKMYEVVRVGEIGLIGEIIRLEGDKAVIQVYEETAGIRPGEPVEGTGSSLSVELGPGLLTAMYDGIQRPLEVLRQLSGDFIARGLTAPALPRDKKWHFTPKVKVGDKVVGGDVLGVVPETSIIEHKILVPPWVEGEIVEIAEEGDYTVEEVIAKVKKPDGTIEELKMYHRWPVRVKRPYKQKLPPEVPLITGQRTIDTFFSQAKGGTAAIPGPFGSGKTVTQHQLAKWSDAQVVVYIGCGERGNEMTDVLEEFPKLKDPKTGKPLMERTVLIANTSNMPVAAREASIYTGITIAEYFRDQGYDVAHGVRHKMGRGPP

SEQ ID NO: 601 - protein, 258 aa, Thermococcus kodakaraensis KOD1
  misc_feature (414542)..(414542): n is a or c or g or t.
  misc_feature (786890)..(786890): n is a or c or g or t.
  misc_feature (786907)..(786907): n is a or c or g or t.
  misc_feature (786944)..(786946): n is a or c or g or t.
  misc_feature (839139)..(839139): n is a or c or g or t.
  misc_feature (1128488)..(1128488): n is a or c or g or t.
  misc_feature (1128499)..(1128499): n is a or c or g or t.
  misc_feature (1128505)..(1128506): n is a or c or g or t.
  misc_feature (1128517)..(1128518): n is a or c or g or t.
  misc_feature (1128539)..(1128540): n is a or c or g or t.
  misc_feature (1561400)..(1561400): n is a or c or g or t.
  misc_feature (1561477)..(1561477): n is a or c or g or t.
  misc_feature (1561545)..(1561545): n is a or c or g or t.
  misc_feature (1767941)..(1767941): n is a or c or g or t.
VVAMGEYFIEPGLDPRKDHVLYRDEEHTVVYLGTQEGGEDVDVNSYLIVSRGRGFLLDPGGYKIFSKVLANASKYVDPRNIEYIYICHQDPDVAGSLPLWREISNAKIVTHWLWTRFLPHFGFEDSKSVTHELPDEGETLNFGATTLEFIPAHFLHSPGHFTVYDRRSKFLFTGDIGIALLDDPYIVVENMERHIQAMRPIHERLMASNRAIKAWLNRVRHLDVEAILPQHGAIIPKRHIPRFYDFLENLKCGVDLLR

SEQ ID NO: 602 - protein, 251 aa, Thermococcus kodakaraensis KOD1
  misc_feature (414542)..(414542): n is a or c or g or t.
  misc_feature (786890)..(786890): n is a or c or g or t.
  misc_feature (786907)..(786907): n is a or c or g or t.
  misc_feature (786944)..(786946): n is a or c or g or t.
  misc_feature (839139)..(839139): n is a or c or g or t.
  misc_feature (1128488)..(1128488): n is a or c or g or t.
  misc_feature (1128499)..(1128499): n is a or c or g or t.
  misc_feature (1128505)..(1128506): n is a or c or g or t.
  misc_feature (1128517)..(1128518): n is a or c or g or t.
  misc_feature (1128539)..(1128540): n is a or c or g or t.
  misc_feature (1561400)..(1561400): n is a or c or g or t.
  misc_feature (1561477)..(1561477): n is a or c or g or t.
  misc_feature (1561545)..(1561545): n is a or c or g or t.
  misc_feature (1767941)..(1767941): n is a or c or g or t.
MDIRNIEKASSALAQSVRIKTSSKESSRIISELAEEISGQFMDNNTTIIENIAKLSEVMEQLETFQRDFLPFFQRFETFAKEFNTLVENLEYVSRISDSIATVAKQTNLVALNASIEAARAGDAGRGFAVVAEEIRKMAVQTMELAKEIKDFNSKVMNQLETLRDALAVMDRIKEGTEILGKDISTIVEISSVLSEISKEQEEIVNDIKRLNGIAVALKKFSEMQDRYNKELASLLRNMVSEYSKESGAND

SEQ ID NO: 603 - protein, 235 aa, Thermococcus kodakaraensis KOD1
  misc_feature (414542)..(414542): n is a or c or g or t.
  misc_feature (786890)..(786890): n is a or c or g or t.
  misc_feature (786907)..(786907): n is a or c or g or t.
  misc_feature (786944)..(786946): n is a or c or g or t.
  misc_feature (839139)..(839139): n is a or c or g or t.
  misc_feature (1128488)..(1128488): n is a or c or g or t.
  misc_feature (1128499)..(1128499): n is a or c or g or t.
  misc_feature (1128505)..(1128506): n is a or c or g or t.
  misc_feature (1128517)..(1128518): n is a or c or g or t.
  misc_feature (1128539)..(1128540): n is a or c or g or t.
  misc_feature (1561400)..(1561400): n is a or c or g or t.
  misc_feature (1561477)..(1561477): n is a or c or g or t.
  misc_feature (1561545)..(1561545): n is a or c or g or t.
  misc_feature (1767941)..(1767941): n is a or c or g or t.
VENETRTHDYSRIPFFQGKNLKPGSLVLIENISSPGAKLSFYALLKVSKEKGIPLIVEDIFDTLPIYVKHIELMGFHVPSESINVIKVAGIDSVGNVVEKLSFEADPNFYIPKKERAVSKIVGDNTPHILLILGLERLLMFQRNLRDLYPIVRYFRENLNSPNRATISIIETPVLNSIKPNPLPMLESVASSVIELYMENEALIVRPKKALSLFTVNAERFKVSLGDIVEVLREW

SEQ ID NO: 604 - protein, 284 aa, Thermococcus kodakaraensis KOD1
  misc_feature (414542)..(414542): n is a or c or g or t.
  misc_feature (786890)..(786890): n is a or c or g or t.
  misc_feature (786907)..(786907): n is a or c or g or t.
  misc_feature (786944)..(786946): n is a or c or g or t.
  misc_feature (839139)..(839139): n is a or c or g or t.
  misc_feature (1128488)..(1128488): n is a or c or g or t.
  misc_feature (1128499)..(1128499): n is a or c or g or t.
  misc_feature (1128505)..(1128506): n is a or c or g or t.
  misc_feature (1128517)..(1128518): n is a or c or g or t.
  misc_feature (1128539)..(1128540): n is a or c or g or t.
  misc_feature (1561400)..(1561400): n is a or c or g or t.
  misc_feature (1561477)..(1561477): n is a or c or g or t.
  misc_feature (1561545)..(1561545): n is a or c or g or t.
  misc_feature (1767941)..(1767941): n is a or c or g or t.
VVKMIIWDDHFHVDPYHGLFLEAVKQFHRAGGTHLVVVYKTAHDYGFPGLRAEDFMKAMDFHVELVEKINRETPVKAYAVVGVHPAEFDYLARQKGLEYAKNEVMKALEYAQKLCLEGKAIGIGEIGRPHYEVPAEIWEASIELMKYGMSLAKEADCAVQLHTESFNEEKFRELGEYVKEVGIKPHKVVKHFSPPLVKVAEEVGVFPSVIASRKNIEEAIKQGNRFMMETDYIDDKRRPGAVLGPKTVPKRTKAFLQQGIFTEEDVYKIHVENPKKVYGVEIEG

SEQ ID NO: 605 - protein, 522 aa, Thermococcus kodakaraensis KOD1
  misc_feature (414542)..(414542): n is a or c or g or t.
  misc_feature (786890)..(786890): n is a or c or g or t.
  misc_feature (786907)..(786907): n is a or c or g or t.
  misc_feature (786944)..(786946): n is a or c or g or t.
  misc_feature (839139)..(839139): n is a or c or g or t.
  misc_feature (1128488)..(1128488): n is a or c or g or t.
  misc_feature (1128499)..(1128499): n is a or c or g or t.
  misc_feature (1128505)..(1128506): n is a or c or g or t.
  misc_feature (1128517)..(1128518): n is a or c or g or t.
  misc_feature (1128539)..(1128540): n is a or c or g or t.
  misc_feature (1561400)..(1561400): n is a or c or g or t.
  misc_feature (1561477)..(1561477): n is a or c or g or t.
  misc_feature (1561545)..(1561545): n is a or c or g or t.
  misc_feature (1767941)..(1767941): n is a or c or g or t.
MSMEEKLNELYERKKKILEMGGEKAIEKQHAKGKLTARERIEKLLDPGSFVEIGMFVKHRGTEFGLDKKELPADGVITGYGTIDGRLVFVYAQDFTVMGGSLGEMHAAKIKRIMELALEAGAPVIGLNDSGGARIQEGVDSLKGYGEIFKMNTLLSGVVPQITAIMGPCAGGAVYSPAIGDFILMVDSDSSFMFITGPQVVKAVTGVEVTPVQLGGAMIHAQKSGQAHLIGKSDEEVLALIRRLLSYLPSNNMEKPPRVKTNDLPFRKTENLYNIVPDDPNKGYDVRQVIYEIVDRDENGNPDFLEILPYFAPNAVVGFGRMNGQTVGIVANNPIYFAGVLDIDSSDKIARFVRTCDAFNIPIVTLVDVPGYLPGTDQEYRGIIRHGAKVLYAYAEATVPMVTVILRKAYGGAYLAMGSKHLGADFVFAWPTAEIAVMGPEGAANIIFRKEIAAAENPEEVRQQKIQEYREKFANPYVAAARGYIDDVIDPAETRAKIILALEAMESKRVKLPPKKHGNIPL

SEQ ID NO: 606 - protein, 160 aa, Thermococcus kodakaraensis KOD1
  misc_feature (414542)..(414542): n is a or c or g or t.
  misc_feature (786890)..(786890): n is a or c or g or t.
  misc_feature (786907)..(786907): n is a or c or g or t.
  misc_feature (786944)..(786946): n is a or c or g or t.
  misc_feature (839139)..(839139): n is a or c or g or t.
  misc_feature (1128488)..(1128488): n is a or c or g or t.
  misc_feature (1128499)..(1128499): n is a or c or g or t.
  misc_feature (1128505)..(1128506): n is a or c or g or t.
  misc_feature (1128517)..(1128518): n is a or c or g or t.
  misc_feature (1128539)..(1128540): n is a or c or g or t.
  misc_feature (1561400)..(1561400): n is a or c or g or t.
  misc_feature (1561477)..(1561477): n is a or c or g or t.
  misc_feature (1561545)..(1561545): n is a or c or g or t.
  misc_feature (1767941)..(1767941): n is a or c or g or t.
VVRMAKVKVIVEGVEYEVEVEELPGGKFRVSFEDKTYEVEAKGLGIDMSALASAQVSAPAPAPSTPSAPSPVPALAPAPATPSPAPAAAGEGVVTAPMPGKILKILVKEGEQVKTGQGLLILEAMKMENEIPAPKDGVVKKILVKEGDTVNTGDPLIEIG

SEQ ID NO: 607 - protein, 397 aa, Thermococcus kodakaraensis KOD1
  misc_feature (414542)..(414542): n is a or c or g or t.
  misc_feature (786890)..(786890): n is a or c or g or t.
  misc_feature (786907)..(786907): n is a or c or g or t.
  misc_feature (786944)..(786946): n is a or c or g or t.
  misc_feature (839139)..(839139): n is a or c or g or t.
  misc_feature (1128488)..(1128488): n is a or c or g or t.
  misc_feature (1128499)..(1128499): n is a or c or g or t.
  misc_feature (1128505)..(1128506): n is a or c or g or t.
  misc_feature (1128517)..(1128518): n is a or c or g or t.
  misc_feature (1128539)..(1128540): n is a or c or g or t.
  misc_feature (1561400)..(1561400): n is a or c or g or t.
  misc_feature (1561477)..(1561477): n is a or c or g or t.
  misc_feature (1561545)..(1561545): n is a or c or g or t.
  misc_feature (1767941)..(1767941): n is a or c or g or t.
MATFVDFINTLGLLHLTVGNVVMILVGLTLVYLAIRYEMEPLLLLPIGITAVLVNLPLSHVANWPVAVNLPENVSDSIFKTIAYMSEHYGEPGLFDLIYYLLIKTEVVPLLIFFGLGAMTDFGPMIADPKTALLGAAAQIGVFVAMLTALALGFNLHQAASIGIIGGADGPTTIYLTTKLAPEILAATAVAAYSYMSLVPLIQPPIIKALTSPEERKIRMEQLRPVSKREKILFPIISMIVIGLLVPSAAPLIGMLMIGNLFRESGVVERLSKAAQEELMNIVTIFLGLGVGSTMRAESFLTAQTLMILGLGVVAFASATAGGVFFGKIMMKLSGGRINPMIGAAGVSAVPMSARVVQRIAREEDPGNFILMHAMGPNVAGVIGTAVVAGVFLALLG

SEQ ID NO: 608 - protein, 283 aa, Thermococcus kodakaraensis KOD1
  misc_feature (414542)..(414542): n is a or c or g or t.
  misc_feature (786890)..(786890): n is a or c or g or t.
  misc_feature (786907)..(786907): n is a or c or g or t.
  misc_feature (786944)..(786946): n is a or c or g or t.
  misc_feature (839139)..(839139): n is a or c or g or t.
  misc_feature (1128488)..(1128488): n is a or c or g or t.
  misc_feature (1128499)..(1128499): n is a or c or g or t.
  misc_feature (1128505)..(1128506): n is a or c or g or t.
  misc_feature (1128517)..(1128518): n is a or c or g or t.
  misc_feature (1128539)..(1128540): n is a or c or g or t.
  misc_feature (1561400)..(1561400): n is a or c or g or t.
  misc_feature (1561477)..(1561477): n is a or c or g or t.
  misc_feature (1561545)..(1561545): n is a or c or g or t.
  misc_feature (1767941)..(1767941): n is a or c or g or t.
VVKMRVKTLMTKDPVVIQLPATREYAIELFRKHKVRSFPVVGKDGKLVGIVSIKRVLLHPDEDQLAMLVKREVPTVKANDDLKKAVKKMLEMDYRRVVVVDDENRPVGILTVGDIVRRYLSKNEKLKEVTIEPYYQRNVSVVWRGTPLKAALKALLLCNAMAIPVIDDDGNLIGMVDETDLLRDSEVVRVMKSTELAASSEEDWILESHPTLLFEKAELQLPKKPVEEIMNPNVVVATPHMSVYDVAQKMVKYEIEQLPVIRGQDELVGIVRDMDIIKVILNK

SEQ ID NO: 609 - protein, 337 aa, Thermococcus kodakaraensis KOD1
  misc_feature (414542)..(414542): n is a or c or g or t.
  misc_feature (786890)..(786890): n is a or c or g or t.
  misc_feature (786907)..(786907): n is a or c or g or t.
  misc_feature (786944)..(786946): n is a or c or g or t.
  misc_feature (839139)..(839139): n is a or c or g or t.
  misc_feature (1128488)..(1128488): n is a or c or g or t.
  misc_feature (1128499)..(1128499): n is a or c or g or t.
  misc_feature (1128505)..(1128506): n is a or c or g or t.
  misc_feature (1128517)..(1128518): n is a or c or g or t.
  misc_feature (1128539)..(1128540): n is a or c or g or t.
  misc_feature (1561400)..(1561400): n is a or c or g or t.
  misc_feature (1561477)..(1561477): n is a or c or g or t.
  misc_feature (1561545)..(1561545): n is a or c or g or t.
  misc_feature (1767941)..(1767941): n is a or c or g or t.
VVFLREIRVSLIGFGNVGRATAGVLLEKSRLFEERYGVRISVVSISDTSGTVWLPEGIDLREALLVKENFGRLSAWTNDYEVYELTPEEIVGEVDSEIVVDVTNDKEAWTWHLRALKEGKGIVTSNKPPLAYHYREILNEAEKRELPYLFEATVMAGTPIVGLLRENLLGDDVQRIEAVLNATTTFILTQMEMGLSFEEALAKAQRLGIAERDPSGDILGIDAGYKATILHCLAFHPITYNEIEVRGIAEVTEGDIERAKAKGKTIRLVARIEKGNVAVEPAEIPKESPLAVESHENAAVIKTDLLGELLIKGAGAGLKETASGVISDVIKAALRLV

SEQ ID NO: 610 - protein, 155 aa, Thermococcus kodakaraensis KOD1
  misc_feature (414542)..(414542): n is a or c or g or t.
  misc_feature (786890)..(786890): n is a or c or g or t.
  misc_feature (786907)..(786907): n is a or c or g or t.
  misc_feature (786944)..(786946): n is a or c or g or t.
  misc_feature (839139)..(839139): n is a or c or g or t.
  misc_feature (1128488)..(1128488): n is a or c or g or t.
  misc_feature (1128499)..(1128499): n is a or c or g or t.
  misc_feature (1128505)..(1128506): n is a or c or g or t.
  misc_feature (1128517)..(1128518): n is a or c or g or t.
  misc_feature (1128539)..(1128540): n is a or c or g or t.
  misc_feature (1561400)..(1561400): n is a or c or g or t.
  misc_feature (1561477)..(1561477): n is a or c or g or t.
  misc_feature (1561545)..(1561545): n is a or c or g or t.
  misc_feature (1767941)..(1767941): n is a or c or g or t.
MKCPFCSPKRENLLYEDELIRVILDEYPANRGHVLVVPRRHIEAWEELDEKEKIALMQGVDLSMKALKQTLNPDGFNVGINLGEAAGQTVSHIHIHVIPRWKGDCNRPRGGVRKAVLDIEDENLTMKERWEKNRLGREEVESLRKAFLSLLGEGT

SEQ ID NO: 611 - protein, 102 aa, Thermococcus kodakaraensis KOD1
  misc_feature (414542)..(414542): n is a or c or g or t.
  misc_feature (786890)..(786890): n is a or c or g or t.
  misc_feature (786907)..(786907): n is a or c or g or t.
  misc_feature (786944)..(786946): n is a or c or g or t.
  misc_feature (839139)..(839139): n is a or c or g or t.
  misc_feature (1128488)..(1128488): n is a or c or g or t.
  misc_feature (1128499)..(1128499): n is a or c or g or t.
  misc_feature (1128505)..(1128506): n is a or c or g or t.
  misc_feature (1128517)..(1128518): n is a or c or g or t.
  misc_feature (1128539)..(1128540): n is a or c or g or t.
  misc_feature (1561400)..(1561400): n is a or c or g or t.
  misc_feature (1561477)..(1561477): n is a or c or g or t.
  misc_feature (1561545)..(1561545): n is a or c or g or t.
  misc_feature (1767941)..(1767941): n is a or c or g or t.
VFDMIKRVLLGFMGIHILHHASKGEVTGSFMMEELKRHGYSVSPGTIYPLLHRMEELGLLESQWGVKNGKRVRLYRTTPEGEELLKRAKEKVRELCSELLEE

SEQ ID NO: 612 - protein, 398 aa, Thermococcus kodakaraensis KOD1
  misc_feature (414542)..(414542): n is a or c or g or t.
  misc_feature (786890)..(786890): n is a or c or g or t.
  misc_feature (786907)..(786907): n is a or c or g or t.
  misc_feature (786944)..(786946): n is a or c or g or t.
  misc_feature (839139)..(839139): n is a or c or g or t.
  misc_feature (1128488)..(1128488): n is a or c or g or t.
  misc_feature (1128499)..(1128499): n is a or c or g or t.
  misc_feature (1128505)..(1128506): n is a or c or g or t.
  misc_feature (1128517)..(1128518): n is a or c or g or t.
  misc_feature (1128539)..(1128540): n is a or c or g or t.
  misc_feature (1561400)..(1561400): n is a or c or g or t.
  misc_feature (1561477)..(1561477): n is a or c or g or t.
  misc_feature (1561545)..(1561545): n is a or c or g or t.
  misc_feature (1767941)..(1767941): n is a or c or g or t.
MGNGEKGTNERKIFGISWNVFLLGIVSFLNDMSSEMISPIVPSYLTDVLGEGKLISGSIMGAIESMSSLFKVAFGYVSDRFKKRKAFVFIGYALSTLAKGALAFTRSWWDFLTLRALDRIGKGIRTAPRDALIAESSEKGKSGKSFGFHRMMDTLGAVAGPLVAIGILKLLEGLPVEKAYRYVFLLSAVPGLISLLVILLFVKDRGAEVKKKITGISTLRDRNLQLFLAVVALGALGRYSYAFTLWKAEELGYTVVQGMAFYALFNTIYALSAYPIGIYSDRLGKKRMITAGFAVAALASLAFAYARDLATLVGAFALYGLYIAIEDTVPRAYMADLAKDYEKGTIIGAYHTVFGLFVLPASVIAGYLWKTYSLTYSFLFSAAMNLLALVLMLLVPER

SEQ ID NO: 613 - protein, 71 aa, Thermococcus kodakaraensis KOD1
  misc_feature (414542)..(414542): n is a or c or g or t.
  misc_feature (786890)..(786890): n is a or c or g or t.
  misc_feature (786907)..(786907): n is a or c or g or t.
  misc_feature (786944)..(786946): n is a or c or g or t.
  misc_feature (839139)..(839139): n is a or c or g or t.
  misc_feature (1128488)..(1128488): n is a or c or g or t.
  misc_feature (1128499)..(1128499): n is a or c or g or t.
  misc_feature (1128505)..(1128506): n is a or c or g or t.
  misc_feature (1128517)..(1128518): n is a or c or g or t.
  misc_feature (1128539)..(1128540): n is a or c or g or t.
  misc_feature (1561400)..(1561400): n is a or c or g or t.
  misc_feature (1561477)..(1561477): n is a or c or g or t.
  misc_feature (1561545)..(1561545): n is a or c or g or t.
  misc_feature (1767941)..(1767941): n is a or c or g or t.
MRRVCSGVGYQLKEEKGTLIIFPQKRGVEPLRIKKEGDGFAKTNLIEPEHSIYLLILHSVSSFGSVSVWED

SEQ ID NO: 614 - protein, 261 aa, Thermococcus kodakaraensis KOD1
  misc_feature (414542)..(414542): n is a or c or g or t.
  misc_feature (786890)..(786890): n is a or c or g or t.
  misc_feature (786907)..(786907): n is a or c or g or t.
  misc_feature (786944)..(786946): n is a or c or g or t.
  misc_feature (839139)..(839139): n is a or c or g or t.
  misc_feature (1128488)..(1128488): n is a or c or g or t.
  misc_feature (1128499)..(1128499): n is a or c or g or t.
  misc_feature (1128505)..(1128506): n is a or c or g or t.
  misc_feature (1128517)..(1128518): n is a or c or g or t.
  misc_feature (1128539)..(1128540): n is a or c or g or t.
  misc_feature (1561400)..(1561400): n is a or c or g or t.
  misc_feature (1561477)..(1561477): n is a or c or g or t.
  misc_feature (1561545)..(1561545): n is a or c or g or t.
  misc_feature (1767941)..(1767941): n is a or c or g or t.
MVNIPKSHPRYWSLYYREKIIEGMEKGMTAKAGLIAHGRGEAFDYLIGERTIEPAERAMRAAVAKFLLAEHPVISVNGNVAALVPKETIELAKALNAKLEINLFYRTEERVRTIAEELRKYDPEIEILGINPTKRIPGLEHERGKVDENGIWKADVVLVPLEDGDRTEALVRMGKFVVTVDLNPLSRSARMADITIVDNIVRAYPRMVELAREMKDYSREELLKIVGEYDNGKTLSDVLLHIRDRLTRLAEEGIWRRKELE

SEQ ID NO: 615 - protein, 587 aa, Thermococcus kodakaraensis KOD1
  misc_feature (414542)..(414542): n is a or c or g or t.
  misc_feature (786890)..(786890): n is a or c or g or t.
  misc_feature (786907)..(786907): n is a or c or g or t.
  misc_feature (786944)..(786946): n is a or c or g or t.
  misc_feature (839139)..(839139): n is a or c or g or t.
  misc_feature (1128488)..(1128488): n is a or c or g or t.
  misc_feature (1128499)..(1128499): n is a or c or g or t.
  misc_feature (1128505)..(1128506): n is a or c or g or t.
  misc_feature (1128517)..(1128518): n is a or c or g or t.
  misc_feature (1128539)..(1128540): n is a or c or g or t.
  misc_feature (1561400)..(1561400): n is a or c or g or t.
  misc_feature (1561477)..(1561477): n is a or c or g or t.
  misc_feature (1561545)..(1561545): n is a or c or g or t.
  misc_feature (1767941)..(1767941): n is a or c or g or t.
VVGMRRVLATILIVGFMLSLISSPVLVSAEIRPYVYEPTVPDTAFAVLALYKTGDYDRVLEGCEWLMAIRTPFDSWGYAYSEEHEAKYTAMAIMALIRGESIANGRYKDVINSAAYWLIYKQKADGSWDDYLDAAMAAIALKELLGSKYVEENMTGLEDQLREGLNRALGWLQINEPENDVERIFRDIALEDKDDLEKLNVEGELKAYKAFALAYLGEKVSLEGNFSSPMAVAMALYATGDEKYREELLDMEHFGFWGRLHYRVLDLLDVSQISGFEELREIACPYLEKIPATEEWQKAVYAHYFVLCSKEPELPENYSSLLPWQVAEVARIKALLGKPYDDAVEYLLSSPNNGTWKDFYNTAYVVWVLKSLNVSYDYEKSLHYLSANLTWMLSEKNSKTGDPVYYSIPTYYFSQAAIVFSQFGMKDELNKTLEVLKERQYPNGAFAYTHQSVTGITTTARVVWNLEVAGLTDTEIYRKGVAFLRDMLYAEIPEVKPEMANTTFLRVDEGKYVGNTTGRVNPTGLDGYVAIYPPKNPLMIKAVAVEGFRAESPWKNRGLQHALVIVAVGVLLVAMYGVVWFENRKKR

SEQ ID NO: 616 - protein, 245 aa, Thermococcus kodakaraensis KOD1
  misc_feature (414542)..(414542): n is a or c or g or t.
  misc_feature (786890)..(786890): n is a or c or g or t.
  misc_feature (786907)..(786907): n is a or c or g or t.
  misc_feature (786944)..(786946): n is a or c or g or t.
  misc_feature (839139)..(839139): n is a or c or g or t.
  misc_feature (1128488)..(1128488): n is a or c or g or t.
  misc_feature (1128499)..(1128499): n is a or c or g or t.
  misc_feature (1128505)..(1128506): n is a or c or g or t.
  misc_feature (1128517)..(1128518): n is a or c or g or t.
  misc_feature (1128539)..(1128540): n is a or c or g or t.
  misc_feature (1561400)..(1561400): n is a or c or g or t.
  misc_feature (1561477)..(1561477): n is a or c or g or t.
  misc_feature (1561545)..(1561545): n is a or c or g or t.
  misc_feature (1767941)..(1767941): n is a or c or g or t.
VRSYGDGRLRYIPQRGKGIANARNIGVLKARGDFIAFLDDDDRWRKDKLELQLEAFGELPSNYGLVYTAFTYYYLERDKVLGIKHPKASGDVYGHLLKDNITGTSTIMVKRECFKKAGLFREDFVTCEDWDMWLRMAKVCRFGAIDEPLVDYSIHSGQFSFSKYLSGRYRMIDAHGDIRHDPRILSYHLLQIGVLKLFSGDRSGAREVLEAFRLNPVMRGNIRDILSSFLDVRTRIYILKFLGRL

SEQ ID NO: 617 - protein, 257 aa, Thermococcus kodakaraensis KOD1
  misc_feature (414542)..(414542): n is a or c or g or t.
  misc_feature (786890)..(786890): n is a or c or g or t.
  misc_feature (786907)..(786907): n is a or c or g or t.
  misc_feature (786944)..(786946): n is a or c or g or t.
  misc_feature (839139)..(839139): n is a or c or g or t.
  misc_feature (1128488)..(1128488): n is a or c or g or t.
  misc_feature (1128499)..(1128499): n is a or c or g or t.
  misc_feature (1128505)..(1128506): n is a or c or g or t.
  misc_feature (1128517)..(1128518): n is a or c or g or t.
  misc_feature (1128539)..(1128540): n is a or c or g or t.
  misc_feature (1561400)..(1561400): n is a or c or g or t.
  misc_feature (1561477)..(1561477): n is a or c or g or t.
  misc_feature (1561545)..(1561545): n is a or c or g or t.
  misc_feature (1767941)..(1767941): n is a or c or g or t.
VPQYPLYCLYLFGGKIMPKISILMPAYNEGENLRKAVIETMKELKGLDYEIIIINDGSRDNTPEVARELCESFRNVQLVSYSKNRGKGYALKKGFEKSNGEIIVFFDADLDIPPSQIKRFIKFLQNGYDVVIGSKYLPGARVRYSEKRRLFSIWYRTLVKLLLKLDVSDTQVGLKVFKREVLEKAFSKVLVKKYAFDVELLTVINMYGYKIYELPIKIEHKSFNSSINYRAIARMFLDTAAIVYRKNILHYYNGDKR

SEQ ID NO: 618 - protein, 485 aa, Thermococcus kodakaraensis KOD1
  misc_feature (414542)..(414542): n is a or c or g or t.
  misc_feature (786890)..(786890): n is a or c or g or t.
  misc_feature (786907)..(786907): n is a or c or g or t.
  misc_feature (786944)..(786946): n is a or c or g or t.
  misc_feature (839139)..(839139): n is a or c or g or t.
  misc_feature (1128488)..(1128488): n is a or c or g or t.
  misc_feature (1128499)..(1128499): n is a or c or g or t.
  misc_feature (1128505)..(1128506): n is a or c or g or t.
  misc_feature (1128517)..(1128518): n is a or c or g or t.
  misc_feature (1128539)..(1128540): n is a or c or g or t.
  misc_feature (1561400)..(1561400): n is a or c or g or t.
  misc_feature (1561477)..(1561477): n is a or c or g or t.
  misc_feature (1561545)..(1561545): n is a or c or g or t.
  misc_feature (1767941)..(1767941): n is a or c or g or t.
VNPMKKLVSLMLITMLFTFALAQKEWMGHGVNITLMENGIIKAASTRSGLNTLISPLFPINTTLKYSFSIRSESTNGVLAEIAYFDENRTFMFAKNVTVVGNGSFGWKNVEIVALPAEGATFSSLVIAINGTGMVYIDNFTVSEAKPTEKPEMESTTPTKTGAPKKTETTTSQEIGKGTIPYENSQKLSIDDDDIKVEVFLNKTYHPGDTIRADFYITNKKGVIYEIDIRLDVYYLGIKVFSYEHPSWREYREGKTVHIFQESKLPVITPPGRYTLKFYITPAGRETKELEGEITVKPNLEWILLVVFSAFSLLGIILLIRRYWRLLVKTYREFSIGQRFVFFAVVGLIIAAVILALGAENYANDVAIVVYYLLLVGVLNEWVEYLEPKWDRESIREVSSVYLLALLMYLSKDTFTVYPAIAIFALGTVVGLLRLQSKNGETPPGAKATVPKGKVSIEEIEIVGETEEGFIIYEIKSKSKKEKSG

SEQ ID NO: 619 - protein, 268 aa, Thermococcus kodakaraensis KOD1
  misc_feature (414542)..(414542): n is a or c or g or t.
  misc_feature (786890)..(786890): n is a or c or g or t.
  misc_feature (786907)..(786907): n is a or c or g or t.
  misc_feature (786944)..(786946): n is a or c or g or t.
  misc_feature (839139)..(839139): n is a or c or g or t.
  misc_feature (1128488)..(1128488): n is a or c or g or t.
  misc_feature (1128499)..(1128499): n is a or c or g or t.
  misc_feature (1128505)..(1128506): n is a or c or g or t.
  misc_feature (1128517)..(1128518): n is a or c or g or t.
  misc_feature (1128539)..(1128540): n is a or c or g or t.
  misc_feature (1561400)..(1561400): n is a or c or g or t.
  misc_feature (1561477)..(1561477): n is a or c or g or t.
  misc_feature (1561545)..(1561545): n is a or c or g or t.
  misc_feature (1767941)..(1767941): n is a or c or g or t.
MTRKIGIIFDMDGVIYRGSEPINGAKEVIEFLKERKIPFLFLTNNSTRDPAMYREKLLSMGIDVPEDVIVTSGLATRLYMEKHFEPGEVFVIGGKGLLREMERLGWGVVSLEDARKGAWKRIKHVVVGLDPELTYEKLKYGTLAIRNGASFIGTNPDTTYPAEEGLYPGAGAIIAALRASTDREPVIIGKPNEPAYEVVKDKLGDVEELWMVGDRLDTDIAFAKRFGMKAIMVLTGVSTLKDVAESGIKPNLVLPDVGELKRYLEAAL

SEQ ID NO: 620 - protein, 145 aa, Thermococcus kodakaraensis KOD1
  misc_feature (414542)..(414542): n is a or c or g or t.
  misc_feature (786890)..(786890): n is a or c or g or t.
  misc_feature (786907)..(786907): n is a or c or g or t.
  misc_feature (786944)..(786946): n is a or c or g or t.
  misc_feature (839139)..(839139): n is a or c or g or t.
  misc_feature (1128488)..(1128488): n is a or c or g or t.
  misc_feature (1128499)..(1128499): n is a or c or g or t.
  misc_feature (1128505)..(1128506): n is a or c or g or t.
  misc_feature (1128517)..(1128518): n is a or c or g or t.
  misc_feature (1128539)..(1128540): n is a or c or g or t.
  misc_feature (1561400)..(1561400): n is a or c or g or t.
  misc_feature (1561477)..(1561477): n is a or c or g or t.
  misc_feature (1561545)..(1561545): n is a or c or g or t.
  misc_feature (1767941)..(1767941): n is a or c or g or t.
MDAGELIKKIIWQENELYNLYKLGETFALFERPDLRDDFAQLAEEELRHRKTLEGLLSEGTIEGLLLDYMDELELEPMVHDERAHPDSLEELIVEALIREKHAYELYTKLSHILEGSLSQIFRMMAGEELKHAYRLRLIYEKIDG

SEQ ID NO: 621 - protein, 102 aa, Thermococcus kodakaraensis KOD1
  misc_feature (414542)..(414542): n is a or c or g or t.
  misc_feature (786890)..(786890): n is a or c or g or t.
  misc_feature (786907)..(786907): n is a or c or g or t.
  misc_feature (786944)..(786946): n is a or c or g or t.
  misc_feature (839139)..(839139): n is a or c or g or t.
  misc_feature (1128488)..(1128488): n is a or c or g or t.
  misc_feature (1128499)..(1128499): n is a or c or g or t.
  misc_feature (1128505)..(1128506): n is a or c or g or t.
  misc_feature (1128517)..(1128518): n is a or c or g or t.
  misc_feature (1128539)..(1128540): n is a or c or g or t.
  misc_feature (1561400)..(1561400): n is a or c or g or t.
  misc_feature (1561477)..(1561477): n is a or c or g or t.
  misc_feature (1561545)..(1561545): n is a or c or g or t.
  misc_feature (1767941)..(1767941): n is a or c or g or t.
MRREIRELLGEELANYLELLRAKLAFAEELYGVKMNYVPLITEGEVVVLDKNDGEVKWLRDKRPLTTEEFLRLLPKIKENLESGFVEMLLAMNMGCINGPGE

SEQ ID NO: 622 - protein, 275 aa, Thermococcus kodakaraensis KOD1
  misc_feature (414542)..(414542): n is a or c or g or t.
  misc_feature (786890)..(786890): n is a or c or g or t.
  misc_feature (786907)..(786907): n is a or c or g or t.
  misc_feature (786944)..(786946): n is a or c or g or t.
  misc_feature (839139)..(839139): n is a or c or g or t.
  misc_feature (1128488)..(1128488): n is a or c or g or t.
  misc_feature (1128499)..(1128499): n is a or c or g or t.
  misc_feature (1128505)..(1128506): n is a or c or g or t.
  misc_feature (1128517)..(1128518): n is a or c or g or t.
  misc_feature (1128539)..(1128540): n is a or c or g or t.
  misc_feature (1561400)..(1561400): n is a or c or g or t.
  misc_feature (1561477)..(1561477): n is a or c or g or t.
  misc_feature (1561545)..(1561545): n is a or c or g or t.
  misc_feature (1767941)..(1767941): n is a or c or g or t.
MKKAELALLGVTVFWGFTFPAMKVSLNYFPPILFLAYRFGLASLLMLLIFGRRALKRETFKEGFILGLTLFFGHGFQIVGLKYTTASNSAFITSLYVVLTPFIAYFMLGEKVTGRDLTSLVLAVIGLYLISGAGTSINYGDFLTLLCAVSFAFQIVLVHKFGEKDYLSLTFWQLFWNFIFSALFALAFEEPAFPREVLPWVGVIYTAVFATVIAFTVQLKYQRYTTAQRAALIYSSEPVFGSLAAYIALGETLSLRGYLGAALIMSGILNEVRKN

SEQ ID NO: 623 - protein, 300 aa, Thermococcus kodakaraensis KOD1
  misc_feature (414542)..(414542): n is a or c or g or t.
  misc_feature (786890)..(786890): n is a or c or g or t.
  misc_feature (786907)..(786907): n is a or c or g or t.
  misc_feature (786944)..(786946): n is a or c or g or t.
  misc_feature (839139)..(839139): n is a or c or g or t.
  misc_feature (1128488)..(1128488): n is a or c or g or t.
  misc_feature (1128499)..(1128499): n is a or c or g or t.
  misc_feature (1128505)..(1128506): n is a or c or g or t.
  misc_feature (1128517)..(1128518): n is a or c or g or t.
  misc_feature (1128539)..(1128540): n is a or c or g or t.
  misc_feature (1561400)..(1561400): n is a or c or g or t.
  misc_feature (1561477)..(1561477): n is a or c or g or t.
  misc_feature (1561545)..(1561545): n is a or c or g or t.
  misc_feature (1767941)..(1767941): n is a or c or g or t.
MKKTTAAALMLILPGMAAFLFFNLWPIVYSIYLAFTNAQLGNFPIYNPQSAVEPMHFVGLENFKWALSDDKFINAFKWTWIFVFTSVTLKALAGLFLSLLYNSKYVKGKAIYRSLLIIPWALPLLFSVTVWKFMFDPVFGPINLVLKSIGITGPDWVNNPTWGFVALNIIEVWLAYPFMMTVITAALQSVPDTLIEAAIIDGANYWQRIWNVVVPIVGKPIAFATILTSAASFQYFMVPYIYNAGLFEDRFLLLYGFRKAFGASPHYGRAAAIMVIATLILAVYMYVNVRITRLQEGARG

SEQ ID NO: 624 - protein, 133 aa, Thermococcus kodakaraensis KOD1
  misc_feature (414542)..(414542): n is a or c or g or t.
  misc_feature (786890)..(786890): n is a or c or g or t.
  misc_feature (786907)..(786907): n is a or c or g or t.
  misc_feature (786944)..(786946): n is a or c or g or t.
  misc_feature (839139)..(839139): n is a or c or g or t.
  misc_feature (1128488)..(1128488): n is a or c or g or t.
  misc_feature (1128499)..(1128499): n is a or c or g or t.
  misc_feature (1128505)..(1128506): n is a or c or g or t.
  misc_feature (1128517)..(1128518): n is a or c or g or t.
  misc_feature (1128539)..(1128540): n is a or c or g or t.
  misc_feature (1561400)..(1561400): n is a or c or g or t.
  misc_feature (1561477)..(1561477): n is a or c or g or t.
  misc_feature (1561545)..(1561545): n is a or c or g or t.
  misc_feature (1767941)..(1767941): n is a or c or g or t.
MPIEDFADFIASRVPKGKVVELGIGFQFKVALRLKELGYDVLAVDWNPASVEKAGELGINAVRDDLFSPNLELYRGVKALYSVRPTPEIVRSILELGKKLGVPVYILPLAGDVMPKTMRLINYRGLAIYVKDI

SEQ ID NO: 625 - protein, 431 aa, Thermococcus kodakaraensis KOD1
  misc_feature (414542)..(414542): n is a or c or g or t.
  misc_feature (786890)..(786890): n is a or c or g or t.
  misc_feature (786907)..(786907): n is a or c or g or t.
  misc_feature (786944)..(786946): n is a or c or g or t.
  misc_feature (839139)..(839139): n is a or c or g or t.
  misc_feature (1128488)..(1128488): n is a or c or g or t.
  misc_feature (1128499)..(1128499): n is a or c or g or t.
  misc_feature (1128505)..(1128506): n is a or c or g or t.
  misc_feature (1128517)..(1128518): n is a or c or g or t.
  misc_feature (1128539)..(1128540): n is a or c or g or t.
  misc_feature (1561400)..(1561400): n is a or c or g or t.
  misc_feature (1561477)..(1561477): n is a or c or g or t.
  misc_feature (1561545)..(1561545): n is a or c or g or t.
  misc_feature (1767941)..(1767941): n is a or c or g or t.
MKKSKMVITMSEVLEKVSLEIDRLRDEMVNTLIELIKIPAISPDYGGEGEYDKAQKLLEIIKDWPFDRVEVYEAPDERAKNGVRPSILAYYYGEEGEKSPRLWILTHLDVVPPGDLSKWTVTEPFKPVVKDGKVYGRGSEDNGQSLVASLYAVRAMMNLGIRPKRTVILAFVSDEETGSHYGVEWLIKNHPELFRKDDLVLVPDGGNEDGTFIEVAEKSILWFKLKVRGKQVHASMPDKGLNAHRVALDLAYHLDKLLHEKYNKKDELFEPPESTFEPTMVQNPADSPNIAPGEHEVVFDCRVLPDYSLDDILNDVKALADEVKERHKREIEGKVLPEIDVEILQRLDAPAPTDPNSEIVVLLKEAIKKLRGKEAKVGGIGGGTFAAFFRKLGVPAVVWATLDETAHQPNEYAKIDNMVEDAKVMAALALL

SEQ ID NO: 626 - protein, 19 aa, Thermococcus kodakaraensis KOD1
  misc_feature (414542)..(414542): n is a or c or g or t.
  misc_feature (786890)..(786890): n is a or c or g or t.
  misc_feature (786907)..(786907): n is a or c or g or t.
  misc_feature (786944)..(786946): n is a or c or g or t.
  misc_feature (839139)..(839139): n is a or c or g or t.
  misc_feature (1128488)..(1128488): n is a or c or g or t.
  misc_feature (1128499)..(1128499): n is a or c or g or t.
  misc_feature (1128505)..(1128506): n is a or c or g or t.
  misc_feature (1128517)..(1128518): n is a or c or g or t.
  misc_feature (1128539)..(1128540): n is a or c or g or t.
  misc_feature (1561400)..(1561400): n is a or c or g or t.
  misc_feature (1561477)..(1561477): n is a or c or g or t.
  misc_feature (1561545)..(1561545): n is a or c or g or t.
  misc_feature (1767941)..(1767941): n is a or c or g or t.
MTTSEIIDALMVMTITWDY

SEQ ID NO: 627 - protein, 446 aa, Thermococcus kodakaraensis KOD1
  misc_feature (414542)..(414542): n is a or c or g or t.
  misc_feature (786890)..(786890): n is a or c or g or t.
  misc_feature (786907)..(786907): n is a or c or g or t.
  misc_feature (786944)..(786946): n is a or c or g or t.
  misc_feature (839139)..(839139): n is a or c or g or t.
  misc_feature (1128488)..(1128488): n is a or c or g or t.
  misc_feature (1128499)..(1128499): n is a or c or g or t.
  misc_feature (1128505)..(1128506): n is a or c or g or t.
  misc_feature (1128517)..(1128518): n is a or c or g or t.
  misc_feature (1128539)..(1128540): n is a or c or g or t.
  misc_feature (1561400)..(1561400): n is a or c or g or t.
  misc_feature (1561477)..(1561477): n is a or c or g or t.
  misc_feature (1561545)..(1561545): n is a or c or g or t.
  misc_feature (1767941)..(1767941): n is a or c or g or t.
VIKMNEIKGIERAVQVEVPRPRFLLLAFTDINGSLKGMEIPMERYEEAVEDGVSFDGSSIPGFEGIEDSDLIFKADPSTYAEIPWEGIGRVYGYIYKGDEPYQADPRGILKRVLERLEKEGLKAHIGPEPEFYIFKKNGTWELHIPDSGGYFDLVGLDKAREIRREIALYMPYLGLKPEVLHHEVGKAQHEIDFRYDEALRTADNIVSFKHVVKAVAELHGYYATFMPKPIYGFPGNGMHLHISLWKDGENVFIGEDGLSDTALHFIGGILKHAKALAALTNPTVNSYKRLVPGYEAPVYISWGYRNRSALIRVPAFKGSGARIEYRCPDPSANPYLALAGILMVGLDGIKKKVEPDSYVETNVYEMDDAERERLGIDTLPGSLGEALEELKKDKTVREALGGAYKNFIDYKEREWEEYIEYLSSRDIPIDTKKVTEWELERYFYV

SEQ ID NO: 628 - protein, 61 aa, Thermococcus kodakaraensis KOD1
  misc_feature (414542)..(414542): n is a or c or g or t.
  misc_feature (786890)..(786890): n is a or c or g or t.
  misc_feature (786907)..(786907): n is a or c or g or t.
  misc_feature (786944)..(786946): n is a or c or g or t.
  misc_feature (839139)..(839139): n is a or c or g or t.
  misc_feature (1128488)..(1128488): n is a or c or g or t.
  misc_feature (1128499)..(1128499): n is a or c or g or t.
  misc_feature (1128505)..(1128506): n is a or c or g or t.
  misc_feature (1128517)..(1128518): n is a or c or g or t.
  misc_feature (1128539)..(1128540): n is a or c or g or t.
  misc_feature (1561400)..(1561400): n is a or c or g or t.
  misc_feature (1561477)..(1561477): n is a or c or g or t.
  misc_feature (1561545)..(1561545): n is a or c or g or t.
  misc_feature (1767941)..(1767941): n is a or c or g or t.
VFIGTLLSAFSGEADVEGGGVIMIGPIPIVFGTGRGVTLAMILAVLLMVLWIIGTLLARRG

SEQ ID NO: 629 - protein, 384 aa, Thermococcus kodakaraensis KOD1
  misc_feature (414542)..(414542): n is a or c or g or t.
  misc_feature (786890)..(786890): n is a or c or g or t.
  misc_feature (786907)..(786907): n is a or c or g or t.
  misc_feature (786944)..(786946): n is a or c or g or t.
  misc_feature (839139)..(839139): n is a or c or g or t.
  misc_feature (1128488)..(1128488): n is a or c or g or t.
  misc_feature (1128499)..(1128499): n is a or c or g or t.
  misc_feature (1128505)..(1128506): n is a or c or g or t.
  misc_feature (1128517)..(1128518): n is a or c or g or t.
  misc_feature (1128539)..(1128540): n is a or c or g or t.
  misc_feature (1561400)..(1561400): n is a or c or g or t.
  misc_feature (1561477)..(1561477): n is a or c or g or t.
  misc_feature (1561545)..(1561545): n is a or c or g or t.
  misc_feature (1767941)..(1767941): n is a or c or g or t.
MFPERGASEEEVLRELEEKTREDLTFDSGKILGSMCTYPHPFAVKVVMKYIDRNLGDPGLHIGSQKIEKEAVDMLANLLGLEKGYGHIVSGGTEANILAVRAMRNLAGIEKPELILPESAHFSFIKAAEMLGVKLVWAELNDDYTVNVKDVEKKITDRTIGIVGIAGTTGLGVVDDIPALSDLALDYGLPLHVDAAFGGFVIPFAKALGYEIPDFDFRLKGVKSITIDPHKMGMVPIPAGGIIFREKKFLDSISVLAPYLAGGKIWQATITGTRPGANALAVWAMIKHLGFDGYKEVVKEKMELARWFASELKKIPGIYLIREPVLNIVSFGSEKLEELEKELKARGWGVSAHRGYIRIVVMPHVKREHLEEFLRDLREIAKRL

SEQ ID NO: 630 - protein, 80 aa, Thermococcus kodakaraensis KOD1
  misc_feature (414542)..(414542): n is a or c or g or t.
  misc_feature (786890)..(786890): n is a or c or g or t.
  misc_feature (786907)..(786907): n is a or c or g or t.
  misc_feature (786944)..(786946): n is a or c or g or t.
  misc_feature (839139)..(839139): n is a or c or g or t.
  misc_feature (1128488)..(1128488): n is a or c or g or t.
  misc_feature (1128499)..(1128499): n is a or c or g or t.
  misc_feature (1128505)..(1128506): n is a or c or g or t.
  misc_feature (1128517)..(1128518): n is a or c or g or t.
  misc_feature (1128539)..(1128540): n is a or c or g or t.
  misc_feature (1561400)..(1561400): n is a or c or g or t.
  misc_feature (1561477)..(1561477): n is a or c or g or t.
  misc_feature (1561545)..(1561545): n is a or c or g or t.
  misc_feature (1767941)..(1767941): n is a or c or g or t.
MTTGVKVSVRLPPKLAEEIDSLVKAGLFSNRSDLIKEAIRHYLRELRKELTEEERWRLKAVEDVLKEDWESEEDSFWDSY

SEQ ID NO: 631 - protein, 37 aa, Thermococcus kodakaraensis KOD1
  misc_feature (414542)..(414542): n is a or c or g or t.
  misc_feature (786890)..(786890): n is a or c or g or t.
  misc_feature (786907)..(786907): n is a or c or g or t.
  misc_feature (786944)..(786946): n is a or c or g or t.
  misc_feature (839139)..(839139): n is a or c or g or t.
  misc_feature (1128488)..(1128488): n is a or c or g or t.
  misc_feature (1128499)..(1128499): n is a or c or g or t.
  misc_feature (1128505)..(1128506): n is a or c or g or t.
  misc_feature (1128517)..(1128518): n is a or c or g or t.
  misc_feature (1128539)..(1128540): n is a or c or g or t.
  misc_feature (1561400)..(1561400): n is a or c or g or t.
  misc_feature (1561477)..(1561477): n is a or c or g or t.
  misc_feature (1561545)..(1561545): n is a or c or g or t.
  misc_feature (1767941)..(1767941): n is a or c or g or t.
VIFSVNKRMVIKRIGLLREEKLAEVYESLMKALDLTQ

SEQ ID NO: 632 - protein, 514 aa, Thermococcus kodakaraensis KOD1
  misc_feature (414542)..(414542): n is a or c or g or t.
  misc_feature (786890)..(786890): n is a or c or g or t.
  misc_feature (786907)..(786907): n is a or c or g or t.
  misc_feature (786944)..(786946): n is a or c or g or t.
  misc_feature (839139)..(839139): n is a or c or g or t.
  misc_feature (1128488)..(1128488): n is a or c or g or t.
  misc_feature (1128499)..(1128499): n is a or c or g or t.
  misc_feature (1128505)..(1128506): n is a or c or g or t.
  misc_feature (1128517)..(1128518): n is a or c or g or t.
  misc_feature (1128539)..(1128540): n is a or c or g or t.
  misc_feature (1561400)..(1561400): n is a or c or g or t.
  misc_feature (1561477)..(1561477): n is a or c or g or t.
  misc_feature (1561545)..(1561545): n is a or c or g or t.
  misc_feature (1767941)..(1767941): n is a or c or g or t.
VKSLEGSEETLGKVAKGAGIVLAGTVVGMLLNFLTKAVLARYYERSQYGSFTLTVTVLSIAMTIALLGLQNGLSREIARHLQRDREVALKLASTGVLIGSSSSLALILLLFTLAPNLGNVLNDPYLNQTLRIASPALLPMVLTMIIVAISRGHGRVRENFYYRNVLPQLIFLVFLGMSFLLNLSFNWVFISYVAAWTIPALLGFLDGIKLGLLPKKPEFDWNLAKELLAFSFPLMLTGILDYVLGWTDSLMLGYYFGPDKVGLYNGAAPIARALPVVLNSLGFVFMPMATVFFTGGNIEGLKRLYQSTAKWGFILTFPAFLLVFAFPKGTINLFFGAKYTEAATALRILALGFMFHVVMGLNAMSLVAVGRTSDNLIGNLLAALLNVALNMALIPVYGINGAALATASSYIAANLYRVSILYRTTGVQPFGKTYVKALLIGALMLLLGLLLGDTGSIVGAILKTAILYGGYLILILLSGCIEKEEAENLEKLAEKAGVNLRWLIRAMERLSKDE

SEQ ID NO: 633 - protein, 100 aa, Thermococcus kodakaraensis KOD1
  misc_feature (414542)..(414542): n is a or c or g or t.
  misc_feature (786890)..(786890): n is a or c or g or t.
  misc_feature (786907)..(786907): n is a or c or g or t.
  misc_feature (786944)..(786946): n is a or c or g or t.
  misc_feature (839139)..(839139): n is a or c or g or t.
  misc_feature (1128488)..(1128488): n is a or c or g or t.
  misc_feature (1128499)..(1128499): n is a or c or g or t.
  misc_feature (1128505)..(1128506): n is a or c or g or t.
  misc_feature (1128517)..(1128518): n is a or c or g or t.
  misc_feature (1128539)..(1128540): n is a or c or g or t.
  misc_feature (1561400)..(1561400): n is a or c or g or t.
  misc_feature (1561477)..(1561477): n is a or c or g or t.
  misc_feature (1561545)..(1561545): n is a or c or g or t.
  misc_feature (1767941)..(1767941): n is a or c or g or t.
MEALRELSSNNVLGNPIRLAIMLYLLPRERALFRDLLEVLEVTPGNLDSHLKTLEREGYVEVFKIIADRPRTAVKITDRGAEETGKYLKALKKALEEIEG

SEQ ID NO: 634 - protein, 326 aa, Thermococcus kodakaraensis KOD1
  misc_feature (414542)..(414542): n is a or c or g or t.
  misc_feature (786890)..(786890): n is a or c or g or t.
  misc_feature (786907)..(786907): n is a or c or g or t.
  misc_feature (786944)..(786946): n is a or c or g or t.
  misc_feature (839139)..(839139): n is a or c or g or t.
  misc_feature (1128488)..(1128488): n is a or c or g or t.
  misc_feature (1128499)..(1128499): n is a or c or g or t.
  misc_feature (1128505)..(1128506): n is a or c or g or t.
  misc_feature (1128517)..(1128518): n is a or c or g or t.
  misc_feature (1128539)..(1128540): n is a or c or g or t.
  misc_feature (1561400)..(1561400): n is a or c or g or t.
  misc_feature (1561477)..(1561477): n is a or c or g or t.
  misc_feature (1561545)..(1561545): n is a or c or g or t.
  misc_feature (1767941)..(1767941): n is a or c or g or t.
MRELRFNPLTGQWIMVSAERKKRPWRPKNFCPFCPGTEETGYGWEVLLLPNRFPMLSFEAPKPEKVEFYKKARAIGQCSVIVETPEHGLKDLDELSREGMVKVVELWKEATRTLRENRHIAYVAIFRNKGEEIGVSLHHPHGQLYALPFIPLKVRLKIENSRRHFKKHGECLFCRILEEERKGGRVIYENDSFAVFLPFFASWPFELHVYPKRHVQYLTQLDGKESEDLADAVRATTATLNALFDRGMPYTMMIFQAPFKGRYPFYHLHIEFYPILRDANKVKFAAGIEMGTWEFTYDSVPEENAERLKEACGKIKEEKGLIGRCL

SEQ ID NO: 635 - protein, 393 aa, Thermococcus kodakaraensis KOD1
  misc_feature (414542)..(414542): n is a or c or g or t.
  misc_feature (786890)..(786890): n is a or c or g or t.
  misc_feature (786907)..(786907): n is a or c or g or t.
  misc_feature (786944)..(786946): n is a or c or g or t.
  misc_feature (839139)..(839139): n is a or c or g or t.
  misc_feature (1128488)..(1128488): n is a or c or g or t.
  misc_feature (1128499)..(1128499): n is a or c or g or t.
  misc_feature (1128505)..(1128506): n is a or c or g or t.
  misc_feature (1128517)..(1128518): n is a or c or g or t.
  misc_feature (1128539)..(1128540): n is a or c or g or t.
  misc_feature (1561400)..(1561400): n is a or c or g or t.
  misc_feature (1561477)..(1561477): n is a or c or g or t.
  misc_feature (1561545)..(1561545): n is a or c or g or t.
  misc_feature (1767941)..(1767941): n is a or c or g or t.
MPSETIKLTAKFKLKNPPEELNDLFSTYREIVNHLISYAFENNVTSFYRLKKETYKSLRKEYPELPSHYHYTATQMATMIYKSYRKRKKKGKANGRPVFKKDAIMLDDHLFKLDLEAGVIKLSTPSGRVELEFYPSKYHEKFRDWKIGQAWLVRTPKGVFINVVFSREVEVREPEAFVGVDLNENNVTLSLPNGEFVQILTHEREIRTGYFLKRRKIQKKLRTRKKRKELLEKYGQRERNRLDDLYHKLANKIVELAERYSGIALEDLTEIRDSIRYSAEVNGRLHRWSFRKLQNIIEYKAKLKGIKVVFVNPAYTSSLCPVCGRKLSPNGHRVLKCPKCGFEADRDVIGSWNISLRALKMWGVSVPPESPTMKTGVGKVGRSDVYELYTNYG

SEQ ID NO: 636 - protein, 278 aa, Thermococcus kodakaraensis KOD1
  misc_feature (414542)..(414542): n is a or c or g or t.
  misc_feature (786890)..(786890): n is a or c or g or t.
  misc_feature (786907)..(786907): n is a or c or g or t.
  misc_feature (786944)..(786946): n is a or c or g or t.
  misc_feature (839139)..(839139): n is a or c or g or t.
  misc_feature (1128488)..(1128488): n is a or c or g or t.
  misc_feature (1128499)..(1128499): n is a or c or g or t.
  misc_feature (1128505)..(1128506): n is a or c or g or t.
  misc_feature (1128517)..(1128518): n is a or c or g or t.
  misc_feature (1128539)..(1128540): n is a or c or g or t.
  misc_feature (1561400)..(1561400): n is a or c or g or t.
  misc_feature (1561477)..(1561477): n is a or c or g or t.
  misc_feature (1561545)..(1561545): n is a or c or g or t.
  misc_feature (1767941)..(1767941): n is a or c or g or t.
MLDLVVIGHVSIDTLIFPDGRRVTMPGGAAAGVATSAALAGAKVGLVTKIGTDFPKEWLQALSSVLDISGVQILPGKTIHIQMIYHEDGSVDAPVEMGVAQKMGEIPIPEEYLDAKVFHISPIPPEEQLKLLNRLKGKRVTVDFNPTYKEEYIKRRDLLREIVSRVEIVFPNEREALMITGAEDVKDAARILHGWGAKLVVITRGEKGVLVYDGSFREFPALPIKPEEIVDPTGGGDAFAGGFLAGYSRGRPLEECVRLGLERAREVLKKWGDWSITV

SEQ ID NO: 637 - protein, 365 aa, Thermococcus kodakaraensis KOD1
  misc_feature (414542)..(414542): n is a or c or g or t.
  misc_feature (786890)..(786890): n is a or c or g or t.
  misc_feature (786907)..(786907): n is a or c or g or t.
  misc_feature (786944)..(786946): n is a or c or g or t.
  misc_feature (839139)..(839139): n is a or c or g or t.
  misc_feature (1128488)..(1128488): n is a or c or g or t.
  misc_feature (1128499)..(1128499): n is a or c or g or t.
  misc_feature (1128505)..(1128506): n is a or c or g or t.
  misc_feature (1128517)..(1128518): n is a or c or g or t.
  misc_feature (1128539)..(1128540): n is a or c or g or t.
  misc_feature (1561400)..(1561400): n is a or c or g or t.
  misc_feature (1561477)..(1561477): n is a or c or g or t.
  misc_feature (1561545)..(1561545): n is a or c or g or t.
  misc_feature (1767941)..(1767941): n is a or c or g or t.
MRLLLTTSQGIEDIAGREVASLMERLGVPFRVEEKPLGVEGRLLLEAGEAYYTDEKGRKRELSIATYLNENSRLLHRVILEIASERFEGIGEDEPETALKRIEEFVSSLPVERFVKVSESFAVRPFRKGEHRITSVEIAKTVGEAIFERLSRFGSPKVNLDHPTVIFRAELVGEVFFLGIDTTGDSSLHKRPWRVYDHPAHLKASIANALIELAEPNGGSFIDPFCGSGTILIELALRGYKGRIIGLEKYRKHIRGAEMNALSAGVLDKIEFIQGDATKLSQYVESVDFAVSNLPYGLKIGRKSMIPRLYMAFFSELSKVLEKRGVFITTEKKAIERAILDNGFKIKHHRLIGHGGLMVHTYVVE

SEQ ID NO: 638 - protein, 386 aa, Thermococcus kodakaraensis KOD1
  misc_feature (414542)..(414542): n is a or c or g or t.
  misc_feature (786890)..(786890): n is a or c or g or t.
  misc_feature (786907)..(786907): n is a or c or g or t.
  misc_feature (786944)..(786946): n is a or c or g or t.
  misc_feature (839139)..(839139): n is a or c or g or t.
  misc_feature (1128488)..(1128488): n is a or c or g or t.
  misc_feature (1128499)..(1128499): n is a or c or g or t.
  misc_feature (1128505)..(1128506): n is a or c or g or t.
  misc_feature (1128517)..(1128518): n is a or c or g or t.
  misc_feature (1128539)..(1128540): n is a or c or g or t.
  misc_feature (1561400)..(1561400): n is a or c or g or t.
  misc_feature (1561477)..(1561477): n is a or c or g or t.
  misc_feature (1561545)..(1561545): n is a or c or g or t.
  misc_feature (1767941)..(1767941): n is a or c or g or t.
VKPMKKAISVFIVLLLGLSLVASGCISSEKSPSTSPSSTARASSQGTSQTKVITIRTTGATFPQYQIQKWIEIYMKSHPNVKIEYEGGGSGHGQEAFLKGLTHIGRTDPPVKESTWKKFLATGDQPLQFPEIVGAVVVAFNVPGVDELKLDGETLAKIFMGEIEYWDDDAIKAFNPSANLPHEKIIVVHRSDSSGTTAIFTTYLSLVNKEWADKVGAGKTVDWPVDKVGRGIGGKGNPGVVQALKNTKYSIAYTELSFAIEENLKVVALKNKAGNFVKPTDDAIKAAVAGVKAFIPSPTEGYKEDLNQLLNAPGENSYPIVAFTHLLVWQNKGGKHYSKEEVQAIKEFLRWVLTEGQKPENLAPGYVGLPPEVAKIGLQAVDMIEG

SEQ ID NO: 639 - protein, 274 aa, Thermococcus kodakaraensis KOD1
  misc_feature (414542)..(414542): n is a or c or g or t.
  misc_feature (786890)..(786890): n is a or c or g or t.
  misc_feature (786907)..(786907): n is a or c or g or t.
  misc_feature (786944)..(786946): n is a or c or g or t.
  misc_feature (839139)..(839139): n is a or c or g or t.
  misc_feature (1128488)..(1128488): n is a or c or g or t.
  misc_feature (1128499)..(1128499): n is a or c or g or t.
  misc_feature (1128505)..(1128506): n is a or c or g or t.
  misc_feature (1128517)..(1128518): n is a or c or g or t.
  misc_feature (1128539)..(1128540): n is a or c or g or t.
  misc_feature (1561400)..(1561400): n is a or c or g or t.
  misc_feature (1561477)..(1561477): n is a or c or g or t.
  misc_feature (1561545)..(1561545): n is a or c or g or t.
  misc_feature (1767941)..(1767941): n is a or c or g or t.
VRTMKLGVNSYIVKEISGKGFSLDELQVDFVELGFDDSGIIKNEEINWEALKNLKGIGVEFTLHAPTADGKNLPIDLGVYGKEPVKRMGKVIRIANHLGTEVIVVHGGDIGKSYTKAYVNTLRHLRKLKPIAEDHGVKLVVENLFEGRIGALPHELLPFVSEGFELCFDIGHAFLTSMNSGLKMDEFNVLFPYATHLHIHDNNGSRDEHRPLGEGMIGFSYASRVVELTKAERAVLEIRRYSGKGSIISNVSFFRNMPDENFSKIEKAEGGSEA

SEQ ID NO: 640 - protein, 276 aa, Thermococcus kodakaraensis KOD1
  misc_feature (414542)..(414542): n is a or c or g or t.
  misc_feature (786890)..(786890): n is a or c or g or t.
  misc_feature (786907)..(786907): n is a or c or g or t.
  misc_feature (786944)..(786946): n is a or c or g or t.
  misc_feature (839139)..(839139): n is a or c or g or t.
  misc_feature (1128488)..(1128488): n is a or c or g or t.
  misc_feature (1128499)..(1128499): n is a or c or g or t.
  misc_feature (1128505)..(1128506): n is a or c or g or t.
  misc_feature (1128517)..(1128518): n is a or c or g or t.
  misc_feature (1128539)..(1128540): n is a or c or g or t.
  misc_feature (1561400)..(1561400): n is a or c or g or t.
  misc_feature (1561477)..(1561477): n is a or c or g or t.
  misc_feature (1561545)..(1561545): n is a or c or g or t.
  misc_feature (1767941)..(1767941): n is a or c or g or t.
MSAFDRKTKEKAFFIGVGALTILIFIPLFHIIATVLIKGFPVIAERGTKFLTGTLSEGGIGPAIAGTFILTFLSALLGLPVAFLVGVYAYEYPKSTLGQWTKTLLQIMIEFPTILVGVFVMQVVAVPMGTYSALAGALALAIILTPYVAVYTHEALREIPSTYREAGFSLGLTRAKVVFRILAPMAKRGILTGVLIGMAKVTGETAPLLFTAGGLYESYPTSITKPVGAVPLLIYQLVQSPNPADHATAWGASLVLLLIFLGIFIPIRLSLKEVRL

SEQ ID NO: 641 - protein, 41 aa, Thermococcus kodakaraensis KOD1
  misc_feature (414542)..(414542): n is a or c or g or t.
  misc_feature (786890)..(786890): n is a or c or g or t.
  misc_feature (786907)..(786907): n is a or c or g or t.
  misc_feature (786944)..(786946): n is a or c or g or t.
  misc_feature (839139)..(839139): n is a or c or g or t.
  misc_feature (1128488)..(1128488): n is a or c or g or t.
  misc_feature (1128499)..(1128499): n is a or c or g or t.
  misc_feature (1128505)..(1128506): n is a or c or g or t.
  misc_feature (1128517)..(1128518): n is a or c or g or t.
  misc_feature (1128539)..(1128540): n is a or c or g or t.
  misc_feature (1561400)..(1561400): n is a or c or g or t.
  misc_feature (1561477)..(1561477): n is a or c or g or t.
  misc_feature (1561545)..(1561545): n is a or c or g or t.
  misc_feature (1767941)..(1767941): n is a or c or g or t.
MIKNLSVGLSMPVRLPYTERARLKFDLRASMPSLDIAHEGR

SEQ ID NO: 642 - protein, 58 aa, Thermococcus kodakaraensis KOD1
  misc_feature (414542)..(414542): n is a or c or g or t.
  misc_feature (786890)..(786890): n is a or c or g or t.
  misc_feature (786907)..(786907): n is a or c or g or t.
  misc_feature (786944)..(786946): n is a or c or g or t.
  misc_feature (839139)..(839139): n is a or c or g or t.
  misc_feature (1128488)..(1128488): n is a or c or g or t.
  misc_feature (1128499)..(1128499): n is a or c or g or t.
  misc_feature (1128505)..(1128506): n is a or c or g or t.
  misc_feature (1128517)..(1128518): n is a or c or g or t.
  misc_feature (1128539)..(1128540): n is a or c or g or t.
  misc_feature (1561400)..(1561400): n is a or c or g or t.
  misc_feature (1561477)..(1561477): n is a or c or g or t.
  misc_feature (1561545)..(1561545): n is a or c or g or t.
  misc_feature (1767941)..(1767941): n is a or c or g or t.
MEVVEAIYENGVLKLKKKLNLPDGTEVSVKLIPKKISEKTFGIVKLEKEEADKLIQDL

SEQ ID NO: 643 - protein, 221 aa, Thermococcus kodakaraensis KOD1
  misc_feature (414542)..(414542): n is a or c or g or t.
  misc_feature (786890)..(786890): n is a or c or g or t.
  misc_feature (786907)..(786907): n is a or c or g or t.
  misc_feature (786944)..(786946): n is a or c or g or t.
  misc_feature (839139)..(839139): n is a or c or g or t.
  misc_feature (1128488)..(1128488): n is a or c or g or t.
  misc_feature (1128499)..(1128499): n is a or c or g or t.
  misc_feature (1128505)..(1128506): n is a or c or g or t.
  misc_feature (1128517)..(1128518): n is a or c or g or t.
  misc_feature (1128539)..(1128540): n is a or c or g or t.
  misc_feature (1561400)..(1561400): n is a or c or g or t.
  misc_feature (1561477)..(1561477): n is a or c or g or t.
  misc_feature (1561545)..(1561545): n is a or c or g or t.
  misc_feature (1767941)..(1767941): n is a or c or g or t.
VMKFRKRTKELNARTLKETLERLNWVVEMAKVKVITDPEVIKLMLEDTRRKILQLLRNREMTISQLSEILGKTPQTIYHHIEKLKEAGLVEVKRTEMKGNLVEKYYGRTADAFYINLYLGDEELRYFARSRLKTKLEIFKALGYEFNDEELLNVMDELLKKEHDYKTEISKEIEVNEEKLKDFSNEDIIHAIEWLAMAKMGRDEEVLNLLRKLGEILKKEE

SEQ ID NO: 644 - protein, 101 aa, Thermococcus kodakaraensis KOD1
  misc_feature (414542)..(414542): n is a or c or g or t.
  misc_feature (786890)..(786890): n is a or c or g or t.
  misc_feature (786907)..(786907): n is a or c or g or t.
  misc_feature (786944)..(786946): n is a or c or g or t.
  misc_feature (839139)..(839139): n is a or c or g or t.
  misc_feature (1128488)..(1128488): n is a or c or g or t.
  misc_feature (1128499)..(1128499): n is a or c or g or t.
  misc_feature (1128505)..(1128506): n is a or c or g or t.
  misc_feature (1128517)..(1128518): n is a or c or g or t.
  misc_feature (1128539)..(1128540): n is a or c or g or t.
  misc_feature (1561400)..(1561400): n is a or c or g or t.
  misc_feature (1561477)..(1561477): n is a or c or g or t.
  misc_feature (1561545)..(1561545): n is a or c or g or t.
  misc_feature (1767941)..(1767941): n is a or c or g or t.
MARGIRLLVLDVLKPHQPMVTDLALGLSELEGVDGVNITLVEIDKETENVKITIMGDNLDYEEIVRTIEEFGGVVHSIDMVAAGKRIIEEEETPQDKLEEY

SEQ ID NO: 645 - protein, 185 aa, Thermococcus kodakaraensis KOD1
  misc_feature (414542)..(414542): n is a or c or g or t.
  misc_feature (786890)..(786890): n is a or c or g or t.
  misc_feature (786907)..(786907): n is a or c or g or t.
  misc_feature (786944)..(786946): n is a or c or g or t.
  misc_feature (839139)..(839139): n is a or c or g or t.
  misc_feature (1128488)..(1128488): n is a or c or g or t.
  misc_feature (1128499)..(1128499): n is a or c or g or t.
  misc_feature (1128505)..(1128506): n is a or c or g or t.
  misc_feature (1128517)..(1128518): n is a or c or g or t.
  misc_feature (1128539)..(1128540): n is a or c or g or t.
  misc_feature (1561400)..(1561400): n is a or c or g or t.
  misc_feature (1561477)..(1561477): n is a or c or g or t.
  misc_feature (1561545)..(1561545): n is a or c or g or t.
  misc_feature (1767941)..(1767941): n is a or c or g or t.
MREVLIITNPKTVKVLSDPTRFQILKLLRERPMSVNELSDLLGKDRTTVYRHIKALEAEGLVEEIDTEGNERIYARTARMFLIKAEPDESIEEFRQSYLQVEAERIVMILEKSGFQIKDREALKALIKEVLNTIELRSQPVIKRISDANIELTEIELFHLLNMLVFFQSCELCDHAKRVKDLISF

SEQ ID NO: 646 - protein, 112 aa, Thermococcus kodakaraensis KOD1
  misc_feature (414542)..(414542): n is a or c or g or t.
  misc_feature (786890)..(786890): n is a or c or g or t.
  misc_feature (786907)..(786907): n is a or c or g or t.
  misc_feature (786944)..(786946): n is a or c or g or t.
  misc_feature (839139)..(839139): n is a or c or g or t.
  misc_feature (1128488)..(1128488): n is a or c or g or t.
  misc_feature (1128499)..(1128499): n is a or c or g or t.
  misc_feature (1128505)..(1128506): n is a or c or g or t.
  misc_feature (1128517)..(1128518): n is a or c or g or t.
  misc_feature (1128539)..(1128540): n is a or c or g or t.
  misc_feature (1561400)..(1561400): n is a or c or g or t.
  misc_feature (1561477)..(1561477): n is a or c or g or t.
  misc_feature (1561545)..(1561545): n is a or c or g or t.
  misc_feature (1767941)..(1767941): n is a or c or g or t.
MIVEAIFGFLFMLGWALSYAYVARVKSTPRAILGVSLLYGVMLLFSKLRFESYKHGGSLLGWLMGIASGFFVGLWLVQKHGPDKMTEESAVAMLLVGPVILVGLLIAVMLLF

SEQ ID NO: 647 - protein, 210 aa, Thermococcus kodakaraensis KOD1
  misc_feature (414542)..(414542): n is a or c or g or t.
  misc_feature (786890)..(786890): n is a or c or g or t.
  misc_feature (786907)..(786907): n is a or c or g or t.
  misc_feature (786944)..(786946): n is a or c or g or t.
  misc_feature (839139)..(839139): n is a or c or g or t.
  misc_feature (1128488)..(1128488): n is a or c or g or t.
  misc_feature (1128499)..(1128499): n is a or c or g or t.
  misc_feature (1128505)..(1128506): n is a or c or g or t.
  misc_feature (1128517)..(1128518): n is a or c or g or t.
  misc_feature (1128539)..(1128540): n is a or c or g or t.
  misc_feature (1561400)..(1561400): n is a or c or g or t.
  misc_feature (1561477)..(1561477): n is a or c or g or t.
  misc_feature (1561545)..(1561545): n is a or c or g or t.
  misc_feature (1767941)..(1767941): n is a or c or g or t.
MNYSPVYVFSIEFENSPIGHAAVAIKINGEYFILDQHPPVMDLGTYYTDLAVYRQETLGERLFISNATVYEISRDKNGAIVREIGILSAEDFKQKDHVFSPTDLIRISTDLRKILEDRYPHLISDKNIANLEEKSYLPPGYSDGRIWRLNFPHYADYYNPVFHEQFVEYMLMALTNDENVKSDLKKFNRFWIKVEHEGDSLKVTLNLAKK

SEQ ID NO: 648 - protein, 735 aa, Thermococcus kodakaraensis KOD1
  misc_feature (414542)..(414542): n is a or c or g or t.
  misc_feature (786890)..(786890): n is a or c or g or t.
  misc_feature (786907)..(786907): n is a or c or g or t.
  misc_feature (786944)..(786946): n is a or c or g or t.
  misc_feature (839139)..(839139): n is a or c or g or t.
  misc_feature (1128488)..(1128488): n is a or c or g or t.
  misc_feature (1128499)..(1128499): n is a or c or g or t.
  misc_feature (1128505)..(1128506): n is a or c or g or t.
  misc_feature (1128517)..(1128518): n is a or c or g or t.
  misc_feature (1128539)..(1128540): n is a or c or g or t.
  misc_feature (1561400)..(1561400): n is a or c or g or t.
  misc_feature (1561477)..(1561477): n is a or c or g or t.
  misc_feature (1561545)..(1561545): n is a or c or g or t.
  misc_feature (1767941)..(1767941): n is a or c or g or t.
MLVEDLLKNNYLITPSAYYLLSDHYKKAFTLAELIKFAKNRGTFVVDSNLAREFLAEKGIISSGNGALDGSVLSGISVSESPVKPNGEAVLESESDESGAIESSLQEGVEDGVESIAEPSAASVEDVVVAGESSLASEGSSLEDEINTEPELSSSMDDGAEVVQSSEGDETSISTGNALGSVDYGGSDSESEALEEASSGGESFISTGTPEDEALLEESPEGEFPDENGFSDESLPVENGSENGYGDSEEYYENGDNGVKPKIVYGDYGVPIAYVADETPEEEKAYSTYSDLVIAPKEGFHYRAKEIPDEWELAFDVKNVKFEVPKVKNAQSKEGEVIIQAYSSYFKSRLKKMRRIFRENPEIGTIVDIAKLSYVREDDVTIIGLVNEKRETRKGYLFEIEDATGRIKVFIGSDKEGANEAYSTIMPDSVVAFRGTPGKGIFFANRVFLPDVPKFKRSKPPLEEKVYAILLSDIHVGSNKFCEEAFIKFLEWLNGEVNSRTEEELVSRIKYIIIGGDVVDGVGIYPGQYNELAIPDIFDQYEALANLLKQVPDHITMFIGPGNHDAARTALPQPGFYEEYAKPLYKLKNAVIISNPAVIRLHGRDFLVAHGRGIEDVVDFVPNRSHHRPAEAMVELLKLRHIAPTFGNKVPIAPDPEDTLVIESVPDLFQAGHVHVMQYKTYNGVFVINTGTWQAQTEFQKMVNIIPTPARVPIIDVETARLRAVVRFDQFCEGV

SEQ ID NO: 649 - protein, 1798 aa, Thermococcus kodakaraensis KOD1
  misc_feature (414542)..(414542): n is a or c or g or t.
  misc_feature (786890)..(786890): n is a or c or g or t.
  misc_feature (786907)..(786907): n is a or c or g or t.
  misc_feature (786944)..(786946): n is a or c or g or t.
  misc_feature (839139)..(839139): n is a or c or g or t.
  misc_feature (1128488)..(1128488): n is a or c or g or t.
  misc_feature (1128499)..(1128499): n is a or c or g or t.
  misc_feature (1128505)..(1128506): n is a or c or g or t.
  misc_feature (1128517)..(1128518): n is a or c or g or t.
  misc_feature (1128539)..(1128540): n is a or c or g or t.
  misc_feature (1561400)..(1561400): n is a or c or g or t.
  misc_feature (1561477)..(1561477): n is a or c or g or t.
  misc_feature (1561545)..(1561545): n is a or c or g or t.
  misc_feature (1767941)..(1767941): n is a or c or g or t.
MSEEIYSPEMKAYFESLQREIDRAYAIARKARAQGKDPSFDVEVPQATDMAGRVESLVGPPGVAERIRELVKEYGKEIAALKVVDEIIEGKFGDLGSKEKYAEQAVRTALAILTEGIVSAPLEGIADVKIKRNEWADGSEYLALYYAGPIRSSGGTAQALSVLVGDYVRRKLGLDRFKPSDEHIERMVEEVDLYHRAVTRLQYHPEADEVRLAMRNIPIEITGEETDKVEVSHRNVPGVETNHLRGGAILVLAEGVLQKAKKLVKYIDKMGIEGWDWIKEFVEAKEKGKSSEENKDESKAEDTGTESVAEKKENVEKGFYYELYEKFRANIAPNKKYTKEIIGGRPLFAEPSTNGGFRLRYGRSRVSGFATWSVNPATMLILDEFIAIGTQMKTERPGKGCIVTPATTVEGPIVRLKNGSVVRVDDYETALKVRNEVDEILYVGDALVNFGDFVENNQTLLPANYVEEWWVQELVQAIKDLYEVELQPFAENDREAVEEAAEYLEVDPDFLWNLLKDPLRVKPDVETAIHLSTVLDIPFHPYYTLYWNTLQPEEVEELQKALLGAQIEWAEFRKNRFAKKVVLENDKNIKRYLELLGLPHRLERVEKKRKVIVVEYPWSAALLTPLGNLEWEFKAKPFYTVIDIINENNRIKLRDRGISWIGARMGRPEKAKERKMKPPVQVLFPIGLAGGQSRDIKKAAEEGKTARVEIAFFKCPKCGHVGPEHLCPVCGTRKELLWHCPKCGADYPESDAKDFNYRCPKCDVELKPYAEREIKPADLLRQAMDNVKVYGIDRLKGVKGMTSGYKMAEPLEKGLLRVKNDVYVFKDGTIRFDATDAPITHFKPKEIGTSVEKLRELGYTHDFEGKPLERDDQILELKVQDVILPYEAGRYLLKVARFIDDLLEKFYGLPRFYNAEKMEDLVGHLVIGLAPHTSAGIIGRIIGFSDVLVGYAHPYYHAAKRRNCFPGDTRILVQINGLPQRITLRELYDLFEDERYENMAYVRKKPKADVKVYSFDPESGKVVLTDIEDVIKAPSTDHLIRFELELGRSFETTVDHPVLVYENGKFVEKRAFEVREGDRILVPNLKLPEKNIDYLDLLKEFSREEFAHLHDRIMVRGIAEWLRSVEADVKEDYLRRDSIPLSVLLRVLTEKEISIEEVPSCWLGFKRDKVRIKRFVPLKPLLRVVGYYLAEGYARESKSVYQLSFSMAEKEVREDLKRALREAFGDGFGIYERGGKVTVGSRILYLLFTEVLKAGKNAYSKRVPSLVFTLPREAVAEMLKAYFEGDGSALKSVPRVVAYSVNKALLEDIETLLLAKFGIRGYYTFDNNANRGNARGRLYHVERGTEAPVSKVYALNIAGEHYHRFFNSIGFVSERKNSIYELHAEKSPAQDRYSSQNGWLVKVRRIEYITPKDDFVFSLNAKKYHNVIINESIVTHQCDGDEDAVMLLLDALLNFSKYYLPEKRGGKMDAPLVVTTRLDPREVDSEVHNMDVVRYYPLEFYKATYELKSPKEVKVIERVEDRLGKPEMYEGIKFTHDTDDIGLGPKMSLYKQLGDMEEKVARQLALAERIRAVDEHHVAETIINSHLVPDLRGNLRSFTRQEFRCVKCNTKYRRPPLTGKCPKCGGKIVLTVSKGAIEKYLPTAKMLVTKYRVKDYTRQRICITEKDIKTLFENVFPEKQRTLMGFSADICEKMVKERTGHSNGKNGYLDEFNGKNGKASKKSGSLASKLSGKGKEPSKKKESAKPKRSEKVKNLTSFEAAAKNEQARGTAGNAKKAESEKPKRKKRKGISLDEFFGS

SEQ ID NO: 650 - protein, 245 aa, Thermococcus kodakaraensis KOD1
  misc_feature (414542)..(414542): n is a or c or g or t.
  misc_feature (786890)..(786890): n is a or c or g or t.
  misc_feature (786907)..(786907): n is a or c or g or t.
  misc_feature (786944)..(786946): n is a or c or g or t.
  misc_feature (839139)..(839139): n is a or c or g or t.
  misc_feature (1128488)..(1128488): n is a or c or g or t.
  misc_feature (1128499)..(1128499): n is a or c or g or t.
  misc_feature (1128505)..(1128506): n is a or c or g or t.
  misc_feature (1128517)..(1128518): n is a or c or g or t.
  misc_feature (1128539)..(1128540): n is a or c or g or t.
  misc_feature (1561400)..(1561400): n is a or c or g or t.
  misc_feature (1561477)..(1561477): n is a or c or g or t.
  misc_feature (1561545)..(1561545): n is a or c or g or t.
  misc_feature (1767941)..(1767941): n is a or c or g or t.
VCSISVKHIYDKIVYPLMLNQFKLLPSVAYLRVQKQAFIGYSMPLAGWIGEYLINYQKLPRPNFLGRAMAKLGFHLAGEDRDDRFITQFFTKGSVSISASWDVEREALFLQLIPLRSKLSRGLTIRTEHIEFYDQYVVSIEPAGKLPPGVKGIGINALILEDFYPVETPYWGMLHEDWESELNLVVMRDEVYERLHREEYRCPVCFSPLHEEKGILKCSKCGFTYAPENDFERVMEEFSVEEFAF

SEQ ID NO: 651 - protein, 147 aa, Thermococcus kodakaraensis KOD1
  misc_feature (414542)..(414542): n is a or c or g or t.
  misc_feature (786890)..(786890): n is a or c or g or t.
  misc_feature (786907)..(786907): n is a or c or g or t.
  misc_feature (786944)..(786946): n is a or c or g or t.
  misc_feature (839139)..(839139): n is a or c or g or t.
  misc_feature (1128488)..(1128488): n is a or c or g or t.
  misc_feature (1128499)..(1128499): n is a or c or g or t.
  misc_feature (1128505)..(1128506): n is a or c or g or t.
  misc_feature (1128517)..(1128518): n is a or c or g or t.
  misc_feature (1128539)..(1128540): n is a or c or g or t.
  misc_feature (1561400)..(1561400): n is a or c or g or t.
  misc_feature (1561477)..(1561477): n is a or c or g or t.
  misc_feature (1561545)..(1561545): n is a or c or g or t.
  misc_feature (1767941)..(1767941): n is a or c or g or t.
MTDKKKLVKEAYSFGYFLGLKGHSEWVEWVRKKREELYKQAEELGIYDLVKEAYKKGKEQGLRDRSEMIAKNLIVAGKIEPEGTSKKVEVAFSPEESREEVLESGKSLEREYFEFLQTTNLMLPPELLDSVKALEPPKMLRLRGSEG

SEQ ID NO: 652 - protein, 561 aa, Thermococcus kodakaraensis KOD1
  misc_feature (414542)..(414542): n is a or c or g or t.
  misc_feature (786890)..(786890): n is a or c or g or t.
  misc_feature (786907)..(786907): n is a or c or g or t.
  misc_feature (786944)..(786946): n is a or c or g or t.
  misc_feature (839139)..(839139): n is a or c or g or t.
  misc_feature (1128488)..(1128488): n is a or c or g or t.
  misc_feature (1128499)..(1128499): n is a or c or g or t.
  misc_feature (1128505)..(1128506): n is a or c or g or t.
  misc_feature (1128517)..(1128518): n is a or c or g or t.
  misc_feature (1128539)..(1128540): n is a or c or g or t.
  misc_feature (1561400)..(1561400): n is a or c or g or t.
  misc_feature (1561477)..(1561477): n is a or c or g or t.
  misc_feature (1561545)..(1561545): n is a or c or g or t.
  misc_feature (1767941)..(1767941): n is a or c or g or t.
MERFLRDSAEFSSDNVLNWIAGISHFHRIQGSKGLVEAAEYVLEELSRMGLEAKLLKDKYDGKRWHLTLPSPIAWEVIDGRLEVPGRTLTTAESPLLVMAHSPSGEVDGEVLPILRQEDWERAEGKVVLVGKDWRDAYRRANEVGASGFIAYREGTGEFYPYIGLFLTKEDLNWAQIPAFAVPEAVAKGLIRRALSGGVEVRGTAETEIKSSETLPMVYAEVGEPPYLLFTAHICHPKPGANDNASGNAMLLELARVLSKRENGRFGYAFLWVPEYHGSQAFIERAGVEEYYAGINLDMVAGSPDRSESTLMFVRTPFSRFSVVSGALEVAIELSNSRGKSFSGSRLPVMPFRAYPYEMGSDHDIFNFFGVPSVMPITWPDRFYHSSGDTIDKVSRETVAIVERAVLSAALFLSEEEKRRIEQFARGYARKVLGEIGMRLEPKESEKLVKAGLARDAEFLGLELNLEVETKAKPWLEWKERGLISERLIRSRAPGLAEDFKKLTEERATVTHLHELIMLGELLSEGNAYRAIEEEYGSIEREKLKRLVEILEEVGVVALSS

SEQ ID NO: 653 - protein, 146 aa, Thermococcus kodakaraensis KOD1
  misc_feature (414542)..(414542): n is a or c or g or t.
  misc_feature (786890)..(786890): n is a or c or g or t.
  misc_feature (786907)..(786907): n is a or c or g or t.
  misc_feature (786944)..(786946): n is a or c or g or t.
  misc_feature (839139)..(839139): n is a or c or g or t.
  misc_feature (1128488)..(1128488): n is a or c or g or t.
  misc_feature (1128499)..(1128499): n is a or c or g or t.
  misc_feature (1128505)..(1128506): n is a or c or g or t.
  misc_feature (1128517)..(1128518): n is a or c or g or t.
  misc_feature (1128539)..(1128540): n is a or c or g or t.
  misc_feature (1561400)..(1561400): n is a or c or g or t.
  misc_feature (1561477)..(1561477): n is a or c or g or t.
  misc_feature (1561545)..(1561545): n is a or c or g or t.
  misc_feature (1767941)..(1767941): n is a or c or g or t.
VRSLRRYYESCSGGSPMFKLPEGMERVWLMRARGMREVDIAETLGISRQAVNKALKDARVKLFEAFFSIAETFSWDVVRVNAEKGFSVFMGKVLGKRVRVYAFYLPGKGIKAFFGEDVPDYILQHAVEVGIIEKPEKEGLIKALES

SEQ ID NO: 654 - protein, 56 aa, Thermococcus kodakaraensis KOD1
  misc_feature (414542)..(414542): n is a or c or g or t.
  misc_feature (786890)..(786890): n is a or c or g or t.
  misc_feature (786907)..(786907): n is a or c or g or t.
  misc_feature (786944)..(786946): n is a or c or g or t.
  misc_feature (839139)..(839139): n is a or c or g or t.
  misc_feature (1128488)..(1128488): n is a or c or g or t.
  misc_feature (1128499)..(1128499): n is a or c or g or t.
  misc_feature (1128505)..(1128506): n is a or c or g or t.
  misc_feature (1128517)..(1128518): n is a or c or g or t.
  misc_feature (1128539)..(1128540): n is a or c or g or t.
  misc_feature (1561400)..(1561400): n is a or c or g or t.
  misc_feature (1561477)..(1561477): n is a or c or g or t.
  misc_feature (1561545)..(1561545): n is a or c or g or t.
  misc_feature (1767941)..(1767941): n is a or c or g or t.
MAKEKATLPPTGAGLMRFFDEDTRAVKVSPKGVIALTLLLIAFEFILHMFGSSIFG

SEQ ID NO: 655 - protein, 366 aa, Thermococcus kodakaraensis KOD1
  misc_feature (414542)..(414542): n is a or c or g or t.
  misc_feature (786890)..(786890): n is a or c or g or t.
  misc_feature (786907)..(786907): n is a or c or g or t.
  misc_feature (786944)..(786946): n is a or c or g or t.
  misc_feature (839139)..(839139): n is a or c or g or t.
  misc_feature (1128488)..(1128488): n is a or c or g or t.
  misc_feature (1128499)..(1128499): n is a or c or g or t.
  misc_feature (1128505)..(1128506): n is a or c or g or t.
  misc_feature (1128517)..(1128518): n is a or c or g or t.
  misc_feature (1128539)..(1128540): n is a or c or g or t.
  misc_feature (1561400)..(1561400): n is a or c or g or t.
  misc_feature (1561477)..(1561477): n is a or c or g or t.
  misc_feature (1561545)..(1561545): n is a or c or g or t.
  misc_feature (1767941)..(1767941): n is a or c or g or t.
MPMANIFNLQGEFETMNKARYTQDVPEDRIKLLESIASYNKPFTLMVVGGVDSGKSTLITFLGNELLSLGFKVAVVDSDVGQKGVLPPGTISLAIPEGPFESMSELEGVAHYFVGTTAPSQFIGEMAVGVKRMVEIARNVADVVLIDTTGFVTGVGAEMKRLKAELVKPDIIAVIHSGELSGLVKALEPYGGVIELAVSETVKRYPLEERRNLRAEKWRNYFRDSQLVEFSASEVAITGTSLFHGIPLNADENELLEKAFGWLVVAGWKNKGYTVVKADVEKFPRAHSRELKAIDFEKLSNLLVGLIDGEGLCMGVGVLKWINFSEGRLQILTPVRDLSGVREIRFGRIRVTEEGEELGLLRRDEL

SEQ ID NO: 656 - protein, 343 aa, Thermococcus kodakaraensis KOD1
  misc_feature (414542)..(414542): n is a or c or g or t.
  misc_feature (786890)..(786890): n is a or c or g or t.
  misc_feature (786907)..(786907): n is a or c or g or t.
  misc_feature (786944)..(786946): n is a or c or g or t.
  misc_feature (839139)..(839139): n is a or c or g or t.
  misc_feature (1128488)..(1128488): n is a or c or g or t.
  misc_feature (1128499)..(1128499): n is a or c or g or t.
  misc_feature (1128505)..(1128506): n is a or c or g or t.
  misc_feature (1128517)..(1128518): n is a or c or g or t.
  misc_feature (1128539)..(1128540): n is a or c or g or t.
  misc_feature (1561400)..(1561400): n is a or c or g or t.
  misc_feature (1561477)..(1561477): n is a or c or g or t.
  misc_feature (1561545)..(1561545): n is a or c or g or t.
  misc_feature (1767941)..(1767941): n is a or c or g or t.
MDKLKAYLIGFLIAVIAIAAGIVWYGGWKLLLQVILVLGFLGLTLGLGFFTALTLYAESWKYGTILAVFTAISAYGLYLSWTWKNLEVVAGIIVFFIAVVAFGIWYISEPDLGLVDRFKSAESLERAGKYKQAARKYEKAGNYLKAAEMYIKLGWLESAAWAYEKAGEYAKAAEIYEQLYGKEKDTYYLKEAHEYWKKAGDMERAAKALERYAEEEPWFWEDVAKLYEELGNEEKAREAWEKALEYYKGEAQEEGVFWEDVGNIARKLGMEDLAREAYGKFLEYCLKEAEEDPMWWKHVAEAYEYLGETEKAEEAREKYEEYRQKIMKANEETSKFPEDEKRE

SEQ ID NO: 657 - protein, 443 aa, Thermococcus kodakaraensis KOD1
  misc_feature (414542)..(414542): n is a or c or g or t.
  misc_feature (786890)..(786890): n is a or c or g or t.
  misc_feature (786907)..(786907): n is a or c or g or t.
  misc_feature (786944)..(786946): n is a or c or g or t.
  misc_feature (839139)..(839139): n is a or c or g or t.
  misc_feature (1128488)..(1128488): n is a or c or g or t.
  misc_feature (1128499)..(1128499): n is a or c or g or t.
  misc_feature (1128505)..(1128506): n is a or c or g or t.
  misc_feature (1128517)..(1128518): n is a or c or g or t.
  misc_feature (1128539)..(1128540): n is a or c or g or t.
  misc_feature (1561400)..(1561400): n is a or c or g or t.
  misc_feature (1561477)..(1561477): n is a or c or g or t.
  misc_feature (1561545)..(1561545): n is a or c or g or t.
  misc_feature (1767941)..(1767941): n is a or c or g or t.
VMRAIGVIRNSRRERLSRAEFEELLRSAGYEVLAIVEQNREEHPRYNIGPGKLEELKELVKELKPDKVIFANRLTPSQAYNLWKELRIEIMDRWQLVLEIFEKRAHSKEAKLQVELASLQYEIPLVKEAIRRIRLGDRAGFKGMGEYQTQQYLKHIRYRMGKIRDELERVKADREVKRKKRENAGFVLVALAGYTNAGKSTLLNALADENVEAKNQMFTTLDTTTRRFRLGTKRILATDTVGFIDGLPPFIVEAFHSTLEEIVKADIVLLVLDSSEPWGEIRRKFLASLQVLRELKALEKPIIVALNKIDLIEEADAEEKVRLIWELARERGISLEDVVKISAREGRLEELMDALNRVVLKLPKYGAFRIIVKEPEKVPAVMALINSVGEVLSVEYGEKTRIDAYVQTGMVGEIKKMGAEIERLNHSGEGEELEQDEGYSDGG

SEQ ID NO: 658 - protein, 59 aa, Thermococcus kodakaraensis KOD1
  misc_feature (414542)..(414542): n is a or c or g or t.
  misc_feature (786890)..(786890): n is a or c or g or t.
  misc_feature (786907)..(786907): n is a or c or g or t.
  misc_feature (786944)..(786946): n is a or c or g or t.
  misc_feature (839139)..(839139): n is a or c or g or t.
  misc_feature (1128488)..(1128488): n is a or c or g or t.
  misc_feature (1128499)..(1128499): n is a or c or g or t.
  misc_feature (1128505)..(1128506): n is a or c or g or t.
  misc_feature (1128517)..(1128518): n is a or c or g or t.
  misc_feature (1128539)..(1128540): n is a or c or g or t.
  misc_feature (1561400)..(1561400): n is a or c or g or t.
  misc_feature (1561477)..(1561477): n is a or c or g or t.
  misc_feature (1561545)..(1561545): n is a or c or g or t.
  misc_feature (1767941)..(1767941): n is a or c or g or t.
VVNEDKCVKCYICWKFCPEPAIYIKPDGYVAIDYDYCKGCGICANECPTKAITMEKEEK

SEQ ID NO: 659 - protein, 314 aa, Thermococcus kodakaraensis KOD1
  misc_feature (414542)..(414542): n is a or c or g or t.
  misc_feature (786890)..(786890): n is a or c or g or t.
  misc_feature (786907)..(786907): n is a or c or g or t.
  misc_feature (786944)..(786946): n is a or c or g or t.
  misc_feature (839139)..(839139): n is a or c or g or t.
  misc_feature (1128488)..(1128488): n is a or c or g or t.
  misc_feature (1128499)..(1128499): n is a or c or g or t.
  misc_feature (1128505)..(1128506): n is a or c or g or t.
  misc_feature (1128517)..(1128518): n is a or c or g or t.
  misc_feature (1128539)..(1128540): n is a or c or g or t.
  misc_feature (1561400)..(1561400): n is a or c or g or t.
  misc_feature (1561477)..(1561477): n is a or c or g or t.
  misc_feature (1561545)..(1561545): n is a or c or g or t.
  misc_feature (1767941)..(1767941): n is a or c or g or t.
VRKMEIPEQIKKKLTLPAEEHFYAGHTACQGCGAALGLRYVLKAYGRKTIFAIPACCSTIIAGAWPYNTLGANLFQTAFETTGAVLGGIEAALKARGIKVKGEDGVMIVGWAGDGGTADIGLQALSGFLERGHDALYIMYDNEAYMNTGIQRSSSTPYGAWTTNTPGGKRHFLEKRHKKKVIDIVIAHEIPYAATASVAYPEDFIRKLKTAQKTPGPSFIQLFAPCPTGWRSPTDKSIEIARLAVQTAYFPLFEYKEGKYRINMPNPKKEPKPIEEFLKLQGRFKYMTKEDIQVLQEWVLREWEKLKKLAEVFG

SEQ ID NO: 660 - protein, 108 aa, Thermococcus kodakaraensis KOD1
  misc_feature (414542)..(414542): n is a or c or g or t.
  misc_feature (786890)..(786890): n is a or c or g or t.
  misc_feature (786907)..(786907): n is a or c or g or t.
  misc_feature (786944)..(786946): n is a or c or g or t.
  misc_feature (839139)..(839139): n is a or c or g or t.
  misc_feature (1128488)..(1128488): n is a or c or g or t.
  misc_feature (1128499)..(1128499): n is a or c or g or t.
  misc_feature (1128505)..(1128506): n is a or c or g or t.
  misc_feature (1128517)..(1128518): n is a or c or g or t.
  misc_feature (1128539)..(1128540): n is a or c or g or t.
  misc_feature (1561400)..(1561400): n is a or c or g or t.
  misc_feature (1561477)..(1561477): n is a or c or g or t.
  misc_feature (1561545)..(1561545): n is a or c or g or t.
  misc_feature (1767941)..(1767941): n is a or c or g or t.
VIHMAESPFKADIERVQKEYSEKMTPGAIAYIPGSSVINKTGSWRVFMPEFNRDKCTRCYLCYIYCPEPAIYLDEEGYPVFDYDYCKGCGICANECPVDAIVMVRETK

SEQ ID NO: 661 - protein, 334 aa, Thermococcus kodakaraensis KOD1
  misc_feature (414542)..(414542): n is a or c or g or t.
  misc_feature (786890)..(786890): n is a or c or g or t.
  misc_feature (786907)..(786907): n is a or c or g or t.
  misc_feature (786944)..(786946): n is a or c or g or t.
  misc_feature (839139)..(839139): n is a or c or g or t.
  misc_feature (1128488)..(1128488): n is a or c or g or t.
  misc_feature (1128499)..(1128499): n is a or c or g or t.
  misc_feature (1128505)..(1128506): n is a or c or g or t.
  misc_feature (1128517)..(1128518): n is a or c or g or t.
  misc_feature (1128539)..(1128540): n is a or c or g or t.
  misc_feature (1561400)..(1561400): n is a or c or g or t.
  misc_feature (1561477)..(1561477): n is a or c or g or t.
  misc_feature (1561545)..(1561545): n is a or c or g or t.
  misc_feature (1767941)..(1767941): n is a or c or g or t.
VRKMAVRKPPITTREYWAPGHAACAGCGCATALKLATKAFSEAMEEKYGDPNAFAIAQATGCMEVVSAVFPYTAWKVPWVHVAFENAAAAASGVEAAWKKIGRKGKILAIGGDGGTADIGLQALSGMLERRHNVVYLMYDNEAYMNTGIQRSSSTPYGAWTTTSPPGKYSIGEDKPKKWVALIAAAHQVPYVATASIGNPFDFVRKMKKAAKVDGPAFVQVHCTCPTGWKSPLEKGVEIARLAIETGVWPLFEIENGDFFNIKIQPPGGGAKVTREGGRIVAIEFKKPIEEYLKLQGRFKHLFKRPEAIDELREQIKAMWKTLGVDVTLPKLEE

SEQ ID NO: 662 - protein, 287 aa, Thermococcus kodakaraensis KOD1
  misc_feature (414542)..(414542): n is a or c or g or t.
  misc_feature (786890)..(786890): n is a or c or g or t.
  misc_feature (786907)..(786907): n is a or c or g or t.
  misc_feature (786944)..(786946): n is a or c or g or t.
  misc_feature (839139)..(839139): n is a or c or g or t.
  misc_feature (1128488)..(1128488): n is a or c or g or t.
  misc_feature (1128499)..(1128499): n is a or c or g or t.
  misc_feature (1128505)..(1128506): n is a or c or g or t.
  misc_feature (1128517)..(1128518): n is a or c or g or t.
  misc_feature (1128539)..(1128540): n is a or c or g or t.
  misc_feature (1561400)..(1561400): n is a or c or g or t.
  misc_feature (1561477)..(1561477): n is a or c or g or t.
  misc_feature (1561545)..(1561545): n is a or c or g or t.
  misc_feature (1767941)..(1767941): n is a or c or g or t.
VISIFAFSFFLQEGDRGFPVLVLEEGPVFISEDPVTLDEFISSLKALHSMDALPKKLWDLKIMAEGGWVHLTLRDGGEVQLTRDNFIEAIRTSIQNLKAVLNNKPVRMGWLRFKLKPPSHEVLEMFGEPEDIMDEYEVQVYGSTYVLEAFVNLEGYVEELKLLKAFVADGKLPAEEWRVKWNVDGEIKRLSSKGAKKPEDRGLLRELAGLKKLSAGAAPPFVRFTLSTYDPFEVLYAADSGKGEFLLAFVLYSGMAVKVPKNVFLRAIDEAIKDAEKELKRVKLSGR

SEQ ID NO: 663 - protein, 177 aa, Thermococcus kodakaraensis KOD1
  misc_feature (414542)..(414542): n is a or c or g or t.
  misc_feature (786890)..(786890): n is a or c or g or t.
  misc_feature (786907)..(786907): n is a or c or g or t.
  misc_feature (786944)..(786946): n is a or c or g or t.
  misc_feature (839139)..(839139): n is a or c or g or t.
  misc_feature (1128488)..(1128488): n is a or c or g or t.
  misc_feature (1128499)..(1128499): n is a or c or g or t.
  misc_feature (1128505)..(1128506): n is a or c or g or t.
  misc_feature (1128517)..(1128518): n is a or c or g or t.
  misc_feature (1128539)..(1128540): n is a or c or g or t.
  misc_feature (1561400)..(1561400): n is a or c or g or t.
  misc_feature (1561477)..(1561477): n is a or c or g or t.
  misc_feature (1561545)..(1561545): n is a or c or g or t.
  misc_feature (1767941)..(1767941): n is a or c or g or t.
VMEMLSERMLKALNEQLNKELFSAYFYLGIAAYFKDMGFDGFATWMEAQAEEELGHAMRFYDYIFDRGGKVELEKIEKPKQTFESPLKAFEAVYLHEVGVTQSIFKLVELAQEEKDHATYQFLQWFVEEQVEEEASTKAIVDKLKIIGDNPQGLFMLDRELGARAPKLRALLTQKGE

SEQ ID NO: 664 - protein, 51 aa, Thermococcus kodakaraensis KOD1
  misc_feature (414542)..(414542): n is a or c or g or t.
  misc_feature (786890)..(786890): n is a or c or g or t.
  misc_feature (786907)..(786907): n is a or c or g or t.
  misc_feature (786944)..(786946): n is a or c or g or t.
  misc_feature (839139)..(839139): n is a or c or g or t.
  misc_feature (1128488)..(1128488): n is a or c or g or t.
  misc_feature (1128499)..(1128499): n is a or c or g or t.
  misc_feature (1128505)..(1128506): n is a or c or g or t.
  misc_feature (1128517)..(1128518): n is a or c or g or t.
  misc_feature (1128539)..(1128540): n is a or c or g or t.
  misc_feature (1561400)..(1561400): n is a or c or g or t.
  misc_feature (1561477)..(1561477): n is a or c or g or t.
  misc_feature (1561545)..(1561545): n is a or c or g or t.
  misc_feature (1767941)..(1767941): n is a or c or g or t.
VAMFLVNLGVNVLLTPMDCPKGKAILEAGGVKIIKVKSGENVKDVLNLLKD

SEQ ID NO: 665 - protein, 247 aa, Thermococcus kodakaraensis KOD1
  misc_feature (414542)..(414542): n is a or c or g or t.
  misc_feature (786890)..(786890): n is a or c or g or t.
  misc_feature (786907)..(786907): n is a or c or g or t.
  misc_feature (786944)..(786946): n is a or c or g or t.
  misc_feature (839139)..(839139): n is a or c or g or t.
  misc_feature (1128488)..(1128488): n is a or c or g or t.
  misc_feature (1128499)..(1128499): n is a or c or g or t.
  misc_feature (1128505)..(1128506): n is a or c or g or t.
  misc_feature (1128517)..(1128518): n is a or c or g or t.
  misc_feature (1128539)..(1128540): n is a or c or g or t.
  misc_feature (1561400)..(1561400): n is a or c or g or t.
  misc_feature (1561477)..(1561477): n is a or c or g or t.
  misc_feature (1561545)..(1561545): n is a or c or g or t.
  misc_feature (1767941)..(1767941): n is a or c or g or t.
MSLMDYIAVGIIAFILSVIFSIGGVGSAIAIVPTMMWLGIPLMVAKPTGLFINTLSMLSATIKNIKHGKLDHRFGLPILVMATIFAPLGAYSGKFIPKEYVLWIFIIFLLYSGTMMIFFKPRPRDGDGNHIVEGSLIGGLAGFLGGLLGVGGGGIISPTLIMLGYEPKKVAATTALVVFFSSLSGFLTYWGMGALDWKLLGVVSISAITGGWLGTHLMHFKMSSEQVKKVIGVILYLIALKMVLKVL

SEQ ID NO: 666 - protein, 347 aa, Thermococcus kodakaraensis KOD1
  misc_feature (414542)..(414542): n is a or c or g or t.
  misc_feature (786890)..(786890): n is a or c or g or t.
  misc_feature (786907)..(786907): n is a or c or g or t.
  misc_feature (786944)..(786946): n is a or c or g or t.
  misc_feature (839139)..(839139): n is a or c or g or t.
  misc_feature (1128488)..(1128488): n is a or c or g or t.
  misc_feature (1128499)..(1128499): n is a or c or g or t.
  misc_feature (1128505)..(1128506): n is a or c or g or t.
  misc_feature (1128517)..(1128518): n is a or c or g or t.
  misc_feature (1128539)..(1128540): n is a or c or g or t.
  misc_feature (1561400)..(1561400): n is a or c or g or t.
  misc_feature (1561477)..(1561477): n is a or c or g or t.
  misc_feature (1561545)..(1561545): n is a or c or g or t.
  misc_feature (1767941)..(1767941): n is a or c or g or t.
VMPMDYEGYIARKFLIGLFLLLLTLLVSLYSLSHGSYSLSTGDVINTLLGREGGNAYLIVWKVRLPRIVAALFVGASLAVSGAVMQGFLRNPLASPFTMGVSHGAMFGASLAIILGAGYAESTGRISLDNPYAVVIFAFAGAMAAVGVILLLAKLKGLSPEAIILAGVAMSSLFVALTTFIQYFADELQLAAMVYWSFGDLGRATWREDVILLLVFAPVFAYFIVKRWDLNASAVGEEVAKSVGVEVERVRLVSTFLAALITAISVAFVGVIGFVGLIAPHLIRLIAGGDYRFLIPLSALAGALLLVTADTVARLVLAPTVLPVGIVTSFLGAPAFIYLLVRMEGRR

SEQ ID NO: 667 - protein, 319 aa, Thermococcus kodakaraensis KOD1
  misc_feature (414542)..(414542): n is a or c or g or t.
  misc_feature (786890)..(786890): n is a or c or g or t.
  misc_feature (786907)..(786907): n is a or c or g or t.
  misc_feature (786944)..(786946): n is a or c or g or t.
  misc_feature (839139)..(839139): n is a or c or g or t.
  misc_feature (1128488)..(1128488): n is a or c or g or t.
  misc_feature (1128499)..(1128499): n is a or c or g or t.
  misc_feature (1128505)..(1128506): n is a or c or g or t.
  misc_feature (1128517)..(1128518): n is a or c or g or t.
  misc_feature (1128539)..(1128540): n is a or c or g or t.
  misc_feature (1561400)..(1561400): n is a or c or g or t.
  misc_feature (1561477)..(1561477): n is a or c or g or t.
  misc_feature (1561545)..(1561545): n is a or c or g or t.
  misc_feature (1767941)..(1767941): n is a or c or g or t.
VGSTVKFLDKPFKPLGKPKSEVLQMTIKAPTLNIGGLGADPLTQRIQEKQKKWKYKIAVLSGKGGVGKSTVAVNLAAALAKMGYFVGILDADIHGPNVAKMLGVDKADVLAERMDDGRFEMIPPMADFMGQVTPIKVMSMGFLVPEDQPVIWRGSLVTKAIKQLLGDTKWGELDFMIIDFPPGTGDEILTVTQSIPLDAAVIVTTPQEVALLDTGKAVNMMKKMEVPYIAVVENMSYLICPHCGNEIDLFGRGGGRKLAEKEGVEFLGEIPIDLKAREASDAGIPIVLYGDTMAAKAFMELAEKLVKKLEEMKGEKAEE

SEQ ID NO: 668 - protein, 401 aa, Thermococcus kodakaraensis KOD1
  misc_feature (414542)..(414542): n is a or c or g or t.
  misc_feature (786890)..(786890): n is a or c or g or t.
  misc_feature (786907)..(786907): n is a or c or g or t.
  misc_feature (786944)..(786946): n is a or c or g or t.
  misc_feature (839139)..(839139): n is a or c or g or t.
  misc_feature (1128488)..(1128488): n is a or c or g or t.
  misc_feature (1128499)..(1128499): n is a or c or g or t.
  misc_feature (1128505)..(1128506): n is a or c or g or t.
  misc_feature (1128517)..(1128518): n is a or c or g or t.
  misc_feature (1128539)..(1128540): n is a or c or g or t.
  misc_feature (1561400)..(1561400): n is a or c or g or t.
  misc_feature (1561477)..(1561477): n is a or c or g or t.
  misc_feature (1561545)..(1561545): n is a or c or g or t.
  misc_feature (1767941)..(1767941): n is a or c or g or t.
VIAMVKRVHIFDWHKEHAKKVEEFAGWEMPIWYSSIKEEHLAVRNGVGIFDVSHMGEFIFRGKDALEFLQYVTTNDISKPPAISGTYTLVLNERGAVKDETLVFNMGNDTYMMVCDSDAFEKLDAWFNAIKRGIEKFGDIDLEIENKTYDMAMFSIQGPKARDLAKELFGIDINDLWWFQAKEVELDGIKMLLSRSGYTGENGFEVYFEDANPYHPDPSKRGEPEKALHVWKTILEAGEKYGIKPAGLGARDTLRLEAGYTLYGNETKEKQLLSTDIDEVTPLQANLDFAIFWDKEFIGKEALLKQKERGLPSKMVHFKMVDKGVPREGYKVYKDGELIGEVTSGTLSPLLGIGIGIAFVKPEYAVPGVEIEVEIRGKPKKAVTVAPPFYDPKKYGAFREE

SEQ ID NO: 669 - protein, 310 aa, Thermococcus kodakaraensis KOD1
  misc_feature (414542)..(414542): n is a or c or g or t.
  misc_feature (786890)..(786890): n is a or c or g or t.
  misc_feature (786907)..(786907): n is a or c or g or t.
  misc_feature (786944)..(786946): n is a or c or g or t.
  misc_feature (839139)..(839139): n is a or c or g or t.
  misc_feature (1128488)..(1128488): n is a or c or g or t.
  misc_feature (1128499)..(1128499): n is a or c or g or t.
  misc_feature (1128505)..(1128506): n is a or c or g or t.
  misc_feature (1128517)..(1128518): n is a or c or g or t.
  misc_feature (1128539)..(1128540): n is a or c or g or t.
  misc_feature (1561400)..(1561400): n is a or c or g or t.
  misc_feature (1561477)..(1561477): n is a or c or g or t.
  misc_feature (1561545)..(1561545): n is a or c or g or t.
  misc_feature (1767941)..(1767941): n is a or c or g or t.
MIFDAHSDLPTFVYDEKKSGATRVLERNYYRFFGDKITSRVMAIWTRPERRKDATAYGLEVLNTLLKDIDESDSFELVRNVEEMQKTIREGRVALWLGLEGGEPIGESIELLEVFYRLGLRVLTLTWSLRNAIGDGVFERTNGGLTRFGVEVVGKAEELGIVVDLSHINEAGFWDTLDVTSFPVIASHSNARALCDSPRNLTDEQLKAIAERDGVVGAVAIPSFVDREKPTIEKYVEHIEYMADLIGYEHVGLGFDFVYYLREWGGKSVEGFENESKIPELLNLLHERFSKKEVEGITFKNFERVFERIT

SEQ ID NO: 670 - protein, 290 aa, Thermococcus kodakaraensis KOD1
  misc_feature (414542)..(414542): n is a or c or g or t.
  misc_feature (786890)..(786890): n is a or c or g or t.
  misc_feature (786907)..(786907): n is a or c or g or t.
  misc_feature (786944)..(786946): n is a or c or g or t.
  misc_feature (839139)..(839139): n is a or c or g or t.
  misc_feature (1128488)..(1128488): n is a or c or g or t.
  misc_feature (1128499)..(1128499): n is a or c or g or t.
  misc_feature (1128505)..(1128506): n is a or c or g or t.
  misc_feature (1128517)..(1128518): n is a or c or g or t.
  misc_feature (1128539)..(1128540): n is a or c or g or t.
  misc_feature (1561400)..(1561400): n is a or c or g or t.
  misc_feature (1561477)..(1561477): n is a or c or g or t.
  misc_feature (1561545)..(1561545): n is a or c or g or t.
  misc_feature (1767941)..(1767941): n is a or c or g or t.
MEEIYYITFREARMLLASRGNVKLNLDLRKTNRVQEVEIKDEGAVFPDGTLVEREVLEKIARDDGTVYFVSNGGVYKAAIAGESGFYKLVPTIPPTIEINGIRMHRTKEMNPLQDTRNKVNTVMPREGETVLDTCMGLGYTAIEASKRGAYVITIEKDPNVIEIARINPWSRELFTGGKIQVIQGDAFEVVKKFKQASFDVIIHDPPRFSLAGHLYSEEFYRELFRILKPGGRLFHYVGNPGKKYRRKDLQKGVMERLRRVGFVGVRRVEEALGVVARKPEKGVKASQRD

SEQ ID NO: 671 - protein, 78 aa, Thermococcus kodakaraensis KOD1
  misc_feature (414542)..(414542): n is a or c or g or t.
  misc_feature (786890)..(786890): n is a or c or g or t.
  misc_feature (786907)..(786907): n is a or c or g or t.
  misc_feature (786944)..(786946): n is a or c or g or t.
  misc_feature (839139)..(839139): n is a or c or g or t.
  misc_feature (1128488)..(1128488): n is a or c or g or t.
  misc_feature (1128499)..(1128499): n is a or c or g or t.
  misc_feature (1128505)..(1128506): n is a or c or g or t.
  misc_feature (1128517)..(1128518): n is a or c or g or t.
  misc_feature (1128539)..(1128540): n is a or c or g or t.
  misc_feature (1561400)..(1561400): n is a or c or g or t.
  misc_feature (1561477)..(1561477): n is a or c or g or t.
  misc_feature (1561545)..(1561545): n is a or c or g or t.
  misc_feature (1767941)..(1767941): n is a or c or g or t.
VIAMVTAFILMVTAAGKEREVMEKLLAMPEVKEAYVVYGEYDLVVKVETETLKDLDQFITEKIRRMPEIQMTSTMIAI

SEQ ID NO: 672 - protein, 118 aa, Thermococcus kodakaraensis KOD1
  misc_feature (414542)..(414542): n is a or c or g or t.
  misc_feature (786890)..(786890): n is a or c or g or t.
  misc_feature (786907)..(786907): n is a or c or g or t.
  misc_feature (786944)..(786946): n is a or c or g or t.
  misc_feature (839139)..(839139): n is a or c or g or t.
  misc_feature (1128488)..(1128488): n is a or c or g or t.
  misc_feature (1128499)..(1128499): n is a or c or g or t.
  misc_feature (1128505)..(1128506): n is a or c or g or t.
  misc_feature (1128517)..(1128518): n is a or c or g or t.
  misc_feature (1128539)..(1128540): n is a or c or g or t.
  misc_feature (1561400)..(1561400): n is a or c or g or t.
  misc_feature (1561477)..(1561477): n is a or c or g or t.
  misc_feature (1561545)..(1561545): n is a or c or g or t.
  misc_feature (1767941)..(1767941): n is a or c or g or t.
MFVGHYKDVPEKNTGFEGVTIRWLVSPKLGAKNFAMRYFVMKKGSEIPIHQHDWEHEIFIVRGEGIITNGKEEFHVKEGNFLYVPPNEPHGYKATGETLEFLCIIPAKKEAIPEEEWA

SEQ ID NO: 673 - protein, 313 aa, Thermococcus kodakaraensis KOD1
  misc_feature (414542)..(414542): n is a or c or g or t.
  misc_feature (786890)..(786890): n is a or c or g or t.
  misc_feature (786907)..(786907): n is a or c or g or t.
  misc_feature (786944)..(786946): n is a or c or g or t.
  misc_feature (839139)..(839139): n is a or c or g or t.
  misc_feature (1128488)..(1128488): n is a or c or g or t.
  misc_feature (1128499)..(1128499): n is a or c or g or t.
  misc_feature (1128505)..(1128506): n is a or c or g or t.
  misc_feature (1128517)..(1128518): n is a or c or g or t.
  misc_feature (1128539)..(1128540): n is a or c or g or t.
  misc_feature (1561400)..(1561400): n is a or c or g or t.
  misc_feature (1561477)..(1561477): n is a or c or g or t.
  misc_feature (1561545)..(1561545): n is a or c or g or t.
  misc_feature (1767941)..(1767941): n is a or c or g or t.
MGENPVISDANTNHVIKALHKLEFMVVQDIVPTPTMEFADIVLPAAAMLENEGSLTNTERRVQWSFQAINPPGEARPDWWIVSEIGKAAGFTGDGPKGFNYSGPEDILREVNACTPQYRGITPERLKANLAGIHWPCPSEDHPGTRVLYKERFLTSDGKAHLAAVEYRGPAETPDEDYPFLLTTVRYVGHYHTLTMTGRSRALVKRWPEPLAEIHPEDAERLGIKTGDWVKIVTRRGEYPIRAKVTRTVKKGVIAVPWHWGANVVTNDALDPVAKIPETKACACKVVKITEEEARELMKKVPPVIPEIEIVRG

SEQ ID NO: 674 - protein, 92 aa, Thermococcus kodakaraensis KOD1
  misc_feature (414542)..(414542): n is a or c or g or t.
  misc_feature (786890)..(786890): n is a or c or g or t.
  misc_feature (786907)..(786907): n is a or c or g or t.
  misc_feature (786944)..(786946): n is a or c or g or t.
  misc_feature (839139)..(839139): n is a or c or g or t.
  misc_feature (1128488)..(1128488): n is a or c or g or t.
  misc_feature (1128499)..(1128499): n is a or c or g or t.
  misc_feature (1128505)..(1128506): n is a or c or g or t.
  misc_feature (1128517)..(1128518): n is a or c or g or t.
  misc_feature (1128539)..(1128540): n is a or c or g or t.
  misc_feature (1561400)..(1561400): n is a or c or g or t.
  misc_feature (1561477)..(1561477): n is a or c or g or t.
  misc_feature (1561545)..(1561545): n is a or c or g or t.
  misc_feature (1767941)..(1767941): n is a or c or g or t.
MGQEAGKMMAFFYAMVLVGIAGLISVLRLILGPTVPDRVVGVDTLNTLVVAGMVLLGAAYDRTIYIDIAIVYALLSYIGTLVIAKYLQGGLA

SEQ ID NO: 675 - protein, 98 aa, Thermococcus kodakaraensis KOD1
  misc_feature (414542)..(414542): n is a or c or g or t.
  misc_feature (786890)..(786890): n is a or c or g or t.
  misc_feature (786907)..(786907): n is a or c or g or t.
  misc_feature (786944)..(786946): n is a or c or g or t.
  misc_feature (839139)..(839139): n is a or c or g or t.
  misc_feature (1128488)..(1128488): n is a or c or g or t.
  misc_feature (1128499)..(1128499): n is a or c or g or t.
  misc_feature (1128505)..(1128506): n is a or c or g or t.
  misc_feature (1128517)..(1128518): n is a or c or g or t.
  misc_feature (1128539)..(1128540): n is a or c or g or t.
  misc_feature (1561400)..(1561400): n is a or c or g or t.
  misc_feature (1561477)..(1561477): n is a or c or g or t.
  misc_feature (1561545)..(1561545): n is a or c or g or t.
  misc_feature (1767941)..(1767941): n is a or c or g or t.
MKRTLAYLSLLFILGALLYIANPNYGLKFGPGGEDWLKYRYTDNYYIEHGVEEVGGTNIVTDIVFDYRGYDTLGEATVLFTAIAGAVALLRPWRRDEE

SEQ ID NO: 676 - protein, 514 aa, Thermococcus kodakaraensis KOD1
  misc_feature (414542)..(414542): n is a or c or g or t.
  misc_feature (786890)..(786890): n is a or c or g or t.
  misc_feature (786907)..(786907): n is a or c or g or t.
  misc_feature (786944)..(786946): n is a or c or g or t.
  misc_feature (839139)..(839139): n is a or c or g or t.
  misc_feature (1128488)..(1128488): n is a or c or g or t.
  misc_feature (1128499)..(1128499): n is a or c or g or t.
  misc_feature (1128505)..(1128506): n is a or c or g or t.
  misc_feature (1128517)..(1128518): n is a or c or g or t.
  misc_feature (1128539)..(1128540): n is a or c or g or t.
  misc_feature (1561400)..(1561400): n is a or c or g or t.
  misc_feature (1561477)..(1561477): n is a or c or g or t.
  misc_feature (1561545)..(1561545): n is a or c or g or t.
  misc_feature (1767941)..(1767941): n is a or c or g or t.
MNGETILPYLIIVPLFGAFSMPIVSLAGKKAREAWAVIISGITLLVGSAVFYSVYENGPILYTLGAKSPFGQGASFPVRIVWEVDLLSALMVLMVTLVAFLAVVYSLGYMKRDTGLDKYYTLILILELGMLGIAITGDLFNFYVFLEIMSIASYALVAFRNDTWEGIEAGIKYMFVGSIASSLVLLGIALLYGQYGTLTMGYLAIKLSQNPSVVAKVALAFFIAGLLFKSGASPVHMWLADAHPAAPSSISAMLSGLVIKIGGVYALARILFSIYGASVSMKTVGWVIIIFACITLIVGNAMAVIQTDMKRLLAYSSVGQIGYILLGLGIGLAAYGSRTGDIALAGAIYHTFNHALMKALLSLIAGAVIHELGTRNLNELSGLARTMPKTTFAFLIGAAAIIGMPPLNGFASKWLIYESSAIFNPVLGAIAIIGTAFCTAAYVRVLYTFFGRPSEKVMNARDPEASMLWPMIILALAIIIMGLFPWQISDKVMIPAAKALENQLGYIATLMGGA

SEQ ID NO: 677 - protein, 426 aa, Thermococcus kodakaraensis KOD1
  misc_feature (414542)..(414542): n is a or c or g or t.
  misc_feature (786890)..(786890): n is a or c or g or t.
  misc_feature (786907)..(786907): n is a or c or g or t.
  misc_feature (786944)..(786946): n is a or c or g or t.
  misc_feature (839139)..(839139): n is a or c or g or t.
  misc_feature (1128488)..(1128488): n is a or c or g or t.
  misc_feature (1128499)..(1128499): n is a or c or g or t.
  misc_feature (1128505)..(1128506): n is a or c or g or t.
  misc_feature (1128517)..(1128518): n is a or c or g or t.
  misc_feature (1128539)..(1128540): n is a or c or g or t.
  misc_feature (1561400)..(1561400): n is a or c or g or t.
  misc_feature (1561477)..(1561477): n is a or c or g or t.
  misc_feature (1561545)..(1561545): n is a or c or g or t.
  misc_feature (1767941)..(1767941): n is a or c or g or t.
MTEKVEYWVKIPFGPIHPGLEEPEKFILTLDGERIVDVDVKLGYNLRGIQWIALRRNYIQIMYLAERMCGICSFSHNHTYTRAVEEAGGIEVPERAEYIRVIIGELERIHSHLLNLGVLAHDIGYDTLLHLTWLAREKVMDTLEAVSGNRVNYSMVTIGGVRRDIDEKKRRIIEEMIKYYREVFPQIEEAFLHDPTIEARFRDTAVISKRVALEQGAVGPTGRGSGIRDDARWSEGLGVYPDLGIKPVMPQDVTGERPRGDVFDRMAVRIGELWQSLELIEHALDAMPDGPIKTFPKDNVLYAKLRLMVDGEGIGRYEAPRGELVHYVRGKKGSDKPLRWKPREPTFPNLFAVARGVIGDQVADFVVAVASIDPCLSCTDRVAVVQDGKKKILTEKDLLRESIKRTREINPDIKGDPSPLGVGCVR

SEQ ID NO: 678 - protein, 143 aa, Thermococcus kodakaraensis KOD1
  misc_feature (414542)..(414542): n is a or c or g or t.
  misc_feature (786890)..(786890): n is a or c or g or t.
  misc_feature (786907)..(786907): n is a or c or g or t.
  misc_feature (786944)..(786946): n is a or c or g or t.
  misc_feature (839139)..(839139): n is a or c or g or t.
  misc_feature (1128488)..(1128488): n is a or c or g or t.
  misc_feature (1128499)..(1128499): n is a or c or g or t.
  misc_feature (1128505)..(1128506): n is a or c or g or t.
  misc_feature (1128517)..(1128518): n is a or c or g or t.
  misc_feature (1128539)..(1128540): n is a or c or g or t.
  misc_feature (1561400)..(1561400): n is a or c or g or t.
  misc_feature (1561477)..(1561477): n is a or c or g or t.
  misc_feature (1561545)..(1561545): n is a or c or g or t.
  misc_feature (1767941)..(1767941): n is a or c or g or t.
VKAPILVPVVLRNLFKKPATNRFPQTEPVPIPEDFRGMIAYNVDKCVGCRMCVNVCPAGVFVYLPEIRKVALWTARCVYCGQCVDVCPTGALQLSKDFLLASYDNHDDRFIPLKPEKVEEIKRKLEEQKKAKEAAKKEKEGKA

SEQ ID NO: 679 - protein, 402 aa, Thermococcus kodakaraensis KOD1
  misc_feature (414542)..(414542): n is a or c or g or t.
  misc_feature (786890)..(786890): n is a or c or g or t.
  misc_feature (786907)..(786907): n is a or c or g or t.
  misc_feature (786944)..(786946): n is a or c or g or t.
  misc_feature (839139)..(839139): n is a or c or g or t.
  misc_feature (1128488)..(1128488): n is a or c or g or t.
  misc_feature (1128499)..(1128499): n is a or c or g or t.
  misc_feature (1128505)..(1128506): n is a or c or g or t.
  misc_feature (1128517)..(1128518): n is a or c or g or t.
  misc_feature (1128539)..(1128540): n is a or c or g or t.
  misc_feature (1561400)..(1561400): n is a or c or g or t.
  misc_feature (1561477)..(1561477): n is a or c or g or t.
  misc_feature (1561545)..(1561545): n is a or c or g or t.
  misc_feature (1767941)..(1767941): n is a or c or g or t.
MERDGLKFYPSHSYDVYGLSHNPFEQLASEGIADVESIHVYQEVDMRLQMIISEVLGHKSSIALSIVGPLGMGKTQRLKNIAKAIEDNGGKAIYVKVDTNDILKLTRDIFYALKPPRSRTNIFLENLSRKLGFIDRLEKMLSDPNEYKSRDIAELLVEQLKKYPYSALLLDELENMQGAGEREKIQFFEMLRHVISTMPPGCIVAFACIPEAYEEYTKIFPAFFMRLHYEFKLRPMSVEETFELVKKRLNKARVKDTDDPIYPFTEEAIKLIHDLARGNPRQILRLLHYVLSEAAKHKFDPIDDYVVTTILEEPKSLEEYLMRIPKDYKDLVEAVVFEFKGGPVSYIQVAKAVKKPGMQVYESLNELVRLGFLVGDPNGSYKVPDYVRKFLEEGQAEKLRGE

SEQ ID NO: 680 - protein, 177 aa, Thermococcus kodakaraensis KOD1
  misc_feature (414542)..(414542): n is a or c or g or t.
  misc_feature (786890)..(786890): n is a or c or g or t.
  misc_feature (786907)..(786907): n is a or c or g or t.
  misc_feature (786944)..(786946): n is a or c or g or t.
  misc_feature (839139)..(839139): n is a or c or g or t.
  misc_feature (1128488)..(1128488): n is a or c or g or t.
  misc_feature (1128499)..(1128499): n is a or c or g or t.
  misc_feature (1128505)..(1128506): n is a or c or g or t.
  misc_feature (1128517)..(1128518): n is a or c or g or t.
  misc_feature (1128539)..(1128540): n is a or c or g or t.
  misc_feature (1561400)..(1561400): n is a or c or g or t.
  misc_feature (1561477)..(1561477): n is a or c or g or t.
  misc_feature (1561545)..(1561545): n is a or c or g or t.
  misc_feature (1767941)..(1767941): n is a or c or g or t.
MPNYDVHVLSGIVTYPVAVLVGFLLKIYLGVPLELTATSMMLGYAFYVLGSDLPDLDHPDALIHRGSKPIVSVAVGSAVYLWATGWVNISPEWASVVAAWVIGAVGALVGWYAFTWLMPHHRGIVHSLLFAAVYGLLAFLLVEYGLRMSTGEAIYVGLSAFLGYTLHLLLDGSLKLV

SEQ ID NO: 681 - protein, 433 aa, Thermococcus kodakaraensis KOD1
  misc_feature (414542)..(414542): n is a or c or g or t.
  misc_feature (786890)..(786890): n is a or c or g or t.
  misc_feature (786907)..(786907): n is a or c or g or t.
  misc_feature (786944)..(786946): n is a or c or g or t.
  misc_feature (839139)..(839139): n is a or c or g or t.
  misc_feature (1128488)..(1128488): n is a or c or g or t.
  misc_feature (1128499)..(1128499): n is a or c or g or t.
  misc_feature (1128505)..(1128506): n is a or c or g or t.
  misc_feature (1128517)..(1128518): n is a or c or g or t.
  misc_feature (1128539)..(1128540): n is a or c or g or t.
  misc_feature (1561400)..(1561400): n is a or c or g or t.
  misc_feature (1561477)..(1561477): n is a or c or g or t.
  misc_feature (1561545)..(1561545): n is a or c or g or t.
  misc_feature (1767941)..(1767941): n is a or c or g or t.
VISMENPFEITNVIAREILDSRGNPTVEVEVYTPISMGRAAVPSGASTGTHEALELRDGGSRYHGKGVRRAVENVNKIIAPEIIGMDVTWQRDIDTLMLELDGTENKSNLGANAILGVSLAVAKAAANALGLPLYQYIGGTNAYVMPVPMSNVINGGVHAGNELDFQEFMIMPVGADSFREAIRWVSETYHVLKKVIMEKYGRNAVNVGDEGGFAPPMKEVTEPLDVLIKAIEEAGYKPGDEIAFALDAASSEFFDGEKGKYVVAGKEYDKGELLELYRELVTTYPIVSIEDPFHEEDWEGFVMITKELGSKVQIVGDDLFVTNPKRIRKGIEMGAANALLLKVNQIGTLSEAIDAAYTSFRAGYGVVVSHRSGETEDATIADLAVALNAGQIKTGAPARSDRNAKYNQLIRIEEELEGIAVYPGKKFRNPFL

SEQ ID NO: 682 - protein, 238 aa, Thermococcus kodakaraensis KOD1
  misc_feature (414542)..(414542): n is a or c or g or t.
  misc_feature (786890)..(786890): n is a or c or g or t.
  misc_feature (786907)..(786907): n is a or c or g or t.
  misc_feature (786944)..(786946): n is a or c or g or t.
  misc_feature (839139)..(839139): n is a or c or g or t.
  misc_feature (1128488)..(1128488): n is a or c or g or t.
  misc_feature (1128499)..(1128499): n is a or c or g or t.
  misc_feature (1128505)..(1128506): n is a or c or g or t.
  misc_feature (1128517)..(1128518): n is a or c or g or t.
  misc_feature (1128539)..(1128540): n is a or c or g or t.
  misc_feature (1561400)..(1561400): n is a or c or g or t.
  misc_feature (1561477)..(1561477): n is a or c or g or t.
  misc_feature (1561545)..(1561545): n is a or c or g or t.
  misc_feature (1767941)..(1767941): n is a or c or g or t.
MRKPERGELLSYCLRLAEEGYNGCLLSGGMDGRLKVPLDFYANEIKEIKKRTNLKLNAHVGFIDESDLEWVKYVDVVSLDFVGDNDVIRRVYKIDKTVDDYLRVLDILTEAGVRVAPHITIGLDFGKIHWEYKAIDMLVKYPIDVLVLDVLIPTKGTEMENVPKPSVEESLEVVKYAREMFDGELSIGCMRPLGRWRLEFDRGAILTGVDRLTNPPRKVIEWAKGIRDVEIIYECCVM

SEQ ID NO: 683 - protein, 307 aa, Thermococcus kodakaraensis KOD1
  misc_feature (414542)..(414542): n is a or c or g or t.
  misc_feature (786890)..(786890): n is a or c or g or t.
  misc_feature (786907)..(786907): n is a or c or g or t.
  misc_feature (786944)..(786946): n is a or c or g or t.
  misc_feature (839139)..(839139): n is a or c or g or t.
  misc_feature (1128488)..(1128488): n is a or c or g or t.
  misc_feature (1128499)..(1128499): n is a or c or g or t.
  misc_feature (1128505)..(1128506): n is a or c or g or t.
  misc_feature (1128517)..(1128518): n is a or c or g or t.
  misc_feature (1128539)..(1128540): n is a or c or g or t.
  misc_feature (1561400)..(1561400): n is a or c or g or t.
  misc_feature (1561477)..(1561477): n is a or c or g or t.
  misc_feature (1561545)..(1561545): n is a or c or g or t.
  misc_feature (1767941)..(1767941): n is a or c or g or t.
VKVMKKAVAIVILIVLILALWGAYVAYAVMTMNPLLTAEWGNVSEEKVEVVVDAGLGKALLVPASVESLSMQFNGVEVASLEEFDYSPTKSNARIVIGIDPNELVRALERYFESNQHGELSVEAKLGLFGLLHSTLTFSREFQQDILGQMDFKAESKPIFGGLLYTPSVEGTKVVWLGAENGVWNLKTYATLKNPNSFPIPVSNLEFEVSVNGIKVGVGNISQGVTIPAGGVATVPIDTEIYSEYLPTVLVAHIKNGEESSVEVNFYITVSSGGKSARINLTSERIVIQTDIMASINDALSGVSPRE

SEQ ID NO: 684 - protein, 175 aa, Thermococcus kodakaraensis KOD1
  misc_feature (414542)..(414542): n is a or c or g or t.
  misc_feature (786890)..(786890): n is a or c or g or t.
  misc_feature (786907)..(786907): n is a or c or g or t.
  misc_feature (786944)..(786946): n is a or c or g or t.
  misc_feature (839139)..(839139): n is a or c or g or t.
  misc_feature (1128488)..(1128488): n is a or c or g or t.
  misc_feature (1128499)..(1128499): n is a or c or g or t.
  misc_feature (1128505)..(1128506): n is a or c or g or t.
  misc_feature (1128517)..(1128518): n is a or c or g or t.
  misc_feature (1128539)..(1128540): n is a or c or g or t.
  misc_feature (1561400)..(1561400): n is a or c or g or t.
  misc_feature (1561477)..(1561477): n is a or c or g or t.
  misc_feature (1561545)..(1561545): n is a or c or g or t.
  misc_feature (1767941)..(1767941): n is a or c or g or t.
MRGKFDVRAVHEFLNKLWEDVFTLNEELKEELPRFGFKVEDVEEVFGAYLFLDGEWRQMLYPHPAFEVKPQIEVGATPESYYFVVAVPKEKISEDFLEAFLEAFPKSFIYGSEDFLNDVYNCMRDSPLSEEIIKRIHESSEKVFQFEANFDDVEKLKEGLFKVIELGKRFEIFDL

SEQ ID NO: 685 - protein, 385 aa, Thermococcus kodakaraensis KOD1
  misc_feature (414542)..(414542): n is a or c or g or t.
  misc_feature (786890)..(786890): n is a or c or g or t.
  misc_feature (786907)..(786907): n is a or c or g or t.
  misc_feature (786944)..(786946): n is a or c or g or t.
  misc_feature (839139)..(839139): n is a or c or g or t.
  misc_feature (1128488)..(1128488): n is a or c or g or t.
  misc_feature (1128499)..(1128499): n is a or c or g or t.
  misc_feature (1128505)..(1128506): n is a or c or g or t.
  misc_feature (1128517)..(1128518): n is a or c or g or t.
  misc_feature (1128539)..(1128540): n is a or c or g or t.
  misc_feature (1561400)..(1561400): n is a or c or g or t.
  misc_feature (1561477)..(1561477): n is a or c or g or t.
  misc_feature (1561545)..(1561545): n is a or c or g or t.
  misc_feature (1767941)..(1767941): n is a or c or g or t.
VSMGYEEAFPAELREYYRKLFGSEAEEIMASLRTPVEKYYIRVNTLKTSRSELMRRLRREGLKPKRSPYLEEGIYFEREGPNFDDDYDPGLKKVVANKFASESVYQGAMLYAPGVLKADKGIKPGDEVEIRDPRGLLVGIGIARMSGKEMITATRGLAVEVTLPKFKLPSLSELESFKEGLFYAQSLPSMVASRVLEPSEEDLIIDMAAAPGGKTSHIAQLMQNRGEIIAIDKSRNRLRKMEEELKRLGVKNVRLIHMDARKLPELGIEADKILLDAPCTALGIRPKLWETRTPKDIEATARYQRAFIWAAIKSLRKGGTLVYSTCTISYEENEANVKYMLQKGLKLEEQSVFIASHGIDMEGVQRFYPNRHLTQGFFIAKLRKV

SEQ ID NO: 686 - protein, 165 aa, Thermococcus kodakaraensis KOD1
  misc_feature (414542)..(414542): n is a or c or g or t.
  misc_feature (786890)..(786890): n is a or c or g or t.
  misc_feature (786907)..(786907): n is a or c or g or t.
  misc_feature (786944)..(786946): n is a or c or g or t.
  misc_feature (839139)..(839139): n is a or c or g or t.
  misc_feature (1128488)..(1128488): n is a or c or g or t.
  misc_feature (1128499)..(1128499): n is a or c or g or t.
  misc_feature (1128505)..(1128506): n is a or c or g or t.
  misc_feature (1128517)..(1128518): n is a or c or g or t.
  misc_feature (1128539)..(1128540): n is a or c or g or t.
  misc_feature (1561400)..(1561400): n is a or c or g or t.
  misc_feature (1561477)..(1561477): n is a or c or g or t.
  misc_feature (1561545)..(1561545): n is a or c or g or t.
  misc_feature (1767941)..(1767941): n is a or c or g or t.
MRKKYRKVVVGGTFDRLHLGHKALLRKAFEVGKIVYIGLTSDEMVRNKPYAERILPYEHRLKDLLKFIEVNGYTNYRIIKIHTAIGFADSMKSLEAIVVSEETYKGALIVNRAREEKGLKPLDIVTIPIIKSYLGDKISSSLIRAGLIDPFGRPLHWKGNSPKDV

SEQ ID NO: 687 - protein, 178 aa, Thermococcus kodakaraensis KOD1
  misc_feature (414542)..(414542): n is a or c or g or t.
  misc_feature (786890)..(786890): n is a or c or g or t.
  misc_feature (786907)..(786907): n is a or c or g or t.
  misc_feature (786944)..(786946): n is a or c or g or t.
  misc_feature (839139)..(839139): n is a or c or g or t.
  misc_feature (1128488)..(1128488): n is a or c or g or t.
  misc_feature (1128499)..(1128499): n is a or c or g or t.
  misc_feature (1128505)..(1128506): n is a or c or g or t.
  misc_feature (1128517)..(1128518): n is a or c or g or t.
  misc_feature (1128539)..(1128540): n is a or c or g or t.
  misc_feature (1561400)..(1561400): n is a or c or g or t.
  misc_feature (1561477)..(1561477): n is a or c or g or t.
  misc_feature (1561545)..(1561545): n is a or c or g or t.
  misc_feature (1767941)..(1767941): n is a or c or g or t.
VKTMSWKDRLGLIHIYTGNGKGKTTAAFGLAVRMLGSGGKVAIVQFMKAPKVYGEQKKIEECGALIESFGLPGFVHGKPSEDDIKAAKRALERAKELVSSGEWDLVILDEVCVALGFGMLGVEEVKEVIKNKAENTELVLTGRYCPEELFELADYVTEMREVKHPYQRGILARRGVEY

SEQ ID NO: 688 - protein, 75 aa, Thermococcus kodakaraensis KOD1
  misc_feature (414542)..(414542): n is a or c or g or t.
  misc_feature (786890)..(786890): n is a or c or g or t.
  misc_feature (786907)..(786907): n is a or c or g or t.
  misc_feature (786944)..(786946): n is a or c or g or t.
  misc_feature (839139)..(839139): n is a or c or g or t.
  misc_feature (1128488)..(1128488): n is a or c or g or t.
  misc_feature (1128499)..(1128499): n is a or c or g or t.
  misc_feature (1128505)..(1128506): n is a or c or g or t.
  misc_feature (1128517)..(1128518): n is a or c or g or t.
  misc_feature (1128539)..(1128540): n is a or c or g or t.
  misc_feature (1561400)..(1561400): n is a or c or g or t.
  misc_feature (1561477)..(1561477): n is a or c or g or t.
  misc_feature (1561545)..(1561545): n is a or c or g or t.
  misc_feature (1767941)..(1767941): n is a or c or g or t.
MFGRRKDMVYKVLSTKKRAVALQKLSAELETPAPALLKTVKELESEGLVEVFYGVDKASIMVRAKTLEDYFGSEV

SEQ ID NO: 689 - protein, 590 aa, Thermococcus kodakaraensis KOD1
  misc_feature (414542)..(414542): n is a or c or g or t.
  misc_feature (786890)..(786890): n is a or c or g or t.
  misc_feature (786907)..(786907): n is a or c or g or t.
  misc_feature (786944)..(786946): n is a or c or g or t.
  misc_feature (839139)..(839139): n is a or c or g or t.
  misc_feature (1128488)..(1128488): n is a or c or g or t.
  misc_feature (1128499)..(1128499): n is a or c or g or t.
  misc_feature (1128505)..(1128506): n is a or c or g or t.
  misc_feature (1128517)..(1128518): n is a or c or g or t.
  misc_feature (1128539)..(1128540): n is a or c or g or t.
  misc_feature (1561400)..(1561400): n is a or c or g or t.
  misc_feature (1561477)..(1561477): n is a or c or g or t.
  misc_feature (1561545)..(1561545): n is a or c or g or t.
  misc_feature (1767941)..(1767941): n is a or c or g or t.
MAESIGEVPSGEKEFAESTKRIRDIVEFPEISEEEFYELLKNASRAYGAELPHRTYSLCPETRRVVPAVVWEKDGKVWITKKCPEGMITDLYYEDVEMYYRFKRWKWDEKELFSANVQNTGVNCPLDCGLCPRHRSHTNLLNIVLTNRCNLSCWYCFFYAREGQPIYEPTLEQIRMMLRNAKKEHPIGANAVQFTGGEPTLRDDLIEIIRIAKEEGYDHVQLNTDGIKLAFDPELVKKIREAGTNTLYLSYDGMTPQTNWKNHWEIPLIFENVRKAGGPGIVLVPTTIRNVNDHELGAIINFGLNHLDIVRGVNFQPISQVGRVPKKERQRFRITIPGAIKRIEEQTNGAIAKEDWYPIPIAGHIARFFEAFTGSRYYMTSHFACGAATYVFLDRENKRVVPIPRFLDVEGFVEFLESKAEEIEQWKKLGKLQKLKLGAEIFMKFRSFYDDKYAPKGVKVLDLIKNAFMHGNYDALGKFHENALFVGMMHFMDEYNYDVERVERCVIHYAMPDGRIVPFCTFNVIPELYRDKVQAQFSYTWEEWKALHPDWDYKKDKYFRSKEFVEKMRNSELYRKTYIDIEDYFGLNKE

SEQ ID NO: 690 - protein, 772 aa, Thermococcus kodakaraensis KOD1
  misc_feature (414542)..(414542): n is a or c or g or t.
  misc_feature (786890)..(786890): n is a or c or g or t.
  misc_feature (786907)..(786907): n is a or c or g or t.
  misc_feature (786944)..(786946): n is a or c or g or t.
  misc_feature (839139)..(839139): n is a or c or g or t.
  misc_feature (1128488)..(1128488): n is a or c or g or t.
  misc_feature (1128499)..(1128499): n is a or c or g or t.
  misc_feature (1128505)..(1128506): n is a or c or g or t.
  misc_feature (1128517)..(1128518): n is a or c or g or t.
  misc_feature (1128539)..(1128540): n is a or c or g or t.
  misc_feature (1561400)..(1561400): n is a or c or g or t.
  misc_feature (1561477)..(1561477): n is a or c or g or t.
  misc_feature (1561545)..(1561545): n is a or c or g or t.
  misc_feature (1767941)..(1767941): n is a or c or g or t.
VIPLQFRKKIAVIVIAAVLVTLLIGSATVGYATLKMRDNIQKTLDVQLNEVLPKEMEKSVQEPITEEAGTITVSAAELGARLFDDYFDKMRMMGDVAVQDVLEAYSKYDESDPQFKAFLLKRFEMVKNLDPNVAYVYFGSTTGGMYMWPDEPLPEGYDPRVRPWYKEAVDKNGPVWTEPYKDASTGKWIVTFSEPVYINGEFVGVIGVDVFVSTLIDQAKQIKIGQTGYIAILNKDGTIIVHPDESLVQKLNIHDDPNLASLAGELDKNKETGWIRYTFKGVDKIGGYKRMKTTGWIVLATVPINELTDPMMNAIDSSLKANTEKVASEINSEVNSGIKTSLLGSVFAAVFGLIVLGIAYRTLNTTLKPLEQLRDVAQALADGRLSEVREKLRGIQYLEDDEIGALIKAFESVGKDLVGALDTIASKLERLAEGDLSNGLSVEAKGELREVLEDLRDTTHRLKGLIGEIVNVTNELDKRANVLAQVANDVTEAINQVNEAVQQVSIEAQRQQENINEITEGMRLVADMSEESVRAMEEFEGAVNEVVHIAEEGRQKGEVSAQQIQSIQEMMGNIEAAVNRVNEMSRSIEEITNVITGIAEQTNLLALNAAIEAARAGEAGRGFAVVAQEIRNLAEESKKAADNIKEIINRMTEEIRDAVNATQRGVSVVSESSETLRETTEYLTNIAELISDTGARLGHVKEQILRTQEEVDKALKALENLAASAEETTASAEEVSSAVEEQTAAIEELQRAATDLKAIVEKLRDIIGKFKL

SEQ ID NO: 691 - protein, 107 aa, Thermococcus kodakaraensis KOD1
  misc_feature (414542)..(414542): n is a or c or g or t.
  misc_feature (786890)..(786890): n is a or c or g or t.
  misc_feature (786907)..(786907): n is a or c or g or t.
  misc_feature (786944)..(786946): n is a or c or g or t.
  misc_feature (839139)..(839139): n is a or c or g or t.
  misc_feature (1128488)..(1128488): n is a or c or g or t.
  misc_feature (1128499)..(1128499): n is a or c or g or t.
  misc_feature (1128505)..(1128506): n is a or c or g or t.
  misc_feature (1128517)..(1128518): n is a or c or g or t.
  misc_feature (1128539)..(1128540): n is a or c or g or t.
  misc_feature (1561400)..(1561400): n is a or c or g or t.
  misc_feature (1561477)..(1561477): n is a or c or g or t.
  misc_feature (1561545)..(1561545): n is a or c or g or t.
  misc_feature (1767941)..(1767941): n is a or c or g or t.
VLLGLAVIVYYQGTSRINIPLLILALSLTFLELGALAVSIGAKIGNPYKAMAVTGILPWLLVVFSPAYYRSSSPVLYLNPITFLLSCIRSTIGLQSVSPTPCLFRWL

SEQ ID NO: 692 - protein, 20 aa, Thermococcus kodakaraensis KOD1
  misc_feature (414542)..(414542): n is a or c or g or t.
  misc_feature (786890)..(786890): n is a or c or g or t.
  misc_feature (786907)..(786907): n is a or c or g or t.
  misc_feature (786944)..(786946): n is a or c or g or t.
  misc_feature (839139)..(839139): n is a or c or g or t.
  misc_feature (1128488)..(1128488): n is a or c or g or t.
  misc_feature (1128499)..(1128499): n is a or c or g or t.
  misc_feature (1128505)..(1128506): n is a or c or g or t.
  misc_feature (1128517)..(1128518): n is a or c or g or t.
  misc_feature (1128539)..(1128540): n is a or c or g or t.
  misc_feature (1561400)..(1561400): n is a or c or g or t.
  misc_feature (1561477)..(1561477): n is a or c or g or t.
  misc_feature (1561545)..(1561545): n is a or c or g or t.
  misc_feature (1767941)..(1767941): n is a or c or g or t.
MYGLDSETLSVVELEDGLPP

SEQ ID NO: 693 - protein, 152 aa, Thermococcus kodakaraensis KOD1
  misc_feature (414542)..(414542): n is a or c or g or t.
  misc_feature (786890)..(786890): n is a or c or g or t.
  misc_feature (786907)..(786907): n is a or c or g or t.
  misc_feature (786944)..(786946): n is a or c or g or t.
  misc_feature (839139)..(839139): n is a or c or g or t.
  misc_feature (1128488)..(1128488): n is a or c or g or t.
  misc_feature (1128499)..(1128499): n is a or c or g or t.
  misc_feature (1128505)..(1128506): n is a or c or g or t.
  misc_feature (1128517)..(1128518): n is a or c or g or t.
  misc_feature (1128539)..(1128540): n is a or c or g or t.
  misc_feature (1561400)..(1561400): n is a or c or g or t.
  misc_feature (1561477)..(1561477): n is a or c or g or t.
  misc_feature (1561545)..(1561545): n is a or c or g or t.
  misc_feature (1767941)..(1767941): n is a or c or g or t.
VFEMEKVLYVIPNLEYHKGFFKSALVNLVVTDEKIIVAHVKKEMIQKAREEAKERGDGFFKRLASGWTMHERYYDMSPEDVLKESPENFSIPLNGIKEVKLKGGNVDEGKKEEMEIRWKEKSKFSGSMNQREIKKKLSDLGVKVKGGGLFGF

SEQ ID NO: 694 - protein, 452 aa, Thermococcus kodakaraensis KOD1
  misc_feature (414542)..(414542): n is a or c or g or t.
  misc_feature (786890)..(786890): n is a or c or g or t.
  misc_feature (786907)..(786907): n is a or c or g or t.
  misc_feature (786944)..(786946): n is a or c or g or t.
  misc_feature (839139)..(839139): n is a or c or g or t.
  misc_feature (1128488)..(1128488): n is a or c or g or t.
  misc_feature (1128499)..(1128499): n is a or c or g or t.
  misc_feature (1128505)..(1128506): n is a or c or g or t.
  misc_feature (1128517)..(1128518): n is a or c or g or t.
  misc_feature (1128539)..(1128540): n is a or c or g or t.
  misc_feature (1561400)..(1561400): n is a or c or g or t.
  misc_feature (1561477)..(1561477): n is a or c or g or t.
  misc_feature (1561545)..(1561545): n is a or c or g or t.
  misc_feature (1767941)..(1767941): n is a or c or g or t.
VIIMGKYFGTSGIREVFNEKLTPELALKVGKALGTYLGGGKVVIGKDTRTSGDVIKSAVISGLLSTGVDVIDIGLAPTPLTGFAIKLYGADAGVTITASHNPPEYNGIKVWQANGMAYTSEMERELESIMDSGNFKKAPWNEIGTLRRADPSEEYINAALKFVKLENSYTVVLDSGNGAGSVVSPYLQRELGNRVISLNSHPSGFFVRELEPNAKSLSALAKTVRVMKADVGIAHDGDADRIGVVDDQGNFVEYEVMLSLIAGYMLRKFGKGKIVTTVDAGFALDDYLRPLGGEVIRTRVGDVAVADELAKHGGVFGGEPSGTWIIPQWNLTPDGIFAGALVLEMIDRLGPISELAKEVPRYVTLRAKIPCPNEKKAKAMEIIAREALKTFDYEGLIDIDGIRIENGDWWILFRPSGTEPIMRITLEAHEEEKAKELMGKAERLVKKAISEA

SEQ ID NO: 695 - protein, 137 aa, Thermococcus kodakaraensis KOD1
  misc_feature (414542)..(414542): n is a or c or g or t.
  misc_feature (786890)..(786890): n is a or c or g or t.
  misc_feature (786907)..(786907): n is a or c or g or t.
  misc_feature (786944)..(786946): n is a or c or g or t.
  misc_feature (839139)..(839139): n is a or c or g or t.
  misc_feature (1128488)..(1128488): n is a or c or g or t.
  misc_feature (1128499)..(1128499): n is a or c or g or t.
  misc_feature (1128505)..(1128506): n is a or c or g or t.
  misc_feature (1128517)..(1128518): n is a or c or g or t.
  misc_feature (1128539)..(1128540): n is a or c or g or t.
  misc_feature (1561400)..(1561400): n is a or c or g or t.
  misc_feature (1561477)..(1561477): n is a or c or g or t.
  misc_feature (1561545)..(1561545): n is a or c or g or t.
  misc_feature (1767941)..(1767941): n is a or c or g or t.
MKVFTRELRFSTEGEIDLVDITHEVERIVEESGVQNGQVLVFVPGATGAIITIEHESGLLEDFKRALKELIPKGAGYLHDRIDDNAHSHLRASLLGASECFPVVDGRLVRGTWQQIFFVELDVRPRHRRVVVQVIGE

SEQ ID NO: 696 - protein, 526 aa, Thermococcus kodakaraensis KOD1
  misc_feature (414542)..(414542): n is a or c or g or t.
  misc_feature (786890)..(786890): n is a or c or g or t.
  misc_feature (786907)..(786907): n is a or c or g or t.
  misc_feature (786944)..(786946): n is a or c or g or t.
  misc_feature (839139)..(839139): n is a or c or g or t.
  misc_feature (1128488)..(1128488): n is a or c or g or t.
  misc_feature (1128499)..(1128499): n is a or c or g or t.
  misc_feature (1128505)..(1128506): n is a or c or g or t.
  misc_feature (1128517)..(1128518): n is a or c or g or t.
  misc_feature (1128539)..(1128540): n is a or c or g or t.
  misc_feature (1561400)..(1561400): n is a or c or g or t.
  misc_feature (1561477)..(1561477): n is a or c or g or t.
  misc_feature (1561545)..(1561545): n is a or c or g or t.
  misc_feature (1767941)..(1767941): n is a or c or g or t.
VSAMKGVRDYSALAIALAVLLLGWFFRPWFHGLVMGFYRNPALLYMFLALGALMAVKPKRYILGKNYTLPLILGGLFILSIVALILSSPFANTDLYKEYHPSLVTGELNLSTSYIRILPKFTAYRYAIDTIEYARYTLSDGHLTMLNGTPVWGFYIVPDGAWNSIRLKDKGVLFVDMGTTQAKMQRIEEELQVGPGMQFFDNLNWVLYKKHYLVDLDLPRALHYNGKLYIVVPYISYDFKVFYTVPKWGGVFIVDEDGNVEDLSPEEAIKDERLKDFPIFPENLVRDVVEAQNYWKDSVFANIKNLWPHHENQIELIDVSNQGNRQPFLVVATDGGKYWMTAVEPYGKAHGLAAIYLMNARTGEMSQVKFETPLTGPVKAIDYVKKALPTFDWSQFMAVEPIPVFIDGTLWWRVAIIPRSGSGVAKIAFVNAETKEVKIFEDEREVKEFLLRGEVVQAEEITGEVKALYSYIKDGNTHWILVVGNRTLYISAADLSEELILKLLSIKQGDNVTVVISEGRIVDIKR

SEQ ID NO: 697 - protein, 173 aa, Thermococcus kodakaraensis KOD1
  misc_feature (414542)..(414542): n is a or c or g or t.
  misc_feature (786890)..(786890): n is a or c or g or t.
  misc_feature (786907)..(786907): n is a or c or g or t.
  misc_feature (786944)..(786946): n is a or c or g or t.
  misc_feature (839139)..(839139): n is a or c or g or t.
  misc_feature (1128488)..(1128488): n is a or c or g or t.
  misc_feature (1128499)..(1128499): n is a or c or g or t.
  misc_feature (1128505)..(1128506): n is a or c or g or t.
  misc_feature (1128517)..(1128518): n is a or c or g or t.
  misc_feature (1128539)..(1128540): n is a or c or g or t.
  misc_feature (1561400)..(1561400): n is a or c or g or t.
  misc_feature (1561477)..(1561477): n is a or c or g or t.
  misc_feature (1561545)..(1561545): n is a or c or g or t.
  misc_feature (1767941)..(1767941): n is a or c or g or t.
MEGKLMIIFYLSGDRVFSTDQNAINGLYNKRYFGKVVEGKLFLSLLEAAYLVERGKIEVRDGKRKLSLEEIMNLGRARDELFDAKYLVYKDLRDRGYTVKSGLKFGSHFRVYRRGMEEHSEWLVWVVPENSRLSPNDITARVRVAHGVRKNMIMAIVDEDADVTYYKVEWVKF

SEQ ID NO: 698 - protein, 17 aa, Thermococcus kodakaraensis KOD1
  misc_feature (414542)..(414542): n is a or c or g or t.
  misc_feature (786890)..(786890): n is a or c or g or t.
  misc_feature (786907)..(786907): n is a or c or g or t.
  misc_feature (786944)..(786946): n is a or c or g or t.
  misc_feature (839139)..(839139): n is a or c or g or t.
  misc_feature (1128488)..(1128488): n is a or c or g or t.
  misc_feature (1128499)..(1128499): n is a or c or g or t.
  misc_feature (1128505)..(1128506): n is a or c or g or t.
  misc_feature (1128517)..(1128518): n is a or c or g or t.
  misc_feature (1128539)..(1128540): n is a or c or g or t.
  misc_feature (1561400)..(1561400): n is a or c or g or t.
  misc_feature (1561477)..(1561477): n is a or c or g or t.
  misc_feature (1561545)..(1561545): n is a or c or g or t.
  misc_feature (1767941)..(1767941): n is a or c or g or t.
VSEKPSVIKSYERENWG

SEQ ID NO: 699 - protein, 80 aa, Thermococcus kodakaraensis KOD1
  misc_feature (414542)..(414542): n is a or c or g or t.
  misc_feature (786890)..(786890): n is a or c or g or t.
  misc_feature (786907)..(786907): n is a or c or g or t.
  misc_feature (786944)..(786946): n is a or c or g or t.
  misc_feature (839139)..(839139): n is a or c or g or t.
  misc_feature (1128488)..(1128488): n is a or c or g or t.
  misc_feature (1128499)..(1128499): n is a or c or g or t.
  misc_feature (1128505)..(1128506): n is a or c or g or t.
  misc_feature (1128517)..(1128518): n is a or c or g or t.
  misc_feature (1128539)..(1128540): n is a or c or g or t.
  misc_feature (1561400)..(1561400): n is a or c or g or t.
  misc_feature (1561477)..(1561477): n is a or c or g or t.
  misc_feature (1561545)..(1561545): n is a or c or g or t.
  misc_feature (1767941)..(1767941): n is a or c or g or t.
MELRAQDASLIPHDNPVYELAMEEVSIAEALKLARDMLENPEKYGIKEKDERRRGEKAAEMLRKTMEEGKVVGFFHKERA

SEQ ID NO: 700 - protein, 239 aa, Thermococcus kodakaraensis KOD1
  misc_feature (414542)..(414542): n is a or c or g or t.
  misc_feature (786890)..(786890): n is a or c or g or t.
  misc_feature (786907)..(786907): n is a or c or g or t.
  misc_feature (786944)..(786946): n is a or c or g or t.
  misc_feature (839139)..(839139): n is a or c or g or t.
  misc_feature (1128488)..(1128488): n is a or c or g or t.
  misc_feature (1128499)..(1128499): n is a or c or g or t.
  misc_feature (1128505)..(1128506): n is a or c or g or t.
  misc_feature (1128517)..(1128518): n is a or c or g or t.
  misc_feature (1128539)..(1128540): n is a or c or g or t.
  misc_feature (1561400)..(1561400): n is a or c or g or t.
  misc_feature (1561477)..(1561477): n is a or c or g or t.
  misc_feature (1561545)..(1561545): n is a or c or g or t.
  misc_feature (1767941)..(1767941): n is a or c or g or t.
MGQRGSQRLALFFPALRWPVLLLLGLFLVIVFAFFSGAVLVAFRRLGLPPEVALTMFVFALVGSFINIPIAEERAYEPVIKLREVSFFGFLYPIPYFGVEERRMIISINVGGALVPLSIVLYELIRIAMLGQYGLLFNTLLAVLIAALICNAVSVPVRGVGIAMPSIVPPLVAVLLGWLLGDGNPTLVAYVSGTLGALLGADIMNWKKLKHLDAPMVSIGGAGTFDGVFLAGVIAVLLV

SEQ ID NO: 701 - protein, 280 aa, Thermococcus kodakaraensis KOD1
  misc_feature (414542)..(414542): n is a or c or g or t.
  misc_feature (786890)..(786890): n is a or c or g or t.
  misc_feature (786907)..(786907): n is a or c or g or t.
  misc_feature (786944)..(786946): n is a or c or g or t.
  misc_feature (839139)..(839139): n is a or c or g or t.
  misc_feature (1128488)..(1128488): n is a or c or g or t.
  misc_feature (1128499)..(1128499): n is a or c or g or t.
  misc_feature (1128505)..(1128506): n is a or c or g or t.
  misc_feature (1128517)..(1128518): n is a or c or g or t.
  misc_feature (1128539)..(1128540): n is a or c or g or t.
  misc_feature (1561400)..(1561400): n is a or c or g or t.
  misc_feature (1561477)..(1561477): n is a or c or g or t.
  misc_feature (1561545)..(1561545): n is a or c or g or t.
  misc_feature (1767941)..(1767941): n is a or c or g or t.
MFLLGSGGKHFEDELRNAGAKILEVEIKRFPDGEKYVRVMGNGDEATVVSSTFYPQDEKIVELLLLGDALREKGFEKLKLVVPYFAYSRQDRVTKDGEPISVRAVMRALGIYYEELYIFDTHNPETLRFFPGKAVNVSPARVIGEYFREKLGDGLVLAPDKGALERARAVAEVLGLEYSHFEKRRISPTEVEMHPVDVDVKGKNVLIVDDIISTGGTMVRAAELLRKLGAKKIYVSATHGVFAEGAIERVSRAVDELAVTNTIPTPVSRISIVPELLKLE

SEQ ID NO: 702 - protein, 191 aa, Thermococcus kodakaraensis KOD1
  misc_feature (414542)..(414542): n is a or c or g or t.
  misc_feature (786890)..(786890): n is a or c or g or t.
  misc_feature (786907)..(786907): n is a or c or g or t.
  misc_feature (786944)..(786946): n is a or c or g or t.
  misc_feature (839139)..(839139): n is a or c or g or t.
  misc_feature (1128488)..(1128488): n is a or c or g or t.
  misc_feature (1128499)..(1128499): n is a or c or g or t.
  misc_feature (1128505)..(1128506): n is a or c or g or t.
  misc_feature (1128517)..(1128518): n is a or c or g or t.
  misc_feature (1128539)..(1128540): n is a or c or g or t.
  misc_feature (1561400)..(1561400): n is a or c or g or t.
  misc_feature (1561477)..(1561477): n is a or c or g or t.
  misc_feature (1561545)..(1561545): n is a or c or g or t.
  misc_feature (1767941)..(1767941): n is a or c or g or t.
VIEMELLIVKDKRIDYDGSAIQSHWAYRNFGILGDSIVIFRGKCDVKVEEMIDIEDLRQSKEIKSHDMVHYIIEVFDLVNTLFASTLQKLFIARLCEVLGEYGVKTQRKGDDIYVNGKKLSISIATVSPVSVKMHIGINVEARGIPEGVDAIGLKELGVTDVDEFMEKTGKALVEEFNKVKRDSLKVRWAQ

SEQ ID NO: 703 - protein, 321 aa, Thermococcus kodakaraensis KOD1
  misc_feature (414542)..(414542): n is a or c or g or t.
  misc_feature (786890)..(786890): n is a or c or g or t.
  misc_feature (786907)..(786907): n is a or c or g or t.
  misc_feature (786944)..(786946): n is a or c or g or t.
  misc_feature (839139)..(839139): n is a or c or g or t.
  misc_feature (1128488)..(1128488): n is a or c or g or t.
  misc_feature (1128499)..(1128499): n is a or c or g or t.
  misc_feature (1128505)..(1128506): n is a or c or g or t.
  misc_feature (1128517)..(1128518): n is a or c or g or t.
  misc_feature (1128539)..(1128540): n is a or c or g or t.
  misc_feature (1561400)..(1561400): n is a or c or g or t.
  misc_feature (1561477)..(1561477): n is a or c or g or t.
  misc_feature (1561545)..(1561545): n is a or c or g or t.
  misc_feature (1767941)..(1767941): n is a or c or g or t.
VRLMDSIRIKAPAHLHTGNPDLSGDMGRLYGTVGFAIETPSLEVEVRKSDRDRSNDNDALKFLRRFRESYDFPPVEVTVRRYIPKWVGIGFHTTLALTMGAAISKLYGLGLSLEDVALAMRRGLITALGFYAVKVGGFIYEGGFPVDRREKVVPPLIFRGEMPEDWLFVVAIPETPRKALTEVRKREDEILGNLKKMPPELADRLSRIVLMKILPAFVERDIRTFGEGLYQFNHLLGEFWSDYQENVYCCDIVNEGIKLMLERAHCACQTSWGPTFYGLVDGIEHAERLRAEVEAFLRENGDGGEVFVTKADNRGMVVLDG

SEQ ID NO: 704 - protein, 205 aa, Thermococcus kodakaraensis KOD1
  misc_feature (414542)..(414542): n is a or c or g or t.
  misc_feature (786890)..(786890): n is a or c or g or t.
  misc_feature (786907)..(786907): n is a or c or g or t.
  misc_feature (786944)..(786946): n is a or c or g or t.
  misc_feature (839139)..(839139): n is a or c or g or t.
  misc_feature (1128488)..(1128488): n is a or c or g or t.
  misc_feature (1128499)..(1128499): n is a or c or g or t.
  misc_feature (1128505)..(1128506): n is a or c or g or t.
  misc_feature (1128517)..(1128518): n is a or c or g or t.
  misc_feature (1128539)..(1128540): n is a or c or g or t.
  misc_feature (1561400)..(1561400): n is a or c or g or t.
  misc_feature (1561477)..(1561477): n is a or c or g or t.
  misc_feature (1561545)..(1561545): n is a or c or g or t.
  misc_feature (1767941)..(1767941): n is a or c or g or t.
MFLPKLFLVVGMEFNLIITGVGGQGGLTLSRIVGNAAMVEGYNVRIGETLGMSQRYGSVLSYLRFGEEVYSPLIEEGEADLMLALEPAEALRNARFLSRKSHAIINAYPIHTATTLVGKERYPELNEIKEAIGRICPVDMLDFQKEADKINPRTLGVLMLGYAYGKGLIPLRKESILEGIKLTLREKLWEMNFRAFERGVELSKE

SEQ ID NO: 705 - protein, 211 aa, Thermococcus kodakaraensis KOD1
  misc_feature (414542)..(414542): n is a or c or g or t.
  misc_feature (786890)..(786890): n is a or c or g or t.
  misc_feature (786907)..(786907): n is a or c or g or t.
  misc_feature (786944)..(786946): n is a or c or g or t.
  misc_feature (839139)..(839139): n is a or c or g or t.
  misc_feature (1128488)..(1128488): n is a or c or g or t.
  misc_feature (1128499)..(1128499): n is a or c or g or t.
  misc_feature (1128505)..(1128506): n is a or c or g or t.
  misc_feature (1128517)..(1128518): n is a or c or g or t.
  misc_feature (1128539)..(1128540): n is a or c or g or t.
  misc_feature (1561400)..(1561400): n is a or c or g or t.
  misc_feature (1561477)..(1561477): n is a or c or g or t.
  misc_feature (1561545)..(1561545): n is a or c or g or t.
  misc_feature (1767941)..(1767941): n is a or c or g or t.
MPIYKVKLRKTLQSLPGVEIILDEPTRIVAKSLLDEDEVNLAELLNRIRSLILSMLGDIELLIQSPGNEEILRDINDLESELDRFYFLIIRTVSRLLTKRGITEESGIIRRTFDLIGILFIVRNIERIGDHLIRIAENPDRINVPYLKEKFSQMLDQIEERDLMKVDKLMLELKEEIKSIDYHRSIAMESYRRILEYLENIGETIINMALS

SEQ ID NO: 706 - protein, 309 aa, Thermococcus kodakaraensis KOD1
  misc_feature (414542)..(414542): n is a or c or g or t.
  misc_feature (786890)..(786890): n is a or c or g or t.
  misc_feature (786907)..(786907): n is a or c or g or t.
  misc_feature (786944)..(786946): n is a or c or g or t.
  misc_feature (839139)..(839139): n is a or c or g or t.
  misc_feature (1128488)..(1128488): n is a or c or g or t.
  misc_feature (1128499)..(1128499): n is a or c or g or t.
  misc_feature (1128505)..(1128506): n is a or c or g or t.
  misc_feature (1128517)..(1128518): n is a or c or g or t.
  misc_feature (1128539)..(1128540): n is a or c or g or t.
  misc_feature (1561400)..(1561400): n is a or c or g or t.
  misc_feature (1561477)..(1561477): n is a or c or g or t.
  misc_feature (1561545)..(1561545): n is a or c or g or t.
  misc_feature (1767941)..(1767941): n is a or c or g or t.
VILMAAIIVHGGAGTIRKEERIPKVIEGVREAVLAGWRELKRGSALDAVEEAVKALEDNPIFNAGTGSVLTLDGKVEMDAAIMRGKTLDAGAVAGIWGVKNPISVARKVMEKTDHVLLIGEGAVKFARLLGFEEYDPITEERLKQWEELRKKLIEKGETKHWKKLNELIKEYPEVLRSTVGAVAFDGEEVVAGTSTGGVFLKMFGRVGDTPIIGGGTYANEVAGASCTGLGEVAIKLALAKSAADFVRLGMDAQTASEAAISLATKYFGPDTMGIIMVDAKGNVGFAKNTKHMSYAFMKDGMDEPEAGV

SEQ ID NO: 707 - protein, 203 aa, Thermococcus kodakaraensis KOD1
  misc_feature (414542)..(414542): n is a or c or g or t.
  misc_feature (786890)..(786890): n is a or c or g or t.
  misc_feature (786907)..(786907): n is a or c or g or t.
  misc_feature (786944)..(786946): n is a or c or g or t.
  misc_feature (839139)..(839139): n is a or c or g or t.
  misc_feature (1128488)..(1128488): n is a or c or g or t.
  misc_feature (1128499)..(1128499): n is a or c or g or t.
  misc_feature (1128505)..(1128506): n is a or c or g or t.
  misc_feature (1128517)..(1128518): n is a or c or g or t.
  misc_feature (1128539)..(1128540): n is a or c or g or t.
  misc_feature (1561400)..(1561400): n is a or c or g or t.
  misc_feature (1561477)..(1561477): n is a or c or g or t.
  misc_feature (1561545)..(1561545): n is a or c or g or t.
  misc_feature (1767941)..(1767941): n is a or c or g or t.
MGLIRAKLLARPTTAYLMTYWPGRCSNDCAFCAQARSSRADLEKLSRVVWPSFMLEDVLEGLKKGNFARICLQTIDYPGMVEDVFDLLEAFSDLNLPISVSITPVDSETLERFKERGVDYIGVGLDVASERLFREIKPDLSWEEVWDFAGRVIDVFGRGKALLHVIVGLGETDGELVNTFIRAREIGADVSIYCLHAYKGNPP

SEQ ID NO: 708 - protein, 276 aa, Thermococcus kodakaraensis KOD1
  misc_feature (414542)..(414542): n is a or c or g or t.
  misc_feature (786890)..(786890): n is a or c or g or t.
  misc_feature (786907)..(786907): n is a or c or g or t.
  misc_feature (786944)..(786946): n is a or c or g or t.
  misc_feature (839139)..(839139): n is a or c or g or t.
  misc_feature (1128488)..(1128488): n is a or c or g or t.
  misc_feature (1128499)..(1128499): n is a or c or g or t.
  misc_feature (1128505)..(1128506): n is a or c or g or t.
  misc_feature (1128517)..(1128518): n is a or c or g or t.
  misc_feature (1128539)..(1128540): n is a or c or g or t.
  misc_feature (1561400)..(1561400): n is a or c or g or t.
  misc_feature (1561477)..(1561477): n is a or c or g or t.
  misc_feature (1561545)..(1561545): n is a or c or g or t.
  misc_feature (1767941)..(1767941): n is a or c or g or t.
MVFKLNFETLINLFDVGYIGTTMEGSIMRIEIKLRPAEVGTILPFNYNYEVYSQLLEKVYLVSPELGKEVESSGVDYFTFSRIMVRKRELIPEAGIRVLSDDVSLYVSSHSADVIHAIAEGFLDDPLLKIKDATFIADDVKVLKEPELKGPVLFSTLSPILVRTVKFVNGRMKVWDLYPDDEMFFDKLRKIMLMRYSSIYGRMPENKEFKIEVLKFKPVRILVRDTYYRSSLMVFKYSGSPELAWLGYETGFGEKTRYGFGMVKVIDSEQGQEGQE

SEQ ID NO: 709 - protein, 440 aa, Thermococcus kodakaraensis KOD1
  misc_feature (414542)..(414542): n is a or c or g or t.
  misc_feature (786890)..(786890): n is a or c or g or t.
  misc_feature (786907)..(786907): n is a or c or g or t.
  misc_feature (786944)..(786946): n is a or c or g or t.
  misc_feature (839139)..(839139): n is a or c or g or t.
  misc_feature (1128488)..(1128488): n is a or c or g or t.
  misc_feature (1128499)..(1128499): n is a or c or g or t.
  misc_feature (1128505)..(1128506): n is a or c or g or t.
  misc_feature (1128517)..(1128518): n is a or c or g or t.
  misc_feature (1128539)..(1128540): n is a or c or g or t.
  misc_feature (1561400)..(1561400): n is a or c or g or t.
  misc_feature (1561477)..(1561477): n is a or c or g or t.
  misc_feature (1561545)..(1561545): n is a or c or g or t.
  misc_feature (1767941)..(1767941): n is a or c or g or t.
MDIRLVVFDLDGTLIGAPKAFSEVKEELRKRLLERGISEELIGDLTPMYETLIEISEKTGIPFDELHSIQVELETERMKDAFLFKGVRESLEFLREKGIRMAVVTRSSRDAALFALQKTGIADYFDVIVAREDVPPDQLKPNGGQIKRVLDALGVPPEKTLVVGDHGYDVIAAKNAGALSLLVTSHDAGRMSFSVEATPNFEIPTMEHFIPLMGRLLSSYVVVPAYNEEKTIGSVLTDLLRYFRREEIVVVNDGSKDRTEEIARSFGVHVLTHLVNRGLGGALGTGLAYAVRKGAKMILTFDADGQHLIGDALKVMKPVAEGKADFAVGSRLKGDTSQMPFIKKFGNFVLDFITALFARKYVSDSQSGLRCFSGECAAKIKITCDRYAVSSEIIIEAVKNGCRIVEVPIKAVYTEYSMRKGTNVLEGVKIALNLLFDKLR

SEQ ID NO: 710 - protein, 124 aa, Thermococcus kodakaraensis KOD1
  misc_feature (414542)..(414542): n is a or c or g or t.
  misc_feature (786890)..(786890): n is a or c or g or t.
  misc_feature (786907)..(786907): n is a or c or g or t.
  misc_feature (786944)..(786946): n is a or c or g or t.
  misc_feature (839139)..(839139): n is a or c or g or t.
  misc_feature (1128488)..(1128488): n is a or c or g or t.
  misc_feature (1128499)..(1128499): n is a or c or g or t.
  misc_feature (1128505)..(1128506): n is a or c or g or t.
  misc_feature (1128517)..(1128518): n is a or c or g or t.
  misc_feature (1128539)..(1128540): n is a or c or g or t.
  misc_feature (1561400)..(1561400): n is a or c or g or t.
  misc_feature (1561477)..(1561477): n is a or c or g or t.
  misc_feature (1561545)..(1561545): n is a or c or g or t.
  misc_feature (1767941)..(1767941): n is a or c or g or t.
MYVAQIIALLVLAYLLLRIYRYYSEGRLDWQSVISWALLVLVFVVVAIFPIQVSQTIKDLLGLGRGLDALFVVSIGLLFFIVFDLYLKIDKTEREITELTRKVAIELEEINERLKALEEKVGER

SEQ ID NO: 711 - protein, 305 aa, Thermococcus kodakaraensis KOD1
  misc_feature (414542)..(414542): n is a or c or g or t.
  misc_feature (786890)..(786890): n is a or c or g or t.
  misc_feature (786907)..(786907): n is a or c or g or t.
  misc_feature (786944)..(786946): n is a or c or g or t.
  misc_feature (839139)..(839139): n is a or c or g or t.
  misc_feature (1128488)..(1128488): n is a or c or g or t.
  misc_feature (1128499)..(1128499): n is a or c or g or t.
  misc_feature (1128505)..(1128506): n is a or c or g or t.
  misc_feature (1128517)..(1128518): n is a or c or g or t.
  misc_feature (1128539)..(1128540): n is a or c or g or t.
  misc_feature (1561400)..(1561400): n is a or c or g or t.
  misc_feature (1561477)..(1561477): n is a or c or g or t.
  misc_feature (1561545)..(1561545): n is a or c or g or t.
  misc_feature (1767941)..(1767941): n is a or c or g or t.
VTVVTVAKLSINLSGLEFENPLILASGINDKVPEQWIRAHEEGAGGVVTKSIGIEPRKGYDNPTIVELPYGLINAMGLPNPGWKGFLEMVEGYSFDFPLIVSIFGGTPEEFAFLAEKLSEVADAFELNLSCPHAKGYGMEIGQKPENVYAVVKAVKDATDKPVIAKLTPNIDDITKLGLAAENAGADAVSAINTLKAIAIDIYARKPILSNKVGGYSGPGVKPVALRAVYDLARTLDIPVIGIGGITTWQDAVEFLLAGASALQIGTAVSLRGWKVFREINEGIERYLREEGFSSVEEIVGLALE

SEQ ID NO: 712 - protein, 136 aa, Thermococcus kodakaraensis KOD1
  misc_feature (414542)..(414542): n is a or c or g or t.
  misc_feature (786890)..(786890): n is a or c or g or t.
  misc_feature (786907)..(786907): n is a or c or g or t.
  misc_feature (786944)..(786946): n is a or c or g or t.
  misc_feature (839139)..(839139): n is a or c or g or t.
  misc_feature (1128488)..(1128488): n is a or c or g or t.
  misc_feature (1128499)..(1128499): n is a or c or g or t.
  misc_feature (1128505)..(1128506): n is a or c or g or t.
  misc_feature (1128517)..(1128518): n is a or c or g or t.
  misc_feature (1128539)..(1128540): n is a or c or g or t.
  misc_feature (1561400)..(1561400): n is a or c or g or t.
  misc_feature (1561477)..(1561477): n is a or c or g or t.
  misc_feature (1561545)..(1561545): n is a or c or g or t.
  misc_feature (1767941)..(1767941): n is a or c or g or t.
MEAVIDTNVFLYAAVEEMPRHREAFELLHSPSLEKWIVPTIVIYEVVWNFRKLGFSSEEARELVEQIVEDERTKLVDDRRYLIKAFETLQSLSLTHYNDSVLLTIATEVGALATYDKKRRKRAKKLGIKLLPEVVE

SEQ ID NO: 713 - protein, 63 aa, Thermococcus kodakaraensis KOD1
  misc_feature (414542)..(414542): n is a or c or g or t.
  misc_feature (786890)..(786890): n is a or c or g or t.
  misc_feature (786907)..(786907): n is a or c or g or t.
  misc_feature (786944)..(786946): n is a or c or g or t.
  misc_feature (839139)..(839139): n is a or c or g or t.
  misc_feature (1128488)..(1128488): n is a or c or g or t.
  misc_feature (1128499)..(1128499): n is a or c or g or t.
  misc_feature (1128505)..(1128506): n is a or c or g or t.
  misc_feature (1128517)..(1128518): n is a or c or g or t.
  misc_feature (1128539)..(1128540): n is a or c or g or t.
  misc_feature (1561400)..(1561400): n is a or c or g or t.
  misc_feature (1561477)..(1561477): n is a or c or g or t.
  misc_feature (1561545)..(1561545): n is a or c or g or t.
  misc_feature (1767941)..(1767941): n is a or c or g or t.
MSRMRIISVQLPQGLINAMDQLVKKGVYPNRSEVIREAIRELLKKELYRLETEERSTPDYIIK

SEQ ID NO: 714 - protein, 259 aa, Thermococcus kodakaraensis KOD1
  misc_feature (414542)..(414542): n is a or c or g or t.
  misc_feature (786890)..(786890): n is a or c or g or t.
  misc_feature (786907)..(786907): n is a or c or g or t.
  misc_feature (786944)..(786946): n is a or c or g or t.
  misc_feature (839139)..(839139): n is a or c or g or t.
  misc_feature (1128488)..(1128488): n is a or c or g or t.
  misc_feature (1128499)..(1128499): n is a or c or g or t.
  misc_feature (1128505)..(1128506): n is a or c or g or t.
  misc_feature (1128517)..(1128518): n is a or c or g or t.
  misc_feature (1128539)..(1128540): n is a or c or g or t.
  misc_feature (1561400)..(1561400): n is a or c or g or t.
  misc_feature (1561477)..(1561477): n is a or c or g or t.
  misc_feature (1561545)..(1561545): n is a or c or g or t.
  misc_feature (1767941)..(1767941): n is a or c or g or t.
VKPMAVVISVANQKGGVGKTTLTMNLGFALSEMGKRVLLVDVDPQFNLTFGLIGMKVLEHSSRNVGTLMTRESEIEETIVPVKENLDLIPSHLNLSAKEIEIINAYNRERRLEKALIPVLPDYDYVLIDNPPSMGIFLVNSLTASDYVLIPLELSYFGVIGMQLMFNLMRMIREETNENLKLLGLVPNKFTKQTKVPKMRLKELKEAYPDAPILTTIPKAIALEKAQSEGKSIFEFEPNGRASKAFQKLAKEVVEIVEG

SEQ ID NO: 715 - protein, 253 aa, Thermococcus kodakaraensis KOD1
  misc_feature (414542)..(414542): n is a or c or g or t.
  misc_feature (786890)..(786890): n is a or c or g or t.
  misc_feature (786907)..(786907): n is a or c or g or t.
  misc_feature (786944)..(786946): n is a or c or g or t.
  misc_feature (839139)..(839139): n is a or c or g or t.
  misc_feature (1128488)..(1128488): n is a or c or g or t.
  misc_feature (1128499)..(1128499): n is a or c or g or t.
  misc_feature (1128505)..(1128506): n is a or c or g or t.
  misc_feature (1128517)..(1128518): n is a or c or g or t.
  misc_feature (1128539)..(1128540): n is a or c or g or t.
  misc_feature (1561400)..(1561400): n is a or c or g or t.
  misc_feature (1561477)..(1561477): n is a or c or g or t.
  misc_feature (1561545)..(1561545): n is a or c or g or t.
  misc_feature (1767941)..(1767941): n is a or c or g or t.
MIIIEDLVKSFGPTTAVRGISFSVNDGEIYGLLGPNGSGKSTTMKIVAGIIPPTSGKVTVNGIDVSANPLKVKEIAGYIPETPALYESLTPMEFFSFVGSIRRVPKEELEERVEKLSRAFGIDSFLGELIGTLSFGTKQKVSIISALLHDPEVLVLDEAVNGLDPKSARILKELLLDFKKRGRSILFSTHVLEVAEALCDRIGIIYRGEIVAEGTPKELKEFTKEESLEEVFLKLTEGKSEVEGIVKALREAF

SEQ ID NO: 716 - protein, 306 aa, Thermococcus kodakaraensis KOD1
  misc_feature (414542)..(414542): n is a or c or g or t.
  misc_feature (786890)..(786890): n is a or c or g or t.
  misc_feature (786907)..(786907): n is a or c or g or t.
  misc_feature (786944)..(786946): n is a or c or g or t.
  misc_feature (839139)..(839139): n is a or c or g or t.
  misc_feature (1128488)..(1128488): n is a or c or g or t.
  misc_feature (1128499)..(1128499): n is a or c or g or t.
  misc_feature (1128505)..(1128506): n is a or c or g or t.
  misc_feature (1128517)..(1128518): n is a or c or g or t.
  misc_feature (1128539)..(1128540): n is a or c or g or t.
  misc_feature (1561400)..(1561400): n is a or c or g or t.
  misc_feature (1561477)..(1561477): n is a or c or g or t.
  misc_feature (1561545)..(1561545): n is a or c or g or t.
  misc_feature (1767941)..(1767941): n is a or c or g or t.
VRGISPKRVCPICGSTEFIYDPRRGEIVCAKCGYVIEENVVDEGPEWRAFEPGQREKRARTGAPMTLMIHDKGLSTDIDWRDKDIHGNQITGMYRNKLRRLRMWQRRMRINDAAERNLAFALSELDRMAAQLRLPRHLKEVAASLYRKAVMKKLIRGRSIEGMVSAALYAACRMEGIPRTLDEIASVSKVSKKEIGRSYRFMARGLGLNLRPTSPIEYVDRFGDALGVSARTKKRAKEILNEAIKRGITSGKGPTGLAAAALYIAALLEGEKKTQREVAEVAHVTEVTVRNRYKELVEKLGINVPI

SEQ ID NO: 717 - protein, 162 aa, Thermococcus kodakaraensis KOD1
  misc_feature (414542)..(414542): n is a or c or g or t.
  misc_feature (786890)..(786890): n is a or c or g or t.
  misc_feature (786907)..(786907): n is a or c or g or t.
  misc_feature (786944)..(786946): n is a or c or g or t.
  misc_feature (839139)..(839139): n is a or c or g or t.
  misc_feature (1128488)..(1128488): n is a or c or g or t.
  misc_feature (1128499)..(1128499): n is a or c or g or t.
  misc_feature (1128505)..(1128506): n is a or c or g or t.
  misc_feature (1128517)..(1128518): n is a or c or g or t.
  misc_feature (1128539)..(1128540): n is a or c or g or t.
  misc_feature (1561400)..(1561400): n is a or c or g or t.
  misc_feature (1561477)..(1561477): n is a or c or g or t.
  misc_feature (1561545)..(1561545): n is a or c or g or t.
  misc_feature (1767941)..(1767941): n is a or c or g or t.
VAVVSDTHYGDKTRNLPTLLFEHLMKIQPELILHAGDITSPELLEKLEEIAPTLAVRGNVDRLNLPEEEVVEAEDVKIGMIHGHQLLSLNAHFLTLKALEMDVDVLVFGHTHRYYYDIHSLYGKKVILLNPGSPVFPRMDSPGFAVLKFSGENVGVERITFW

SEQ ID NO: 718 - protein, 225 aa, Thermococcus kodakaraensis KOD1
  misc_feature (414542)..(414542): n is a or c or g or t.
  misc_feature (786890)..(786890): n is a or c or g or t.
  misc_feature (786907)..(786907): n is a or c or g or t.
  misc_feature (786944)..(786946): n is a or c or g or t.
  misc_feature (839139)..(839139): n is a or c or g or t.
  misc_feature (1128488)..(1128488): n is a or c or g or t.
  misc_feature (1128499)..(1128499): n is a or c or g or t.
  misc_feature (1128505)..(1128506): n is a or c or g or t.
  misc_feature (1128517)..(1128518): n is a or c or g or t.
  misc_feature (1128539)..(1128540): n is a or c or g or t.
  misc_feature (1561400)..(1561400): n is a or c or g or t.
  misc_feature (1561477)..(1561477): n is a or c or g or t.
  misc_feature (1561545)..(1561545): n is a or c or g or t.
  misc_feature (1767941)..(1767941): n is a or c or g or t.
VMKMLEGYYIVENTGVVPAERRFKFKDLKAWGYDLHLGTIDGREAYFVSKAGTREEGETYTEGGKEYHISETQKEIPKNARLLARIVIEKGQPYLEFWLDTEDGNFPLAKEDPRLILHRFWTEKKFNQLEKHVGSVGLTTDFFKDRVFVKSIPLPYEEYPPKVRRVLREVRDVHRDLTGFGRFVFQYFGEEDKTHQYRLWWLLPTIHLFDVEVSNEVDKILAMLD

SEQ ID NO: 719 - protein, 149 aa, Thermococcus kodakaraensis KOD1
  misc_feature (414542)..(414542): n is a or c or g or t.
  misc_feature (786890)..(786890): n is a or c or g or t.
  misc_feature (786907)..(786907): n is a or c or g or t.
  misc_feature (786944)..(786946): n is a or c or g or t.
  misc_feature (839139)..(839139): n is a or c or g or t.
  misc_feature (1128488)..(1128488): n is a or c or g or t.
  misc_feature (1128499)..(1128499): n is a or c or g or t.
  misc_feature (1128505)..(1128506): n is a or c or g or t.
  misc_feature (1128517)..(1128518): n is a or c or g or t.
  misc_feature (1128539)..(1128540): n is a or c or g or t.
  misc_feature (1561400)..(1561400): n is a or c or g or t.
  misc_feature (1561477)..(1561477): n is a or c or g or t.
  misc_feature (1561545)..(1561545): n is a or c or g or t.
  misc_feature (1767941)..(1767941): n is a or c or g or t.
MDIRRLVRTRDLLVLWKLKITRAASYLSIANSFMILFVFVKELYSVPWIAERFSFREFVGIAYALAIVGFIVLAQLDWHFMYKREQSYALTRNPLLPAQCFTTLYLLEKAVEEGRITEEEARRVIASLQLAGCDVRNAKIEAGPSGNGN

SEQ ID NO: 720 - protein, 616 aa, Thermococcus kodakaraensis KOD1
  misc_feature (414542)..(414542): n is a or c or g or t.
  misc_feature (786890)..(786890): n is a or c or g or t.
  misc_feature (786907)..(786907): n is a or c or g or t.
  misc_feature (786944)..(786946): n is a or c or g or t.
  misc_feature (839139)..(839139): n is a or c or g or t.
  misc_feature (1128488)..(1128488): n is a or c or g or t.
  misc_feature (1128499)..(1128499): n is a or c or g or t.
  misc_feature (1128505)..(1128506): n is a or c or g or t.
  misc_feature (1128517)..(1128518): n is a or c or g or t.
  misc_feature (1128539)..(1128540): n is a or c or g or t.
  misc_feature (1561400)..(1561400): n is a or c or g or t.
  misc_feature (1561477)..(1561477): n is a or c or g or t.
  misc_feature (1561545)..(1561545): n is a or c or g or t.
  misc_feature (1767941)..(1767941): n is a or c or g or t.
VLKMEAVKKDVIQEYAGWKSLDVLENANRYPGPTGFFAYVMEEALKESTALVPEDGRKAHFSGEVYIHKLPYSLYIPYCSGHSTSRLLKKGLRTPTITSRPARHFDTYVDHIANYLITMQHYFSGAQALSSVEWYAGPFIRKDGLSREKIRQHVQRLVYNLNYPSRVGMQTPFTNFTVTLDAPKEMLTGDMAVYDGKEVGPLGGYEREAKEFFLALVDVLREGDAKGQPFTFPIPTIMGTAKMLWDDPEVFEPVFTTAAKRGSFYWLNTNVVDPDASYSMCCRINIDKREFAFAFSASPKSAEEEAMEMLERQRFGGLWAMPDVTGSVNVTTVNLPRLALKAGDDDRFWEEYARILETVRKTTDWFRERYVKLLTNYREMYSMIHTYLEEFPSSHFNTIGILGLPEAAAVYLNEPDLWKEGSRAEWMKAAKLMKRMVEFAVEKAREWMRESGIPWNVEEVPGESAAAKLAIKDLREFPELRDYLDDPENPIYSTSIAPYYGPIELADRIRIEEEVQGSFTGGVMMHIFLGEEPDPEALAKLTKRLLRTKLVYWSYTPAVTVCNACGRSSTGLHTACPHCGSEDVEVWSRIIGYYRPLKNWNPYRKREFWSRRHYSS

SEQ ID NO: 721 - protein, 546 aa, Thermococcus kodakaraensis KOD1
  misc_feature (414542)..(414542): n is a or c or g or t.
  misc_feature (786890)..(786890): n is a or c or g or t.
  misc_feature (786907)..(786907): n is a or c or g or t.
  misc_feature (786944)..(786946): n is a or c or g or t.
  misc_feature (839139)..(839139): n is a or c or g or t.
  misc_feature (1128488)..(1128488): n is a or c or g or t.
  misc_feature (1128499)..(1128499): n is a or c or g or t.
  misc_feature (1128505)..(1128506): n is a or c or g or t.
  misc_feature (1128517)..(1128518): n is a or c or g or t.
  misc_feature (1128539)..(1128540): n is a or c or g or t.
  misc_feature (1561400)..(1561400): n is a or c or g or t.
  misc_feature (1561477)..(1561477): n is a or c or g or t.
  misc_feature (1561545)..(1561545): n is a or c or g or t.
  misc_feature (1767941)..(1767941): n is a or c or g or t.
MAQLAGQPVVILPEGTQRYVGRDAQRLNILAARIIAETVRTTLGPKGMDKMLVDSLGDIVITNDGATILDEMDIQHPAAKMMVEVAKTQDKEAGDGTTTAVVIAGELLRKAEELLDQNIHPSIIIKGYALAAEKAQEILDEIAKDVDVEDREILKKAAVTSITGKAAEEEREYLAEIAVEAVKQVAEKVGETYKVDLDNIKFEKKEGGSVKDTQLIKGVVIDKEVVHPGMPKRVEGAKIALINEALEVKETETDAEIRITSPEQLQAFLEQEEKMLREMVDKIKEVGANVVFVQKGIDDLAQHYLAKYGIMAVRRVKKSDMEKLAKATGAKIVTNVRDLTPEDLGEAELVEQRKVAGENMIFVEGCKNPKAVTILIRGGTEHVVDEVERALEDAVKVVKDIVEDGKIVAAGGAPEIELAIRLDEYAKEVGGKEQLAIEAFAEALKVIPRTLAENAGLDPIETLVKVIAAHKEKGPTIGVDVFEGEPADMLERGVIAPVRVPKQAIKSASEAAIMILRIDDVIAASKLEKDKEGGKGGSEDFGSDLD

SEQ ID NO: 722 - protein, 158 aa, Thermococcus kodakaraensis KOD1
  misc_feature (414542)..(414542): n is a or c or g or t.
  misc_feature (786890)..(786890): n is a or c or g or t.
  misc_feature (786907)..(786907): n is a or c or g or t.
  misc_feature (786944)..(786946): n is a or c or g or t.
  misc_feature (839139)..(839139): n is a or c or g or t.
  misc_feature (1128488)..(1128488): n is a or c or g or t.
  misc_feature (1128499)..(1128499): n is a or c or g or t.
  misc_feature (1128505)..(1128506): n is a or c or g or t.
  misc_feature (1128517)..(1128518): n is a or c or g or t.
  misc_feature (1128539)..(1128540): n is a or c or g or t.
  misc_feature (1561400)..(1561400): n is a or c or g or t.
  misc_feature (1561477)..(1561477): n is a or c or g or t.
  misc_feature (1561545)..(1561545): n is a or c or g or t.
  misc_feature (1767941)..(1767941): n is a or c or g or t.
VRVVFNSSPIIVLGKLGYLEKAVELFGEVFIPKAVADEINVREDEVTSLLSRLIAEGKISLETVEDTSPFEYPGLHAGEIEVIGLAKRLNAVAILDDLKARKAARLEGLRVMGTVAVLRLLKDAGFITEKNGELLRSLLDVGFRIKPGLFYKIMGDER

SEQ ID NO: 723 - DNA, 2089378 bp, Thermococcus kodakaraensis KOD1; identical to SEQ ID NO: 1
  CDS (10095)..(10379): NAD-dependent aldehyde dehydrogenases
  CDS (11406)..(11726): Glycerophosphoryl diester phosphodiesterase
  CDS (24813)..(25451): Uncharacterized ACR
  CDS (32367)..(33251): Archaeal flagellins
  CDS (33291)..(35033): Archaeal flagellins
  CDS (42696)..(44444): Uncharacterized membrane component of archaeal flagella
  CDS (46470)..(46991): Protein-L-isoaspartate carboxylmethyltransferase
  CDS (49728)..(50297): Uncharacterized ACR
  CDS (55746)..(56018): Uncharacterized ACR
  CDS (56244)..(56708): Predicted nucleic acid-binding protein
  CDS (66045)..(67382): Flagellar capping protein
  CDS (69117)..(69374): Predicted membrane protein
  CDS (69792)..(70511): Bacterial cell division membrane protein
  CDS (71679)..(72593): Isoleucyl-tRNA synthetase
  CDS (75753)..(76025): Dehydrogenases with different specificities (related to short-cha in alcohol dehydrogenases) COG1028 FabG
  CDS (79968)..(80129): Regulators of stationary/sporulation gene expression
  CDS (84264)..(84440): Molecular chaperones (contain C-terminal Zn finger domain)
  CDS (84999)..(85340): Na+-dependent transporters of the SNF family
  CDS (87663)..(88265): Na+-driven multidrug efflux pump
  CDS (88266)..(89279): DNA polymerase III alpha subunit
  CDS (89307)..(90059): Predicted hydrolases of the HAD superfamily
  CDS (90276)..(90560): Translation elongation factor EF-1beta
  CDS (93072)..(94550): Uncharacterized NAD(FAD)-dependent dehydrogenases
  CDS (97620)..(98147): Fe-S-cluster-containing hydrogenase components 2
  CDS (99648)..(100892)
  CDS (101796)..(102347): Predicted transcription factor
  CDS (102393)..(102563)
  CDS (103476)..(104318): Periplasmic serine proteases (ClpP class) COG0616 SppA
  CDS (107637)..(108455): Deacetylases
  CDS (113205)..(114563): Predicted ATPase of the AAA superfamily
  CDS (119973)..(120485): Hydrolases of the alpha/beta superfamily
  CDS (121404)..(121856): Glycine cleavage system H protein (lipoate-binding)
  CDS (122007)..(122438): Putative stress-responsive transcriptional regulator COG1983 PspC
  CDS (126306)..(128561): Methyl-accepting chemotaxis protein
  CDS (139365)..(140972): Fe-S oxidoreductases family 2
  CDS (141078)..(141311): Transcriptional regulators
  CDS (152076)..(152471): Uncharacterized ACR
  CDS (157368)..(158228): Predicted glutamine amidotransferases
  CDS (158982)..(159464): Uncharacterized ACR
  CDS (160206)..(160256)
  CDS (163362)..(164405)
  CDS (174585)..(175349): RecA-superfamily ATPases implicated in signal transduction
  CDS (177138)..(178151): Phosphoribosylaminoimidazol (AIR) synthetase
  CDS (191874)..(192509): SAM-dependent methyltransferases COG0500 SmtA
  CDS (200742)..(201098): ABC-type cobalamin/Fe3+-siderophores transport systems
  CDS (202929)..(203372): Predicted protein-tyrosine phosphatase
  CDS (206280)..(206813): Imidazoleglycerol-phosphate dehydratase
  CDS (207399)..(208100): Phosphoribosylformimino-5-aminoimidazole carboxamide ribonucleoti de (ProFAR) isomerase
  CDS (211296)..(211982): Indole-3-glycerol phosphate synthase
  CDS (214236)..(214814): Anthranilate/para-aminobenzoate synthases component II COG0512 Pa bA
  CDS (216588)..(217343): Tryptophan synthase alpha chain
  CDS (227931)..(228242): Pyrroline-5-carboxylate reductase
  CDS (238509)..(239528): Predicted ATPase of the AAA superfamily
  CDS (245052)..(245747): Uncharacterized ArCR
  CDS (251394)..(251477)
  CDS (260703)..(261923): Superfamily II DNA and RNA helicases COG0513 SrmB
  CDS (272121)..(272429): SAM-dependent methyltransferases COG0500 SmtA
  CDS (275340)..(275564): Predicted nucleic acid-binding protein
  CDS (278454)..(278981): RNA-binding proteins (RRM domain)
  CDS (280629)..(281072): Methylmalonyl-CoA mutase
  CDS (282069)..(282467): Lactoylglutathione lyase and related lyases
  CDS (294750)..(295001): Preprotein translocase subunit SecA (ATPase
  CDS (300795)..(301748): ABC-type transport system involved in multi-copper enzyme maturat ion
  CDS (307473)..(307700): Sensory transduction histidine kinases
  CDS (313344)..(314120): Maleate cis-trans isomerase
  CDS (314205)..(314447): AraC-type DNA-binding domain-containing proteins
  CDS (317124)..(318272): Uncharacterized ACR
  CDS (324261)..(326399): Ankyrin repeat proteins
  CDS (328812)..(329288): Predicted secreted acid phosphatase
  CDS (339363)..(339788): Replication factor A large subunit and related ssDNA-binding prot eins
  CDS (340641)..(340727)
  CDS (345615)..(345740)
  CDS (352419)..(352985): Predicted membrane-associated
  CDS (354174)..(355334): GTP cyclohydrolase II
  CDS (360168)..(361466): Hydroxymethylpyrimidine/phosphomethylpyrimidine kinase
  CDS (361497)..(363407): Uncharacterized ABC-type transporter
  CDS (371481)..(372920): Cysteinyl-tRNA synthetase
  CDS (374583)..(374840): Uncharacterized ACR
  CDS (398502)..(399011): Multidrug resistance efflux pump
  CDS (404484)..(405290): Predicted transcriptional regulators
  CDS (409647)..(410459): Polyketide synthase modules and related proteins
  CDS (410460)..(411080): Predicted HD superfamily hydrolase
  CDS (413415)..(413915): DNA gyrase (topoisomerase II) A subunit
  misc_feature (414542)..(414542): n is a or c or g or t.
  CDS (417291)..(417929): Cystathionine beta-lyases/cystathionine gamma-synthases
  CDS (419247)..(420563): Aspartyl/asparaginyl-tRNA synthetases
  CDS (420627)..(422132): Uncharacterized membrane protein
  CDS (426747)..(427742): Predicted methyltransferase
  CDS (437409)..(438209): Uncharacterized ACR
  CDS (444972)..(445310): Uncharacterized ACR
  CDS (451077)..(451238): Rubredoxin
  CDS (453183)..(454601): Glycine hydroxymethyltransferase
  CDS (456330)..(456662): DNA-directed RNA polymerase subunit M/Transcription elongation fa ctor TFIIS
  CDS (465336)..(466562): Uncharacterized ACR
  CDS (477738)..(478031)
  CDS (478881)..(479639): Predicted ATPases or kinases
  CDS (491922)..(493376): ABC-type iron/thiamine transport systems
  CDS (503187)..(503354): Membrane-fusion protein
  CDS (527199)..(527468): Ribosomal protein L37AE/L43A
  CDS (528984)..(529217): Multisubunit Na+/H+ antiporter
  CDS (529509)..(529739): Multisubunit Na+/H+ antiporter
  CDS (538230)..(539297): Chemotaxis response regulator CheB
  CDS (539304)..(540950): Chemotaxis protein histidine kinase and related kinases
  CDS (541671)..(542294): Chemotaxis protein CheC
  CDS (542904)..(545159): Methyl-accepting chemotaxis protein
  CDS (545706)..(546455): Uncharacterized archaeal coiled-coil domain
  CDS (546468)..(547502): Uncharacterized ACR
  CDS (547830)..(548183): Prefoldin
  CDS (550080)..(551150): Sec-independent protein secretion pathway components
  CDS (552309)..(553043): Uncharacterized ArCR (contains C-terminal EMAP domain)
  CDS (559506)..(560798): Surface lipoprotein
  CDS (560838)..(562364): ABC-type sugar (aldose) transport system
  CDS (585396)..(586382): Mn2+-dependent serine/threonine protein kinase
  CDS (593214)..(593957): Predicted hydrolases of the HAD superfamily
  CDS (595329)..(595610): Uncharacterized membrane protein
  CDS (612921)..(613868): ABC-type cobalamin/Fe3+-siderophores transport systems
  CDS (614613)..(615374): Putative homoserine kinase type II (protein kinase fold)
  CDS (616713)..(617375): Metal-dependent hydrolases of the beta-lactamase superfamily II
  CDS (620526)..(621581): ABC-type molybdate transport system
  CDS (622338)..(623402): ABC-type sulfate/molybdate transport systems
  CDS (632430)..(632630): Uncharacterized ArCR
  CDS (637143)..(637451): ABC-type amino acid transport system
  CDS (643209)..(643670): Histones H3 and H4
  CDS (651198)..(652340): ABC-type iron/thiamine transport systems
  CDS (653784)..(655079): Aspartyl/asparaginyl-tRNA synthetases
  CDS (660246)..(664418): Lhr-like helicases
  CDS (667824)..(669488): Predicted drug exporters of the RND superfamily
  CDS (669735)..(671918): Predicted drug exporters of the RND superfamily
  CDS (673707)..(673985): Uncharacterized BCR
  CDS (676425)..(677294): Predicted ATPase of the AAA superfamily
  CDS (682401)..(682496)
  CDS (689568)..(690029): Uncharacterized ArCR
  CDS (701550)..(702359): ABC-type Mn/Zn transport systems
  CDS (703152)..(703868): Ribonuclease HII
  CDS (705309)..(706460): SAM-dependent methyltransferases COG0500 SmtA
  CDS (708558)..(711569): Uncharacterized membrane protein
  CDS (713142)..(713633): Chromosome segregation ATPases
  CDS (718317)..(719339): Peptide methionine sulfoxide reductase
  CDS (722592)..(723116): Uncharacterized ACR
  CDS (728745)..(728798)
  CDS (731586)..(733985): Cation transport ATPases
  CDS (734016)..(734336): Thiol-disulfide isomerase and thioredoxins COG0526 TrxA
  CDS (735762)..(735941): Kef-type K+ transport systems
  CDS (743424)..(743609): Predicted nucleic acid-binding protein
  CDS (755496)..(756431): Ca2+/Na+ antiporter
  CDS (756477)..(756968): Diadenosine tetraphosphate (Ap4A) hydrolase and other HIT family hydrolases COG0537 Hit
  CDS (759762)..(760691): tRNA and rRNA cytosine-C5-methylases
  CDS (762327)..(763418): Saccharopine dehydrogenase and related proteins
  CDS (767976)..(768434): Universal stress protein UspA and related nucleotide-binding prot eins
  CDS (768477)..(769343): Arginase/agmatinase/formimionoglutamate hydrolase
  CDS (769950)..(771269): Kef-type K+ transport systems
  CDS (778176)..(778346): Predicted xylanase/chitin deacetylase
  CDS (778362)..(779411): Pyruvate-formate lyase-activating enzyme
  CDS (780438)..(782276): Archaea-specific RecJ-like exonuclease
  misc_feature (786890)..(786890): n is a or c or g or t.
  misc_feature (786907)..(786907): n is a or c or g or t.
  misc_feature (786944)..(786946): n is a or c or g or t.
  CDS (799848)..(800327): Predicted nucleic acid-binding protein
  CDS (800919)..(802424): Phenylalanyl-tRNA synthetase alpha subunit
  CDS (802887)..(803297): Predicted nucleic acid-binding protein
  CDS (807366)..(808745): 3-polyprenyl-4-hydroxybenzoate decarboxylase and related decarbox ylases
  CDS (811608)..(812351): Molybdopterin-guanine dinucleotide biosynthesis protein
  CDS (814077)..(816419): Integral membrane protein
  CDS (816501)..(816650)
  CDS (817725)..(818519): Dehydrogenases with different specificities (related to short-cha in alcohol dehydrogenases) COG1028 FabG
  CDS (823599)..(824021): Aldo/keto reductases
  misc_feature (839139)..(839139): n is a or c or g or t.
  CDS (841293)..(842288): Hydrogenase maturation factor
  CDS (847896)..(848990): Uncharacterized membrane proteins
  CDS (855888)..(856652): Predicted permeases
  CDS (857151)..(858227): Predicted DNA modification methylase
  CDS (865002)..(865454): Uncharacterized FAD-dependent dehydrogenases
  CDS (866496)..(868313): Pyruvate carboxylase
  CDS (871836)..(872120): Putative aromatic ring hydroxylating enzyme
  CDS (874707)..(874940): Intracellular septation protein A
  CDS (875022)..(875840): Valyl-tRNA synthetase
  CDS (877020)..(877235): Flavodoxin reductases (ferredoxin-NADPH reductases) family 1
  CDS (878718)..(878765)
  CDS (878886)..(879182)
  CDS (880506)..(881387): Alcohol dehydrogenase IV
  CDS (881550)..(881654): Alcohol dehydrogenase IV
  CDS (891114)..(891398): Endonuclease IV
  CDS (919305)..(923264): Micrococcal nuclease (thermonuclease) homologs
  CDS (932526)..(933086): Uncharacterized ACR
  CDS (940239)..(940469)
  CDS (940803)..(940937)
  CDS (942591)..(942917): Predicted nucleotidyltransferases
  CDS (957270)..(957638): Predicted integral membrane protein
  CDS (961407)..(962324): ABC-type cobalamin/Fe3+-siderophores transport systems
  CDS (965901)..(966098): Ribosomal protein S27E
  CDS (967002)..(967181): Predicted Zn-ribbon RNA-binding protein
  CDS (968754)..(969002): Cobalamin biosynthesis protein CbiM
  CDS (969660)..(970463): ABC-type cobalt transport system
  CDS (983025)..(983486): Predicted prefoldin
  CDS (990762)..(991511): ABC-type multidrug transport system
  CDS (991803)..(991991)
  CDS (999750)..(1000229): Predicted transcriptional regulators
  CDS (1001217)..(1001987): ABC-type multidrug transport system
  CDS (1036098)..(1036649): Adenylate cyclase
  CDS (1041012)..(1041071)
  CDS (1041624)..(1041935): Parvulin-like peptidyl-prolyl isomerase
  CDS (1055358)..(1055663): Na+/alanine symporter
  CDS (1056285)..(1056395)
  CDS (1059921)..(1060517): Glutaredoxin and related proteins
  CDS (1076013)..(1077278): Predicted Fe-S oxidoreductase
  CDS (1077432)..(1077986): FAD synthase
  CDS (1080723)..(1081862): Uncharacterized ArCR
  CDS (1085820)..(1086698): Dihydrodipicolinate synthase/N-acetylneuraminate lyase COG0329 Da pA
  CDS (1086762)..(1086986): Deoxyribodipyrimidine photolyase
  CDS (1091646)..(1092197): Uncharacterized ACR
  CDS (1104585)..(1106492): Predicted ATP-dependent protease
  CDS (1113459)..(1114217): SAM-dependent methyltransferases COG0500 SmtA
  CDS (1114407)..(1117082): Valyl-tRNA synthetase
  CDS (1119840)..(1120178): DNA-binding protein
  misc_feature (1128488)..(1128488): n is a or c or g or t.
  misc_feature (1128499)..(1128499): n is a or c or g or t.
  misc_feature (1128505)..(1128506): n is a or c or g or t.
  misc_feature (1128517)..(1128518): n is a or c or g or t.
  misc_feature (1128539)..(1128540): n is a or c or g or t.
  CDS (1155108)..(1155464): Na+/H+ antiporter
  CDS (1163703)..(1164656): Membrane protease subunits
  CDS (1164663)..(1165082): Membrane protein implicated in regulation of membrane protease ac tivity COG1585 -
  CDS (1165959)..(1166231): Ribosomal protein L31E
  CDS (1166259)..(1166948): Eukaryotic translation initiation factor 6 (EIF6)
  CDS (1173687)..(1174022): Signal recognition particle 19 kDa protein
  CDS (1195773)..(1195841)
  CDS (1200465)..(1200542)
  CDS (1207362)..(1207793): Pyruvate:ferredoxin oxidoreductase and related 2-oxoacid:ferredox in oxidoreductases
  CDS (1210890)..(1211111): Chromosome segregation ATPases
  CDS (1211850)..(1212755): ABC-type Fe3+-siderophores transport systems
  CDS (1219074)..(1219190)
  CDS (1225113)..(1225991): Hydrolases of the alpha/beta superfamily
  CDS (1226169)..(1226861): Predicted deacetylase
  CDS (1240125)..(1240214)
  CDS (1248621)..(1249226): Uncharacterized ACR
  CDS (1257402)..(1258961): Na+-dependent transporters of the SNF family
  CDS (1259124)..(1259858): Uncharacterized BCR
  CDS (1262388)..(1262651)
  CDS (1262709)..(1264661): Predicted RNA-binding protein homologous to eukaryotic snRNP
  CDS (1265145)..(1265591): Restriction enzymes type I helicase subunits and related helicase s
  CDS (1266750)..(1267955): Predicted alternative tryptophan synthase beta-subunit (paralog o f TrpB)
  CDS (1280661)..(1281740): Xaa-Pro aminopeptidase
  CDS (1295748)..(1297115): Predicted ATPase of the AAA superfamily
  CDS (1298625)..(1298846): Panthothenate synthetase
  CDS (1309950)..(1311020): Uncharacterized archaeal coiled-coil domain
  CDS (1317762)..(1318001): Transcriptional regulators
  CDS (1321326)..(1322096): Diadenosine tetraphosphatase and related serine/threonine protein phosphatases
  CDS (1356606)..(1357514): Aspartyl/asparaginyl-tRNA synthetases
  CDS (1361181)..(1362461): Glycosyltransferases
  CDS (1368582)..(1369193): Integral membrane proteins of the MarC family
  CDS (1369248)..(1370567): Histidyl-tRNA synthetase
  CDS (1379649)..(1380014): Delta-aminolevulinic acid dehydratase
  CDS (1390656)..(1391165): Protein involved in ribosomal biogenesis
  CDS (1391397)..(1391669): Zn-dependent hydrolases
  CDS (1393980)..(1394540): ABC-type multidrug transport system
  CDS (1396965)..(1397522): Predicted transcriptional regulators
  CDS (1399173)..(1400693): Preprotein translocase subunit SecD
  CDS (1404957)..(1406060): Archaeal/vacuolar-type H+-ATPase subunit C
  CDS (1408254)..(1409654): Archaeal/vacuolar-type H+-ATPase subunit B
  CDS (1411938)..(1413167): Predicted metal-dependent hydrolases related to alanyl-tRNA synth etase HxxxH domain
  CDS (1424787)..(1428260): Predicted ATPase involved in replication control
  CDS (1428306)..(1428734): Translation initiation factor eIF-2
  CDS (1430421)..(1430807): Na+-transporting methylmalonyl-CoA/oxaloacetate decarboxylase
  CDS (1442268)..(1442525)
  CDS (1448733)..(1449227): Uncharacterized protein
  CDS (1469265)..(1470533): Subtilisin-like serine proteases
  CDS (1477107)..(1477574): Transcriptional regulator
  CDS (1490211)..(1490753): Putative aromatic ring hydroxylating enzyme
  CDS (1500975)..(1501334): Predicted nucleotidyltransferases
  CDS (1501752)..(1502747): Nucleoside-diphosphate-sugar pyrophosphorylases involved in lipop olysaccharide biosynthesis/translation initiation factor eIF2B su bunits COG1208 GCD1
  CDS (1507680)..(1508369): 4-diphosphocytidyl-2-methyl-D-erithritol synthase
  CDS (1521735)..(1522592): Restriction enzymes type I helicase subunits and related helicase s
  CDS (1530894)..(1536164): Ribonucleotide reductase alpha subunit
  CDS (1540326)..(1541702): tRNA nucleotidyltransferase (CCA-adding enzyme)
  CDS (1544970)..(1545347): Uncharacterized BCR
  CDS (1551384)..(1551506)
  misc_feature (1561400)..(1561400): n is a or c or g or t.
  misc_feature (1561477)..(1561477): n is a or c or g or t.
  misc_feature (1561545)..(1561545): n is a or c or g or t.
  CDS (1562832)..(1564286): Beta-glucosidase/6-phospho-beta-glucosidase/beta- galactosidase
  CDS (1565943)..(1569653): Chitinase
  CDS (1573710)..(1575680): Glycosidases
  CDS (1575753)..(1577099): Maltose-binding periplasmic proteins/domains
  CDS (1582707)..(1583825): ABC-type sugar/spermidine/putrescine/iron/thiamine transport syst ems
  CDS (1586361)..(1588547): Uncharacterized membrane protein
  CDS (1592769)..(1593515): SAM-dependent methyltransferases COG0500 SmtA
  CDS (1598676)..(1599902): Eukaryotic-type DNA primase
  CDS (1601220)..(1601777): Permeases of the drug/metabolite transporter (DMT) superfamily CO G0697 RhaT
  CDS (1615653)..(1616882): Dihydroorotase
  CDS (1617558)..(1618517): Predicted Fe-S oxidoreductases
  CDS (1618578)..(1619276): ABC-type dipeptide/oligopeptide/nickel transport systems
  CDS (1622922)..(1624112): Kef-type K+ transport systems
  CDS (1625628)..(1625717): Growth inhibitor
  CDS (1629435)..(1630595): Predicted membrane-associated Zn-dependent proteases 1
  CDS (1630596)..(1631720): Predicted ATPase of the PP-loop superfamily implicated in cell cy cle control
  CDS (1631799)..(1633073): Uncharacterized ATPases of the AAA superfamily
  CDS (1643712)..(1644038): Arginyl-tRNA synthetase
  CDS (1644711)..(1645832): Dehydrogenases (flavoproteins)
  CDS (1645842)..(1646195): Anaerobic dehydrogenases
  CDS (1646550)..(1647749): Sugar-binding periplasmic proteins/domains
  CDS (1659540)..(1660034): Uncharacterized ArCR
  CDS (1660137)..(1660616): FKBP-type peptidyl-prolyl cis-trans isomerases 2
  CDS (1668573)..(1668914): Predicted transposase
  CDS (1681383)..(1681730): Phosphate uptake regulator
  CDS (1681740)..(1682333): Phosphate uptake regulator
  CDS (1687089)..(1687931): Permeases of the drug/metabolite transporter (DMT) superfamily CO G0697 RhaT
  CDS (1689399)..(1690175): Metal-dependent hydrolases of the beta-lactamase superfamily I
  CDS (1694157)..(1695629): Glycosidases
  CDS (1699092)..(1699178)
  CDS (1706139)..(1706984): Archaeal enzymes of ATP-grasp superfamily
  CDS (1712778)..(1714040): Cdc6-related protein
  CDS (1722894)..(1723436): Predicted nuclease of the RecB family
  CDS (1725222)..(1725860): Uncharacterized ACR
  CDS (1727964)..(1729022): Glycosyltransferases involved in cell wall biogenesis
  CDS (1729029)..(1729787): RecA-superfamily ATPases implicated in signal transduction
  CDS (1735212)..(1735793): ABC-type phosphate transport system
  CDS (1740792)..(1741826): Diphthamide synthase subunit DPH2
  CDS (1741926)..(1743704): Putative archaeal flagellar protein D/E
  CDS (1746894)..(1747268): Superfamily I DNA and RNA helicases and helicase subunits
  CDS (1747308)..(1748660): tRNA and rRNA cytosine-C5-methylases
  CDS (1749900)..(1749992)
  CDS (1760394)..(1760735): Adenine-specific DNA methylase
  CDS (1766679)..(1767068): Ankyrin repeat proteins
  misc_feature (1767941)..(1767941): n is a or c or g or t.
  CDS (1777281)..(1777811): Methylated DNA-protein cysteine methyltransferase
  CDS (1779069)..(1779554): Transcription factor homologous to NACalpha-BTF3
  CDS (1784010)..(1784594): Pyruvate:ferredoxin oxidoreductase and related 2-oxoacid:ferredox in oxidoreductases
  CDS (1784955)..(1786151): Pyruvate:ferredoxin oxidoreductase and related 2-oxoacid:ferredox in oxidoreductases
  CDS (1791624)..(1791959): Predicted glycosyltransferases
  CDS (1791963)..(1792769): Molybdopterin converting factor
  CDS (1803666)..(1804280): Molybdopterin-guanine dinucleotide biosynthesis protein A
  CDS (1807161)..(1808084): Co/Zn/Cd efflux system component
  CDS (1808985)..(1811618): ABC-type amino acid transport system
  CDS (1813353)..(1813550): Cation transport ATPases
  CDS (1814559)..(1814648)
  CDS (1814829)..(1815962): ABC-type Fe3+-siderophores transport systems
  CDS (1826859)..(1827470): Uncharacterized ACR
  CDS (1834992)..(1835603): Non-ribosomal peptide synthetase modules and related proteins
  CDS (1853826)..(1853894)
  CDS (1866693)..(1867223): Fe-S-cluster-containing hydrogenase components 1
  CDS (1867473)..(1868666): Anaerobic dehydrogenases
  CDS (1870833)..(1871861): Formate/nitrite family of transporters
  CDS (1872015)..(1872557): Multisubunit Na+/H+ antiporter
  CDS (1873176)..(1873442): Predicted subunit of the Multisubunit Na+/H+ antiporter
  CDS (1874169)..(1874537): Multisubunit Na+/H+ antiporter
  CDS (1876071)..(1876427): Sugar transferases involved in lipopolysaccharide synthesis
  CDS (1876992)..(1877561): Ni
  CDS (1878843)..(1879835): Formate hydrogenlyase subunit 4
  CDS (1885281)..(1886627): PLP-dependent aminotransferases
  CDS (1899309)..(1900178): Acyl-coenzyme A synthetases/AMP-(fatty) acid ligases
  CDS (1905501)..(1906337): Predicted kinase
  CDS (1918215)..(1918709): Predicted metal-dependent membrane protease
  CDS (1926252)..(1926566): Transcriptional regulator
  CDS (1930917)..(1931588): Putative effector of murein hydrolase
  CDS (1933671)..(1934051): Predicted nucleic acid-binding protein
  CDS (1941378)..(1941863): ABC-type multidrug transport system
  CDS (1948368)..(1949834): 3'-phosphoadenosine 5'-phosphosulfate sulfotransferase (PAPS redu ctase)/FAD synthetase and related enzymes COG0175 CysH
  CDS (1953189)..(1954478): Predicted Zn-dependent proteases and their inactivated homologs
  CDS (1955253)..(1957394): Glycosidases
  CDS (1965873)..(1966658): Predicted TIM-barrel enzyme
  CDS (1966899)..(1969403): ATP-dependent exoDNAse (exonuclease V) beta subunit (contains hel icase and exonuclease domains)
  CDS (1975695)..(1977017): Uncharacterized ACR
  CDS (1981986)..(1982897): Uncharacterized ACR
  CDS (2003136)..(2003711): Acetyltransferases
  CDS (2009133)..(2010641): ATPase involved in DNA replication
  CDS (2016684)..(2017421): Chromosome segregation ATPases
  CDS (2021157)..(2021522): Predicted GTPases
  CDS (2031138)..(2032727): Lysyl-tRNA synthetase class I
  CDS (2034330)..(2035610): Predicted butyrate kinase
  CDS (2036331)..(2036594): Phosphate uptake regulator
  CDS (2039994)..(2040326): Biotin synthase-related enzyme
  CDS (2051664)..(2051900): Regulators of stationary/sporulation gene expression
  CDS (2053125)..(2053190)
  CDS (2059560)..(2060801): Cell division GTPase
  CDS (2061501)..(2061911): WD40 repeat protein
  CDS (2071722)..(2072069): RNA-binding protein involved in rRNA processing
  CDS (2076528)..(2076959): Uncharacterized ArCR

SEQ ID NO: 724 - protein, 94 aa, Thermococcus kodakaraensis KOD1
  misc_feature (414542)..(414542): n is a or c or g or t.
  misc_feature (786890)..(786890): n is a or c or g or t.
  misc_feature (786907)..(786907): n is a or c or g or t.
  misc_feature (786944)..(786946): n is a or c or g or t.
  misc_feature (839139)..(839139): n is a or c or g or t.
  misc_feature (1128488)..(1128488): n is a or c or g or t.
  misc_feature (1128499)..(1128499): n is a or c or g or t.
  misc_feature (1128505)..(1128506): n is a or c or g or t.
  misc_feature (1128517)..(1128518): n is a or c or g or t.
  misc_feature (1128539)..(1128540): n is a or c or g or t.
  misc_feature (1561400)..(1561400): n is a or c or g or t.
  misc_feature (1561477)..(1561477): n is a or c or g or t.
  misc_feature (1561545)..(1561545): n is a or c or g or t.
  misc_feature (1767941)..(1767941): n is a or c or g or t.
MEVIRLLKRKSQDKVEFVRDLVVFMASPDVDFSNEVLFKDAVDEIYSILREEVIENGNKELASAYEKAVLLRAAVFGEEMDPKKLLKGILEELR

SEQ ID NO: 725 - protein, 106 aa, Thermococcus kodakaraensis KOD1
  misc_feature (414542)..(414542): n is a or c or g or t.
  misc_feature (786890)..(786890): n is a or c or g or t.
  misc_feature (786907)..(786907): n is a or c or g or t.
  misc_feature (786944)..(786946): n is a or c or g or t.
  misc_feature (839139)..(839139): n is a or c or g or t.
  misc_feature (1128488)..(1128488): n is a or c or g or t.
  misc_feature (1128499)..(1128499): n is a or c or g or t.
  misc_feature (1128505)..(1128506): n is a or c or g or t.
  misc_feature (1128517)..(1128518): n is a or c or g or t.
  misc_feature (1128539)..(1128540): n is a or c or g or t.
  misc_feature (1561400)..(1561400): n is a or c or g or t.
  misc_feature (1561477)..(1561477): n is a or c or g or t.
  misc_feature (1561545)..(1561545): n is a or c or g or t.
  misc_feature (1767941)..(1767941): n is a or c or g or t.
VMSMKRIKLGHHYYYVVTPDDLSTRKFRGKNIVLEGVVEDKPLVEFLPMELPSWRTTFKIHGFSVEFAGSPCVGKGDTVKVYGRFVGDGIIATAIETERAIFTTEE

SEQ ID NO: 726 - protein, 212 aa, Thermococcus kodakaraensis KOD1
  misc_feature (414542)..(414542): n is a or c or g or t.
  misc_feature (786890)..(786890): n is a or c or g or t.
  misc_feature (786907)..(786907): n is a or c or g or t.
  misc_feature (786944)..(786946): n is a or c or g or t.
  misc_feature (839139)..(839139): n is a or c or g or t.
  misc_feature (1128488)..(1128488): n is a or c or g or t.
  misc_feature (1128499)..(1128499): n is a or c or g or t.
  misc_feature (1128505)..(1128506): n is a or c or g or t.
  misc_feature (1128517)..(1128518): n is a or c or g or t.
  misc_feature (1128539)..(1128540): n is a or c or g or t.
  misc_feature (1561400)..(1561400): n is a or c or g or t.
  misc_feature (1561477)..(1561477): n is a or c or g or t.
  misc_feature (1561545)..(1561545): n is a or c or g or t.
  misc_feature (1767941)..(1767941): n is a or c or g or t.
MGSAEGIVRKGLYGLAQNFSGGSMIVDLSLSLNEETPVYPGDPEIKVRPWAFIDTDGYYMNVIKMGEHSGTHVDAPAHFVPGGKTVDELPLDKFIGKAFVIDVRGGEGPVRLEEIPDSGYYGKIVLFLTGGRELSPEVALFLVAEGVKAVGTDHMTIGDETTHTIFLSEEIPIFENLANLEEVLGREFTFIAFPLKIEGGSGSPVRAVAILG

SEQ ID NO: 727 - protein, 294 aa, Thermococcus kodakaraensis KOD1
  misc_feature (414542)..(414542): n is a or c or g or t.
  misc_feature (786890)..(786890): n is a or c or g or t.
  misc_feature (786907)..(786907): n is a or c or g or t.
  misc_feature (786944)..(786946): n is a or c or g or t.
  misc_feature (839139)..(839139): n is a or c or g or t.
  misc_feature (1128488)..(1128488): n is a or c or g or t.
  misc_feature (1128499)..(1128499): n is a or c or g or t.
  misc_feature (1128505)..(1128506): n is a or c or g or t.
  misc_feature (1128517)..(1128518): n is a or c or g or t.
  misc_feature (1128539)..(1128540): n is a or c or g or t.
  misc_feature (1561400)..(1561400): n is a or c or g or t.
  misc_feature (1561477)..(1561477): n is a or c or g or t.
  misc_feature (1561545)..(1561545): n is a or c or g or t.
  misc_feature (1767941)..(1767941): n is a or c or g or t.
MKTRTRKGAVGIGTLIVFIAMVLVAAVAAAVLINTSGYLQQKSQATGRETTQEVASGIKVERVVGKTDLPYTNIGSDSTELDYIRQLAIYVSPNAGSSGIDLSNTKVILSNGEKEAVLKYAGGPDDDYDAFTKGVQNDIFDLYFKYSSDGTNWNNEHSGLAAWKNLYYTGTNHDPAKNFGIIVIQDADNSLTEDYPTLNKGDLVVLTVLVGSLEEYTGNPSNDDNAVYETGGAKYDYIDVNGNSDTTDTIQGVFGEGIPAGTKITGEVVPEFGAPGVIEFTTPSTYTEAVMELQ

SEQ ID NO: 728 - protein, 580 aa, Thermococcus kodakaraensis KOD1 [sequence omitted]

SEQ ID NO: 729 - protein, 582 aa, Thermococcus kodakaraensis KOD1
  misc_feature (414542)..(414542): n is a or c or g or t.
  misc_feature (786890)..(786890): n is a or c or g or t.
  misc_feature (786907)..(786907): n is a or c or g or t.
  misc_feature (786944)..(786946): n is a or c or g or t.
  misc_feature (839139)..(839139): n is a or c or g or t.
  misc_feature (1128488)..(1128488): n is a or c or g or t.
  misc_feature (1128499)..(1128499): n is a or c or g or t.
  misc_feature (1128505)..(1128506): n is a or c or g or t.
  misc_feature (1128517)..(1128518): n is a or c or g or t.
  misc_feature (1128539)..(1128540): n is a or c or g or t.
  misc_feature (1561400)..(1561400): n is a or c or g or t.
  misc_feature (1561477)..(1561477): n is a or c or g or t.
  misc_feature (1561545)..(1561545): n is a or c or g or t.
  misc_feature (1767941)..(1767941): n is a or c or g or t.
VMQMPEEKASVFTKADLSMEAYLKGILLPYLGISAVLFIVIGFITRILPVARSLQVLMFLIPIVLIIYAAAYPYVVADSKKISINSKMPYFITYFAVLSTSEMGRSDLVAVLAKDPKLGAIASELKKVHTIVNKLHLSMPEAFRFLARRTPSKMFADFLDRLAYSLDSGVDLKEYLFQEQKTVMDDYETFYEGALYDLDVFKEIYESIIISVVFIASFIIIGPIITGMDIGRMGLYALLMIIAAEVGVLLVVKFRMPEDPIWADSRGIRDPKRERIKMAAIYSSIGTVILTLVYLLFIRQRFSIPEPFVVAMVLTPFYYLGMVVDREEKRIFRKDENFPAFIRSLSSSLAASGASLVLVLKYLSAHDFGSLTDDIKALYRRLAIRVDRDRAWDFFIAGTGSWLIGIFSEIFRESLHMGAEPDYVGLVISRNFERIVRLRRKRQQSIASFIGIIYGLTGAFAFALAASFQVAVSINDLFSKMDLGAAANYIGDIIHVIPPTGMTFLMYIMLTMMVLHSLLSALVIKLADGGHILGSAKYFVILAWIFAVGMYLGQTLMARMMGTSSGGTEVAQLVGYLLGVMP

SEQ ID NO: 730 - protein, 173 aa, Thermococcus kodakaraensis KOD1
  misc_feature (414542)..(414542): n is a or c or g or t.
  misc_feature (786890)..(786890): n is a or c or g or t.
  misc_feature (786907)..(786907): n is a or c or g or t.
  misc_feature (786944)..(786946): n is a or c or g or t.
  misc_feature (839139)..(839139): n is a or c or g or t.
  misc_feature (1128488)..(1128488): n is a or c or g or t.
  misc_feature (1128499)..(1128499): n is a or c or g or t.
  misc_feature (1128505)..(1128506): n is a or c or g or t.
  misc_feature (1128517)..(1128518): n is a or c or g or t.
  misc_feature (1128539)..(1128540): n is a or c or g or t.
  misc_feature (1561400)..(1561400): n is a or c or g or t.
  misc_feature (1561477)..(1561477): n is a or c or g or t.
  misc_feature (1561545)..(1561545): n is a or c or g or t.
  misc_feature (1767941)..(1767941): n is a or c or g or t.
VIIVDLDALWKRTVENLVREGIIKSEAVRRAFLKYPRYLFVEDRYKKYAHVDEPLPIPSGQTISAPHMVAIMLELADLKPGMNVLEIGTGSGWNAALISELVKTDVYTIERIPELVEFARRNLERAGVKNVHVILGDGTKGFPPKAPYDRIIVTAGAPDIPRPLVEQLKQGGS

SEQ ID NO: 731 - protein, 189 aa, Thermococcus kodakaraensis KOD1
  misc_feature (414542)..(414542): n is a or c or g or t.
  misc_feature (786890)..(786890): n is a or c or g or t.
  misc_feature (786907)..(786907): n is a or c or g or t.
  misc_feature (786944)..(786946): n is a or c or g or t.
  misc_feature (839139)..(839139): n is a or c or g or t.
  misc_feature (1128488)..(1128488): n is a or c or g or t.
  misc_feature (1128499)..(1128499): n is a or c or g or t.
  misc_feature (1128505)..(1128506): n is a or c or g or t.
  misc_feature (1128517)..(1128518): n is a or c or g or t.
  misc_feature (1128539)..(1128540): n is a or c or g or t.
  misc_feature (1561400)..(1561400): n is a or c or g or t.
  misc_feature (1561477)..(1561477): n is a or c or g or t.
  misc_feature (1561545)..(1561545): n is a or c or g or t.
  misc_feature (1767941)..(1767941): n is a or c or g or t.
MRHLEFDGRYAEDILRGKKRATVRLGRKPNLKEGDTVLIHAGGYALGKAVIERVESKTVGELTDEDAFLDGFSSREELIRALKEHYKYVNDNSPAHVIVFRLIEKFDRPVMSSDYAYEGNLPVEIAEKALKYLDLPEEDRKLIELFLRTGSLRKAAYRLGGLNKRYLIREALRRAYEELKKKGIMGPKL

SEQ ID NO: 732 - protein, 90 aa, Thermococcus kodakaraensis KOD1
  misc_feature (414542)..(414542): n is a or c or g or t.
  misc_feature (786890)..(786890): n is a or c or g or t.
  misc_feature (786907)..(786907): n is a or c or g or t.
  misc_feature (786944)..(786946): n is a or c or g or t.
  misc_feature (839139)..(839139): n is a or c or g or t.
  misc_feature (1128488)..(1128488): n is a or c or g or t.
  misc_feature (1128499)..(1128499): n is a or c or g or t.
  misc_feature (1128505)..(1128506): n is a or c or g or t.
  misc_feature (1128517)..(1128518): n is a or c or g or t.
  misc_feature (1128539)..(1128540): n is a or c or g or t.
  misc_feature (1561400)..(1561400): n is a or c or g or t.
  misc_feature (1561477)..(1561477): n is a or c or g or t.
  misc_feature (1561545)..(1561545): n is a or c or g or t.
  misc_feature (1767941)..(1767941): n is a or c or g or t.
MAYLAMFHAARALLFKDGWREKSHACISAYLREFYVKPGLLDVKWVRYLDYVRNLRHQTQYDVGFSPDPEEITDILPKIEEFIGVVEKLV

SEQ ID NO: 733 - protein, 154 aa, Thermococcus kodakaraensis KOD1
  misc_feature (414542)..(414542): n is a or c or g or t.
  misc_feature (786890)..(786890): n is a or c or g or t.
  misc_feature (786907)..(786907): n is a or c or g or t.
  misc_feature (786944)..(786946): n is a or c or g or t.
  misc_feature (839139)..(839139): n is a or c or g or t.
  misc_feature (1128488)..(1128488): n is a or c or g or t.
  misc_feature (1128499)..(1128499): n is a or c or g or t.
  misc_feature (1128505)..(1128506): n is a or c or g or t.
  misc_feature (1128517)..(1128518): n is a or c or g or t.
  misc_feature (1128539)..(1128540): n is a or c or g or t.
  misc_feature (1561400)..(1561400): n is a or c or g or t.
  misc_feature (1561477)..(1561477): n is a or c or g or t.
  misc_feature (1561545)..(1561545): n is a or c or g or t.
  misc_feature (1767941)..(1767941): n is a or c or g or t.
MKRYLVDSSVILEALRGNPQAKELLESLEDNPKFINPIIFSEVLFVFIKQVTGKSYLTLRNSVREINAYGDKIEKLYLFLRDNFVELPITEEISDMAFGFLKKYGLLPNDAIILATAKFYELSLVTMDSDFKKASTEEGVECVCGLGNGGDSNG

SEQ ID NO: 734 - protein, 445 aa, Thermococcus kodakaraensis KOD1
  misc_feature (414542)..(414542): n is a or c or g or t.
  misc_feature (786890)..(786890): n is a or c or g or t.
  misc_feature (786907)..(786907): n is a or c or g or t.
  misc_feature (786944)..(786946): n is a or c or g or t.
  misc_feature (839139)..(839139): n is a or c or g or t.
  misc_feature (1128488)..(1128488): n is a or c or g or t.
  misc_feature (1128499)..(1128499): n is a or c or g or t.
  misc_feature (1128505)..(1128506): n is a or c or g or t.
  misc_feature (1128517)..(1128518): n is a or c or g or t.
  misc_feature (1128539)..(1128540): n is a or c or g or t.
  misc_feature (1561400)..(1561400): n is a or c or g or t.
  misc_feature (1561477)..(1561477): n is a or c or g or t.
  misc_feature (1561545)..(1561545): n is a or c or g or t.
  misc_feature (1767941)..(1767941): n is a or c or g or t.
MVGWKKPLGLFVALVVVFSVFAVVRAATITETEWGNAITDPGIELIPGYPATMNVTILTSSGEPFALSSYTNADTLEVTAKFVDEYGNALDMNGDSVADVYTFTNTSTPGLWTATINVSNVTPGAYTLKIEALAKNSTSGEIVDNATLELSVWIAGGPYWVAVADIKDGDTVEIGSLEFTIRGLSDLGAILDLGNLSTTTITDDDRDGIFTWKNDVTSDGVDDWIVFAKSDDDSDRYVMMVYSSDANLLDDFNLEDKFEVRSDDGRVKFTNKVFKEYNNYKAYVVWDESLLAKLGIKAVDYYIIPLKGREHWKEGFGNVDRTDVKVIKRTTYLWGLFGNEEEVYSGNIFNKNVNIDDIITVFGKWVGNWARFAWGQWEITKGLGDITIPNSYSLRERSLNELSVSSEDFRGFNPILQPSGRGLFKPSLDWKSILGLDEDEDSTSS

SEQ ID NO: 735 - protein, 85 aa, Thermococcus kodakaraensis KOD1
  misc_feature (414542)..(414542): n is a or c or g or t.
  misc_feature (786890)..(786890): n is a or c or g or t.
  misc_feature (786907)..(786907): n is a or c or g or t.
  misc_feature (786944)..(786946): n is a or c or g or t.
  misc_feature (839139)..(839139): n is a or c or g or t.
  misc_feature (1128488)..(1128488): n is a or c or g or t.
  misc_feature (1128499)..(1128499): n is a or c or g or t.
  misc_feature (1128505)..(1128506): n is a or c or g or t.
  misc_feature (1128517)..(1128518): n is a or c or g or t.
  misc_feature (1128539)..(1128540): n is a or c or g or t.
  misc_feature (1561400)..(1561400): n is a or c or g or t.
  misc_feature (1561477)..(1561477): n is a or c or g or t.
  misc_feature (1561545)..(1561545): n is a or c or g or t.
  misc_feature (1767941)..(1767941): n is a or c or g or t.
MWGLEDKPLPIRLGIAIIADVIDALNIIPGVGDLIETPFNAFIAYALTDNPKAAVVGGVDGILPAPIDWFPSATVMVIADELGWI

SEQ ID NO: 736 - protein, 239 aa, Thermococcus kodakaraensis KOD1
  misc_feature (414542)..(414542): n is a or c or g or t.
  misc_feature (786890)..(786890): n is a or c or g or t.
  misc_feature (786907)..(786907): n is a or c or g or t.
  misc_feature (786944)..(786946): n is a or c or g or t.
  misc_feature (839139)..(839139): n is a or c or g or t.
  misc_feature (1128488)..(1128488): n is a or c or g or t.
  misc_feature (1128499)..(1128499): n is a or c or g or t.
  misc_feature (1128505)..(1128506): n is a or c or g or t.
  misc_feature (1128517)..(1128518): n is a or c or g or t.
  misc_feature (1128539)..(1128540): n is a or c or g or t.
  misc_feature (1561400)..(1561400): n is a or c or g or t.
  misc_feature (1561477)..(1561477): n is a or c or g or t.
  misc_feature (1561545)..(1561545): n is a or c or g or t.
  misc_feature (1767941)..(1767941): n is a or c or g or t.
VMYNPSLAAATSQAVMLSVFVVVAAFFAYFIASRRADIFGAILLMLLSIFLAKNYYYLVYAAGAMLVLATVAYITSYDEGTVSGALFWAGIGLFTSLMIFYVMPETIKMGQDQAFVYIVLIPSFLIVLISDWKGKFNFEWENALAILIPVAFALAFVSMVGVSHIIWGAAIMLFGVILEYLNAGFASTVAFVSGFIIWLDDVIGYSLYPNYGNTAALHLLGPVGASLVLIYIYLLVWGD

SEQ ID NO: 737 - protein, 304 aa, Thermococcus kodakaraensis KOD1
  misc_feature (414542)..(414542): n is a or c or g or t.
  misc_feature (786890)..(786890): n is a or c or g or t.
  misc_feature (786907)..(786907): n is a or c or g or t.
  misc_feature (786944)..(786946): n is a or c or g or t.
  misc_feature (839139)..(839139): n is a or c or g or t.
  misc_feature (1128488)..(1128488): n is a or c or g or t.
  misc_feature (1128499)..(1128499): n is a or c or g or t.
  misc_feature (1128505)..(1128506): n is a or c or g or t.
  misc_feature (1128517)..(1128518): n is a or c or g or t.
  misc_feature (1128539)..(1128540): n is a or c or g or t.
  misc_feature (1561400)..(1561400): n is a or c or g or t.
  misc_feature (1561477)..(1561477): n is a or c or g or t.
  misc_feature (1561545)..(1561545): n is a or c or g or t.
  misc_feature (1767941)..(1767941): n is a or c or g or t.
VIVMEAAPEVREDIRAELAAKVEGKDSQKSRILKFTLLGIGAGIAVGLIMLAFPGFYDTLVKIHQALAKPRYSFYVLIGSILFVEFMRATWVESAKARSKRLIPLTSPETEIWVKEKPLLGIKLPFTSKEVKSRRIKPHIVETELGWRVYPNKSLLSQQWDGTVHFIPGDAIFGYGNTRIIAAKKPSRPTYYEVDKTTGEQIPVYVWEPVNIGDELYLRALKEIEYLKAENTALRAYAEKGYELARTIAALPREFFDSLREKGYEDALRIMKEVLGKGFFAEMGKMRKEELTAIIDALKKEGEL

SEQ ID NO: 738 - protein, 90 aa, Thermococcus kodakaraensis KOD1
  misc_feature (414542)..(414542): n is a or c or g or t.
  misc_feature (786890)..(786890): n is a or c or g or t.
  misc_feature (786907)..(786907): n is a or c or g or t.
  misc_feature (786944)..(786946): n is a or c or g or t.
  misc_feature (839139)..(839139): n is a or c or g or t.
  misc_feature (1128488)..(1128488): n is a or c or g or t.
  misc_feature (1128499)..(1128499): n is a or c or g or t.
  misc_feature (1128505)..(1128506): n is a or c or g or t.
  misc_feature (1128517)..(1128518): n is a or c or g or t.
  misc_feature (1128539)..(1128540): n is a or c or g or t.
  misc_feature (1561400)..(1561400): n is a or c or g or t.
  misc_feature (1561477)..(1561477): n is a or c or g or t.
  misc_feature (1561545)..(1561545): n is a or c or g or t.
  misc_feature (1767941)..(1767941): n is a or c or g or t.
MFEWLLYISLALGFWLIYEIAKDKVRGPGRYWITLNVEGDAERVEYLIKQLAKDQKIKIRSFKISAEKPSTSKRKKFFGQTTKKEEVDSK

SEQ ID NO: 739 - protein, 53 aa, Thermococcus kodakaraensis KOD1
  misc_feature (414542)..(414542): n is a or c or g or t.
  misc_feature (786890)..(786890): n is a or c or g or t.
  misc_feature (786907)..(786907): n is a or c or g or t.
  misc_feature (786944)..(786946): n is a or c or g or t.
  misc_feature (839139)..(839139): n is a or c or g or t.
  misc_feature (1128488)..(1128488): n is a or c or g or t.
  misc_feature (1128499)..(1128499): n is a or c or g or t.
  misc_feature (1128505)..(1128506): n is a or c or g or t.
  misc_feature (1128517)..(1128518): n is a or c or g or t.
  misc_feature (1128539)..(1128540): n is a or c or g or t.
  misc_feature (1561400)..(1561400): n is a or c or g or t.
  misc_feature (1561477)..(1561477): n is a or c or g or t.
  misc_feature (1561545)..(1561545): n is a or c or g or t.
  misc_feature (1767941)..(1767941): n is a or c or g or t.
MRVGRGGMVTIPQKVREELQLDPGDLVEVIIENVFKLKTGYEREFRYVRETKK

SEQ ID NO: 740 - protein, 58 aa, Thermococcus kodakaraensis KOD1
  misc_feature (414542)..(414542): n is a or c or g or t.
  misc_feature (786890)..(786890): n is a or c or g or t.
  misc_feature (786907)..(786907): n is a or c or g or t.
  misc_feature (786944)..(786946): n is a or c or g or t.
  misc_feature (839139)..(839139): n is a or c or g or t.
  misc_feature (1128488)..(1128488): n is a or c or g or t.
  misc_feature (1128499)..(1128499): n is a or c or g or t.
  misc_feature (1128505)..(1128506): n is a or c or g or t.
  misc_feature (1128517)..(1128518): n is a or c or g or t.
  misc_feature (1128539)..(1128540): n is a or c or g or t.
  misc_feature (1561400)..(1561400): n is a or c or g or t.
  misc_feature (1561477)..(1561477): n is a or c or g or t.
  misc_feature (1561545)..(1561545): n is a or c or g or t.
  misc_feature (1767941)..(1767941): n is a or c or g or t.
MSTSFQTALELYSEREQQERRRILAAAQGLKKRAEAFKRTYRKDIMQEIMEVLLGGGE

SEQ ID NO: 741 - protein, 113 aa, Thermococcus kodakaraensis KOD1
  misc_feature (414542)..(414542): n is a or c or g or t.
  misc_feature (786890)..(786890): n is a or c or g or t.
  misc_feature (786907)..(786907): n is a or c or g or t.
  misc_feature (786944)..(786946): n is a or c or g or t.
  misc_feature (839139)..(839139): n is a or c or g or t.
  misc_feature (1128488)..(1128488): n is a or c or g or t.
  misc_feature (1128499)..(1128499): n is a or c or g or t.
  misc_feature (1128505)..(1128506): n is a or c or g or t.
  misc_feature (1128517)..(1128518): n is a or c or g or t.
  misc_feature (1128539)..(1128540): n is a or c or g or t.
  misc_feature (1561400)..(1561400): n is a or c or g or t.
  misc_feature (1561477)..(1561477): n is a or c or g or t.
  misc_feature (1561545)..(1561545): n is a or c or g or t.
  misc_feature (1767941)..(1767941): n is a or c or g or t.
MPSEGGDGAMSVDLSFVNGFIVGAGATFFVLLVLAHIYGGKIDIKRTGVANLYFGLAARKAVRIEVDQDKAKILVINEDVACSIDFDPSEFKAFKKALLKLGPEVEERDVSES

SEQ ID NO: 742 - protein, 200 aa, Thermococcus kodakaraensis KOD1
  misc_feature (414542)..(414542): n is a or c or g or t.
  misc_feature (786890)..(786890): n is a or c or g or t.
  misc_feature (786907)..(786907): n is a or c or g or t.
  misc_feature (786944)..(786946): n is a or c or g or t.
  misc_feature (839139)..(839139): n is a or c or g or t.
  misc_feature (1128488)..(1128488): n is a or c or g or t.
  misc_feature (1128499)..(1128499): n is a or c or g or t.
  misc_feature (1128505)..(1128506): n is a or c or g or t.
  misc_feature (1128517)..(1128518): n is a or c or g or t.
  misc_feature (1128539)..(1128540): n is a or c or g or t.
  misc_feature (1561400)..(1561400): n is a or c or g or t.
  misc_feature (1561477)..(1561477): n is a or c or g or t.
  misc_feature (1561545)..(1561545): n is a or c or g or t.
  misc_feature (1767941)..(1767941): n is a or c or g or t.
VVQLILVFSSTILLTPLFQSRYAMMSESNADEMMSPKPEQEVIELEKLSQKIDGISRQLQAIKEAEEKKNEPDTLGWDDITQEIIGAVTFALPFLFTGELWDVAKAISLERAVVIFLLTLGIAYLFLVKSRLGNMKREELFHLPKRLISVSVISYTISALLIYLYDINGVAHFTPVQYLNATVIVSAFAVIGAIAVDMVK

SEQ ID NO: 743 - protein, 337 aa, Thermococcus kodakaraensis KOD1
  misc_feature (414542)..(414542): n is a or c or g or t.
  misc_feature (786890)..(786890): n is a or c or g or t.
  misc_feature (786907)..(786907): n is a or c or g or t.
  misc_feature (786944)..(786946): n is a or c or g or t.
  misc_feature (839139)..(839139): n is a or c or g or t.
  misc_feature (1128488)..(1128488): n is a or c or g or t.
  misc_feature (1128499)..(1128499): n is a or c or g or t.
  misc_feature (1128505)..(1128506): n is a or c or g or t.
  misc_feature (1128517)..(1128518): n is a or c or g or t.
  misc_feature (1128539)..(1128540): n is a or c or g or t.
  misc_feature (1561400)..(1561400): n is a or c or g or t.
  misc_feature (1561477)..(1561477): n is a or c or g or t.
  misc_feature (1561545)..(1561545): n is a or c or g or t.
  misc_feature (1767941)..(1767941): n is a or c or g or t.
MRVVTGNKWEQFGDAVLFPEYGKNREDLLKFVDSLSGEETLVTSSLEVIDLLAERFRKSEENILVYSDTMKSLTLKEVYELRKYLDFDVRGGFSGEDAPVSVLFVEGKTDSKFFKAVMKKLFDFRESRTAPRNLKFIEKVFERDNFDLLHKDGKYVAVIPSEGNSGVIRNLGNFLKAMDVFGFGVERIGVAIDVDEDREAAMASITGKLASFSPRKAGDFYLVWNTFIVPLIIGLPFEDELIDWKKPTVEDLMLHLISAEGLLEKLRPALGAFEESLGRKLKPKEVMYLALSAYGHWGNLEGFYELFVMRSRHRHIKDVLRKAGLMEGLRFLAFAER

SEQ ID NO: 744 - protein, 250 aa, Thermococcus kodakaraensis KOD1
  misc_feature (414542)..(414542): n is a or c or g or t.
  misc_feature (786890)..(786890): n is a or c or g or t.
  misc_feature (786907)..(786907): n is a or c or g or t.
  misc_feature (786944)..(786946): n is a or c or g or t.
  misc_feature (839139)..(839139): n is a or c or g or t.
  misc_feature (1128488)..(1128488): n is a or c or g or t.
  misc_feature (1128499)..(1128499): n is a or c or g or t.
  misc_feature (1128505)..(1128506): n is a or c or g or t.
  misc_feature (1128517)..(1128518): n is a or c or g or t.
  misc_feature (1128539)..(1128540): n is a or c or g or t.
  misc_feature (1561400)..(1561400): n is a or c or g or t.
  misc_feature (1561477)..(1561477): n is a or c or g or t.
  misc_feature (1561545)..(1561545): n is a or c or g or t.
  misc_feature (1767941)..(1767941): n is a or c or g or t.
VVMSMKLVSFDVWNTLLDMNGMLDAFSAELSNIMGTCIVDVVEAIMLTRARIKGMRARGEGDPKRALEESQEMLAEILGVDIEVIRRAAARATLNVGDLVLPGAEDALKDAKRRGLKVTVTGNVMFWPGSYTRLLLERVGLMRYIDRTFFADEVGAFKPLPEMFRKPLEVFGVEPEEALHVGDTYAEDFEGALRVGMWGAWINPEAEGVRRISERGFEIPSIGELPEVLDMLTGDMGKAYKSTGQRSPEV

SEQ ID NO: 745 - protein, 94 aa, Thermococcus kodakaraensis KOD1
  misc_feature (414542)..(414542): n is a or c or g or t.
  misc_feature (786890)..(786890): n is a or c or g or t.
  misc_feature (786907)..(786907): n is a or c or g or t.
  misc_feature (786944)..(786946): n is a or c or g or t.
  misc_feature (839139)..(839139): n is a or c or g or t.
  misc_feature (1128488)..(1128488): n is a or c or g or t.
  misc_feature (1128499)..(1128499): n is a or c or g or t.
  misc_feature (1128505)..(1128506): n is a or c or g or t.
  misc_feature (1128517)..(1128518): n is a or c or g or t.
  misc_feature (1128539)..(1128540): n is a or c or g or t.
  misc_feature (1561400)..(1561400): n is a or c or g or t.
  misc_feature (1561477)..(1561477): n is a or c or g or t.
  misc_feature (1561545)..(1561545): n is a or c or g or t.
  misc_feature (1767941)..(1767941): n is a or c or g or t.
VNDMSDYNLVGVIKVMPTDPDVNLDELEEKLKAVIPEKYGLAKVEREPIAFGLVALKFYVLGRDEEGYSFDEVADIFRQVENVESAEVETVSRI

SEQ ID NO: 746 - protein, 492 aa, Thermococcus kodakaraensis KOD1
  misc_feature (414542)..(414542): n is a or c or g or t.
  misc_feature (786890)..(786890): n is a or c or g or t.
  misc_feature (786907)..(786907): n is a or c or g or t.
  misc_feature (786944)..(786946): n is a or c or g or t.
  misc_feature (839139)..(839139): n is a or c or g or t.
  misc_feature (1128488)..(1128488): n is a or c or g or t.
  misc_feature (1128499)..(1128499): n is a or c or g or t.
  misc_feature (1128505)..(1128506): n is a or c or g or t.
  misc_feature (1128517)..(1128518): n is a or c or g or t.
  misc_feature (1128539)..(1128540): n is a or c or g or t.
  misc_feature (1561400)..(1561400): n is a or c or g or t.
  misc_feature (1561477)..(1561477): n is a or c or g or t.
  misc_feature (1561545)..(1561545): n is a or c or g or t.
  misc_feature (1767941)..(1767941): n is a or c or g or t.
MRPLDLTEKDPSKKITIYLDGEPYEAYEGEKFPVAMLANGVYWLTTSNEGRHRGAFTFGPVPVTVNGVKNINGRKLKLKDGMKIERQRYDEFQEQVEIDEGKPVLRYVVDVAVIGAGPAGLGVVEEIGGKLTVALIEEKGWLGGDMWLKGVEQEGFGNPREAIERLTNFPENVRVFLKTAALGVYDKGEYFLVPAVRNDQLIEFMAKKVVLATGAVDNIMLFENNDWPGVFRRADALEVMNVWGVAPGRKVAVTGAFPEEITAELERWGIEYIIVPNVKRVEGEDRIERVIDENGNVYEVDALIMADGRIPDINPITQAGGKLRFKRGYYMPILDDEHRIRDGIYVAGSAVSIKPHYANYLEGKLVGAYILREFGYESEPCIYEERLKEYEPVARPVPKLPLDNFNGEDVQICGCGVTLKKVDDVVRSGITDLQIIKRLTHLAMGFCQGRFCLFNGALLVSQRSGMGMDRLDIPVARPPIKNVKMKVVAGRD

SEQ ID NO: 747 - protein, 175 aa, Thermococcus kodakaraensis KOD1
  misc_feature (414542)..(414542): n is a or c or g or t.
  misc_feature (786890)..(786890): n is a or c or g or t.
  misc_feature (786907)..(786907): n is a or c or g or t.
  misc_feature (786944)..(786946): n is a or c or g or t.
  misc_feature (839139)..(839139): n is a or c or g or t.
  misc_feature (1128488)..(1128488): n is a or c or g or t.
  misc_feature (1128499)..(1128499): n is a or c or g or t.
  misc_feature (1128505)..(1128506): n is a or c or g or t.
  misc_feature (1128517)..(1128518): n is a or c or g or t.
  misc_feature (1128539)..(1128540): n is a or c or g or t.
  misc_feature (1561400)..(1561400): n is a or c or g or t.
  misc_feature (1561477)..(1561477): n is a or c or g or t.
  misc_feature (1561545)..(1561545): n is a or c or g or t.
  misc_feature (1767941)..(1767941): n is a or c or g or t.
VVPMSEIPEYLKKGYITPEELFKIIPKPSDERLRARPVAVPECPQEIPCAPCREVCPTGAISMPTPNDLPIVDYEKCVGCSLCVQICPGLAFFMVHYVGDKARITMPYELLPVPERGDEVVLLNRVGEPVGKGKVTLVIPREKSMGDTAVVTVEVPIELAWEVRTIHVLGGEEDD

SEQ ID NO: 748 - protein, 414 aa, Thermococcus kodakaraensis KOD1
  misc_feature (414542)..(414542): n is a or c or g or t.
  misc_feature (786890)..(786890): n is a or c or g or t.
  misc_feature (786907)..(786907): n is a or c or g or t.
  misc_feature (786944)..(786946): n is a or c or g or t.
  misc_feature (839139)..(839139): n is a or c or g or t.
  misc_feature (1128488)..(1128488): n is a or c or g or t.
  misc_feature (1128499)..(1128499): n is a or c or g or t.
  misc_feature (1128505)..(1128506): n is a or c or g or t.
  misc_feature (1128517)..(1128518): n is a or c or g or t.
  misc_feature (1128539)..(1128540): n is a or c or g or t.
  misc_feature (1561400)..(1561400): n is a or c or g or t.
  misc_feature (1561477)..(1561477): n is a or c or g or t.
  misc_feature (1561545)..(1561545): n is a or c or g or t.
  misc_feature (1767941)..(1767941): n is a or c or g or t.
MPLRKRERVITQGKRERTLKLKKLRVKRRNIVILAVSMFIANVAFGMAFPYLSVYMQYLGATMFMVGLLSVAFNLTSTVFQYPFGWLSDATRNRKGFIAFGAASIGLFYMIMAFATSPVHVLLLRTFQGAFGSAMTPAHSALISELSTRAGSIFGLFNSIENAGYMVGNFIGSAVVEYFGIKVLFIIAGFLLFLSAGIVLLIRERPAGRRSLVGMILVQEGRESWRATVKSSAFKKLMRGHLGLFYFTVFLVMVASGQFYSVSSVYFKEAFGEWSVGVLFGIESLAAALTGYFLGRLIDRYGAKRFYLVSIAGYAMAFVLYAVVRNVWLAFGVAFLSGIKWILTINSTSTYVARKVSVSERAQGMALLNGMMSLGWVVGPLIGGYLSEISFPLNFFSTVVPLSIAFVLALRLPE

SEQ ID NO: 749 - protein, 183 aa, Thermococcus kodakaraensis KOD1
  misc_feature (414542)..(414542): n is a or c or g or t.
  misc_feature (786890)..(786890): n is a or c or g or t.
  misc_feature (786907)..(786907): n is a or c or g or t.
  misc_feature (786944)..(786946): n is a or c or g or t.
  misc_feature (839139)..(839139): n is a or c or g or t.
  misc_feature (1128488)..(1128488): n is a or c or g or t.
  misc_feature (1128499)..(1128499): n is a or c or g or t.
  misc_feature (1128505)..(1128506): n is a or c or g or t.
  misc_feature (1128517)..(1128518): n is a or c or g or t.
  misc_feature (1128539)..(1128540): n is a or c or g or t.
  misc_feature (1561400)..(1561400): n is a or c or g or t.
  misc_feature (1561477)..(1561477): n is a or c or g or t.
  misc_feature (1561545)..(1561545): n is a or c or g or t.
  misc_feature (1767941)..(1767941): n is a or c or g or t.
VVEMGKAKPKYCEICGAPIRGPGHRIRIERAEVLVCDKCYEKYGGKKPGTFSIMPTGRQPRRTAKPASRPKPQPRPYQPKPLVTEEIVEDFAERVYRAIQRSGKSYEELSHEIGLSVNDLRAIAHGYREPTIKEARKLERYFKIKLIESAGEESFEEKKTIPRDYEPTLGDIANIRIKKRKKK

SEQ ID NO: 750 - protein, 56 aa, Thermococcus kodakaraensis KOD1
  misc_feature (414542)..(414542): n is a or c or g or t.
  misc_feature (786890)..(786890): n is a or c or g or t.
  misc_feature (786907)..(786907): n is a or c or g or t.
  misc_feature (786944)..(786946): n is a or c or g or t.
  misc_feature (839139)..(839139): n is a or c or g or t.
  misc_feature (1128488)..(1128488): n is a or c or g or t.
  misc_feature (1128499)..(1128499): n is a or c or g or t.
  misc_feature (1128505)..(1128506): n is a or c or g or t.
  misc_feature (1128517)..(1128518): n is a or c or g or t.
  misc_feature (1128539)..(1128540): n is a or c or g or t.
  misc_feature (1561400)..(1561400): n is a or c or g or t.
  misc_feature (1561477)..(1561477): n is a or c or g or t.
  misc_feature (1561545)..(1561545): n is a or c or g or t.
  misc_feature (1767941)..(1767941): n is a or c or g or t.
MGEIVIVVPKGLEKIIQRKISLLLRKEEKKGLKKDILKKYLGKFSGSINEEEWYFQ

SEQ ID NO: 751 - protein, 280 aa, Thermococcus kodakaraensis KOD1
  misc_feature (414542)..(414542): n is a or c or g or t.
  misc_feature (786890)..(786890): n is a or c or g or t.
  misc_feature (786907)..(786907): n is a or c or g or t.
  misc_feature (786944)..(786946): n is a or c or g or t.
  misc_feature (839139)..(839139): n is a or c or g or t.
  misc_feature (1128488)..(1128488): n is a or c or g or t.
  misc_feature (1128499)..(1128499): n is a or c or g or t.
  misc_feature (1128505)..(1128506): n is a or c or g or t.
  misc_feature (1128517)..(1128518): n is a or c or g or t.
  misc_feature (1128539)..(1128540): n is a or c or g or t.
  misc_feature (1561400)..(1561400): n is a or c or g or t.
  misc_feature (1561477)..(1561477): n is a or c or g or t.
  misc_feature (1561545)..(1561545): n is a or c or g or t.
  misc_feature (1767941)..(1767941): n is a or c or g or t.
VDPLSGFLGSLLWWLFFLYLLMWPQLQFRALQAARARLMAQLARKRNSTVIAMIHRQESIGLFGIPVYKFISIEDSEEVLRAIRSAPKDKPIDLIIHTPGGLVLAATQIARALKEHPAETRVIVPHYAMSGGTLIALAADKIIMDPNAVLGPVDPQLGQYPAPSILRAVEKKGPEKVDDQTLILADVAEKAIKQVQDFVFSLLKDKYGEEKARELAQILTEGRWTHDYPITVDHARELGLNVETDVPEEVYALMELYKQPVKQRGTVEFMPYPVKQESKK

SEQ ID NO: 752 - protein, 272 aa, Thermococcus kodakaraensis KOD1
  misc_feature (414542)..(414542): n is a or c or g or t.
  misc_feature (786890)..(786890): n is a or c or g or t.
  misc_feature (786907)..(786907): n is a or c or g or t.
  misc_feature (786944)..(786946): n is a or c or g or t.
  misc_feature (839139)..(839139): n is a or c or g or t.
  misc_feature (1128488)..(1128488): n is a or c or g or t.
  misc_feature (1128499)..(1128499): n is a or c or g or t.
  misc_feature (1128505)..(1128506): n is a or c or g or t.
  misc_feature (1128517)..(1128518): n is a or c or g or t.
  misc_feature (1128539)..(1128540): n is a or c or g or t.
  misc_feature (1561400)..(1561400): n is a or c or g or t.
  misc_feature (1561477)..(1561477): n is a or c or g or t.
  misc_feature (1561545)..(1561545): n is a or c or g or t.
  misc_feature (1767941)..(1767941): n is a or c or g or t.
VELVKELGRSFNYLDPDTYVSPGTFNAALHAFGAVKKAVELAFEDKGLYLALVRPPGHHAGRKGRAFNAPTLGFCIFNNAAYASKLLEGLTGKALVIDFDAHHGNGTQEILWNDPNAVHIDLHERDIYPVSGYEYEVGGKGAEGTKVNIPMPHYSGDDDYIYAWNEVVLPIVAQFKPKVIVISAGFDGFHGDGLTTLRLSEAFYAYAGTTLSKYPLVVVLEGGYSVGLEKGLPVFMAGYLSGERFEVSVRPSFETLSIMERVKEILGEWWEF

SEQ ID NO: 753 - protein, 452 aa, Thermococcus kodakaraensis KOD1
  misc_feature (414542)..(414542): n is a or c or g or t.
  misc_feature (786890)..(786890): n is a or c or g or t.
  misc_feature (786907)..(786907): n is a or c or g or t.
  misc_feature (786944)..(786946): n is a or c or g or t.
  misc_feature (839139)..(839139): n is a or c or g or t.
  misc_feature (1128488)..(1128488): n is a or c or g or t.
  misc_feature (1128499)..(1128499): n is a or c or g or t.
  misc_feature (1128505)..(1128506): n is a or c or g or t.
  misc_feature (1128517)..(1128518): n is a or c or g or t.
  misc_feature (1128539)..(1128540): n is a or c or g or t.
  misc_feature (1561400)..(1561400): n is a or c or g or t.
  misc_feature (1561477)..(1561477): n is a or c or g or t.
  misc_feature (1561545)..(1561545): n is a or c or g or t.
  misc_feature (1767941)..(1767941): n is a or c or g or t.
MIRKFVDRERELGILEKEWRNTPSFVVIYGRRRVGKTRLLVEFSRGKRAIFHTFMEGTKESQIKSLTEELADFFDDEVFLSFSDWYPLFKYLSGKIDNKTLLVFDEFTYAIKSDKGILSALQRVWDHELSSKPVMLVLSGSLMGMMEDEVLSHSSPLYGRRTAGFRLRPLGLFPSLGFFEDFEEGLKFYMLLGGVPAYLIIASRYKTVGDFVEGEFLTPEGYFYDEPYIVLSELRELKTYFSILSAMASGRRKPSEIASGAGLDGRKIYPYLETLMRLGFVERELPVARKEKRGLYRISDPMLMSWFSLVYSNRTGIELGTITLNDVGETLQRIFSFRFEDVSKEFLIELNKEGKLPFRFTKIGRWWHKNKEIDLVALNEHEKKALFVEVKWKELSEREARGILKDLERKAGLVELRGWEKRYGLVAKKIKGKEELRGKSFLAWDLEDFEDI

SEQ ID NO: 754 - protein, 170 aa, Thermococcus kodakaraensis KOD1
  misc_feature (414542)..(414542): n is a or c or g or t.
  misc_feature (786890)..(786890): n is a or c or g or t.
  misc_feature (786907)..(786907): n is a or c or g or t.
  misc_feature (786944)..(786946): n is a or c or g or t.
  misc_feature (839139)..(839139): n is a or c or g or t.
  misc_feature (1128488)..(1128488): n is a or c or g or t.
  misc_feature (1128499)..(1128499): n is a or c or g or t.
  misc_feature (1128505)..(1128506): n is a or c or g or t.
  misc_feature (1128517)..(1128518): n is a or c or g or t.
  misc_feature (1128539)..(1128540): n is a or c or g or t.
  misc_feature (1561400)..(1561400): n is a or c or g or t.
  misc_feature (1561477)..(1561477): n is a or c or g or t.
  misc_feature (1561545)..(1561545): n is a or c or g or t.
  misc_feature (1767941)..(1767941): n is a or c or g or t.
VARGLLRKSRIVLCMEGTGIARIVAEKIAEVWDELLNTEIVGIPHLVGSISSDGEVEMFLVFFDEYTFERTIEDGSVSFTFPIEATDPKELFMSLLKFIREGTTPSILEPGEKIKEPLKENLTKRGFEVLWIAGNDYVDAWVSKSGVKYHLSFERTGKDEYTLVRKEKVQ

SEQ ID NO: 755 - protein, 150 aa, Thermococcus kodakaraensis KOD1
  misc_feature (414542)..(414542): n is a or c or g or t.
  misc_feature (786890)..(786890): n is a or c or g or t.
  misc_feature (786907)..(786907): n is a or c or g or t.
  misc_feature (786944)..(786946): n is a or c or g or t.
  misc_feature (839139)..(839139): n is a or c or g or t.
  misc_feature (1128488)..(1128488): n is a or c or g or t.
  misc_feature (1128499)..(1128499): n is a or c or g or t.
  misc_feature (1128505)..(1128506): n is a or c or g or t.
  misc_feature (1128517)..(1128518): n is a or c or g or t.
  misc_feature (1128539)..(1128540): n is a or c or g or t.
  misc_feature (1561400)..(1561400): n is a or c or g or t.
  misc_feature (1561477)..(1561477): n is a or c or g or t.
  misc_feature (1561545)..(1561545): n is a or c or g or t.
  misc_feature (1767941)..(1767941): n is a or c or g or t.
MIRFKCSKLQPWTVMFMIEVGEYKVKEGLYYTKDHEWAQVLDDGTVLVGISDYAQKELGDLAYVELPEVGKEVSKGDVLCEIESVKAVSEVYAPVSGEVIEVNEALEDSPELLNEDPYENWIAKLKPTNLEEELKELMDAQAYAEYLRSL

SEQ ID NO: 756 - protein, 143 aa, Thermococcus kodakaraensis KOD1
  misc_feature (414542)..(414542): n is a or c or g or t.
  misc_feature (786890)..(786890): n is a or c or g or t.
  misc_feature (786907)..(786907): n is a or c or g or t.
  misc_feature (786944)..(786946): n is a or c or g or t.
  misc_feature (839139)..(839139): n is a or c or g or t.
  misc_feature (1128488)..(1128488): n is a or c or g or t.
  misc_feature (1128499)..(1128499): n is a or c or g or t.
  misc_feature (1128505)..(1128506): n is a or c or g or t.
  misc_feature (1128517)..(1128518): n is a or c or g or t.
  misc_feature (1128539)..(1128540): n is a or c or g or t.
  misc_feature (1561400)..(1561400): n is a or c or g or t.
  misc_feature (1561477)..(1561477): n is a or c or g or t.
  misc_feature (1561545)..(1561545): n is a or c or g or t.
  misc_feature (1767941)..(1767941): n is a or c or g or t.
MEKRLVRSKKNRIFLGVLGGIAEYLEVDPTIVRLIFVVLFAVNPGVMTLAYLLAALVMPEESSEEESSDLGKKLEDVIKEAGESLGAVVHEDSTSRIVALVLILLGAILLVDSAFRVLPVVGFKTLLAVVLLVIGVVLLKEGE

SEQ ID NO: 757 - protein, 751 aa, Thermococcus kodakaraensis KOD1
  misc_feature (414542)..(414542): n is a or c or g or t.
  misc_feature (786890)..(786890): n is a or c or g or t.
  misc_feature (786907)..(786907): n is a or c or g or t.
  misc_feature (786944)..(786946): n is a or c or g or t.
  misc_feature (839139)..(839139): n is a or c or g or t.
  misc_feature (1128488)..(1128488): n is a or c or g or t.
  misc_feature (1128499)..(1128499): n is a or c or g or t.
  misc_feature (1128505)..(1128506): n is a or c or g or t.
  misc_feature (1128517)..(1128518): n is a or c or g or t.
  misc_feature (1128539)..(1128540): n is a or c or g or t.
  misc_feature (1561400)..(1561400): n is a or c or g or t.
  misc_feature (1561477)..(1561477): n is a or c or g or t.
  misc_feature (1561545)..(1561545): n is a or c or g or t.
  misc_feature (1767941)..(1767941): n is a or c or g or t.
MIPLKGGLLLRFRQKIYVAIIGTLTVIMLIMAVLQVRGISRMGETVEETMSPALLEQAKHTALLESESYSREIDGVMYALRMLADSYAKSIEKEYSFGSYIPGYTDSPPFWNYVKKILQSFKNSDERIINVYYADFRGRLEIIPPAELPEDFNATKTSWYQRAVSEGSFWTDPYTDMITNKTVVSYIVPIKYEGEVKGVLGVDVDVSIIKEEILRAKLGKTGYSFVVNSNGTVIIHPNSDLVGKLNIFEDPSYSALSKALERKDTGVIETTLNGKDVLVAFSKSSVSGWIILSVVPKEEMMASLLSALERARGEASKSLVLSLLASLAAGIVLALLSVKYLRDSLRPIEELTKAAELIGEGKLEEAKRHVSSIDYPYRDDEIGKLLTAFEAISKDVIGTLNGVIARLQDMAEGRLNYTLDENARGDLQNIILALRETSAKMRTLIGNIREIGFELDRQADTLAEIAENVRHSMDQVGEAVEQVSIEAQREQENINEITEGMRVVSSITEETVDTMNEFESAVGEVVRIAEEGRSKGELAIKDVESIKRSMHFIDEAVKAVSEMSRKIGEITQAISGIAEQTNLLALNAAIEAARAGEAGKGFAVVAQEIRSLAEDSKQAAETINRIIAEMEEKVQRAVEETQRGVNTVSRSTQGLQESLGYLGHIAEMISAVGSRVSEVKEQAERTREEVEKALKALENLAASAEETTASAEEVSSAMQEQRAEIESLAEEARKLREIARSLRQNVEQFQL

SEQ ID NO: 758 - protein, 535 aa, Thermococcus kodakaraensis KOD1
  misc_feature (414542)..(414542): n is a or c or g or t.
  misc_feature (786890)..(786890): n is a or c or g or t.
  misc_feature (786907)..(786907): n is a or c or g or t.
  misc_feature (786944)..(786946): n is a or c or g or t.
  misc_feature (839139)..(839139): n is a or c or g or t.
  misc_feature (1128488)..(1128488): n is a or c or g or t.
  misc_feature (1128499)..(1128499): n is a or c or g or t.
  misc_feature (1128505)..(1128506): n is a or c or g or t.
  misc_feature (1128517)..(1128518): n is a or c or g or t.
  misc_feature (1128539)..(1128540): n is a or c or g or t.
  misc_feature (1561400)..(1561400): n is a or c or g or t.
  misc_feature (1561477)..(1561477): n is a or c or g or t.
  misc_feature (1561545)..(1561545): n is a or c or g or t.
  misc_feature (1767941)..(1767941): n is a or c or g or t.
MARIVLTTDETLTSTYHDVPLLDFLGCAPYDKLPKWVFRFFDTQLPDENGVLTQAPYGLRKVEAALLRDGFRRDEVVVAHPRKIENFIGNDTTIVALYEMDPLGLGPVSMMFTNGGKWTNYTKVKFLELVERINRIREGKKLDFKLVVGGPGAWQVDFRKEERERLKIDHVVIGEVDHVAGELFREIESGSADETIFIKGWPRVEHIPTIVAPSYKGLVEVMRGCGRGCRFCEPNLRVARYMPLERIEEEIRLNVSAGIDHAWLHSEDVFLYRVEDKKNFYPNAEAVVELFEIARRYTKNVNPTHGAVAGALAVPGMIEEISRIVDAGPAHWIGIQVGFETASPRLIGKYMNNKMKPFSPEEWPWVLLNGTYVLNKNYWFPAYTTILGLPGDTDDDEIMTAQLIITMERELEEKLGNRAHFTVTPLAFVPMGLLKNQEFYQIDEMITYGQFLHLYYAWKHMMREVTRGLPEVMKNNPFLIPFYPLARLGTRIVIRQIEKWGRSRGYEVKPLEPLDIRIEVEEHRWYSQPSLVEAY

SEQ ID NO: 759 - protein, 77 aa, Thermococcus kodakaraensis KOD1
  misc_feature (414542)..(414542): n is a or c or g or t.
  misc_feature (786890)..(786890): n is a or c or g or t.
  misc_feature (786907)..(786907): n is a or c or g or t.
  misc_feature (786944)..(786946): n is a or c or g or t.
  misc_feature (839139)..(839139): n is a or c or g or t.
  misc_feature (1128488)..(1128488): n is a or c or g or t.
  misc_feature (1128499)..(1128499): n is a or c or g or t.
  misc_feature (1128505)..(1128506): n is a or c or g or t.
  misc_feature (1128517)..(1128518): n is a or c or g or t.
  misc_feature (1128539)..(1128540): n is a or c or g or t.
  misc_feature (1561400)..(1561400): n is a or c or g or t.
  misc_feature (1561477)..(1561477): n is a or c or g or t.
  misc_feature (1561545)..(1561545): n is a or c or g or t.
  misc_feature (1767941)..(1767941): n is a or c or g or t.
MEAFLLLVTDARNDDCVLERVLGLPQVFEVHRLYGYYDILARVSVEDPEELSEIQRELLNTGRVLLIETLICAEGAS

SEQ ID NO: 760 - protein, 131 aa, Thermococcus kodakaraensis KOD1
  misc_feature (414542)..(414542): n is a or c or g or t.
  misc_feature (786890)..(786890): n is a or c or g or t.
  misc_feature (786907)..(786907): n is a or c or g or t.
  misc_feature (786944)..(786946): n is a or c or g or t.
  misc_feature (839139)..(839139): n is a or c or g or t.
  misc_feature (1128488)..(1128488): n is a or c or g or t.
  misc_feature (1128499)..(1128499): n is a or c or g or t.
  misc_feature (1128505)..(1128506): n is a or c or g or t.
  misc_feature (1128517)..(1128518): n is a or c or g or t.
  misc_feature (1128539)..(1128540): n is a or c or g or t.
  misc_feature (1561400)..(1561400): n is a or c or g or t.
  misc_feature (1561477)..(1561477): n is a or c or g or t.
  misc_feature (1561545)..(1561545): n is a or c or g or t.
  misc_feature (1767941)..(1767941): n is a or c or g or t.
MKYEIIHRPSFSLLEIELERGEAVQAEAGAMVHMSPTIKLETKAKGGVFGALKRSMLGGESFFVNTFRAEDGPGSIGLAPAYMGDIEAFELDGTLYAQSGAFLASYGDIDIDTKWAALKPSSAGKVCSSLR

SEQ ID NO: 761 - protein, 286 aa, Thermococcus kodakaraensis KOD1
  misc_feature (414542)..(414542): n is a or c or g or t.
  misc_feature (786890)..(786890): n is a or c or g or t.
  misc_feature (786907)..(786907): n is a or c or g or t.
  misc_feature (786944)..(786946): n is a or c or g or t.
  misc_feature (839139)..(839139): n is a or c or g or t.
  misc_feature (1128488)..(1128488): n is a or c or g or t.
  misc_feature (1128499)..(1128499): n is a or c or g or t.
  misc_feature (1128505)..(1128506): n is a or c or g or t.
  misc_feature (1128517)..(1128518): n is a or c or g or t.
  misc_feature (1128539)..(1128540): n is a or c or g or t.
  misc_feature (1561400)..(1561400): n is a or c or g or t.
  misc_feature (1561477)..(1561477): n is a or c or g or t.
  misc_feature (1561545)..(1561545): n is a or c or g or t.
  misc_feature (1767941)..(1767941): n is a or c or g or t.
VRLMRPIIAIIGTSRDGYTLANTHHFRKVLEAGGLPVLFSPEGDPEDVIEVADGILLVEGPDIHPRFYGEDPSLSLRDVDVAKDEFEITLVKLAIDGEIPILGVGRGMQIINVALGGTLYQDVYEIPKAIKHDWEIGRVRPDQKLHTVRVKTDSKLYNILKDVLVIEGTNDAWTWVNSFHHQAVKKVGEGLRQVAFSVDGLIEGIESTDESFVIGVQWQPEYLDEMKVLYEALVKAALGHQERKHEIELIQLEEEAKKRLAQETTEQDETHHTSETSDNLPDTTQT

SEQ ID NO: 762 - protein, 160 aa, Thermococcus kodakaraensis KOD1
  misc_feature (414542)..(414542): n is a or c or g or t.
  misc_feature (786890)..(786890): n is a or c or g or t.
  misc_feature (786907)..(786907): n is a or c or g or t.
  misc_feature (786944)..(786946): n is a or c or g or t.
  misc_feature (839139)..(839139): n is a or c or g or t.
  misc_feature (1128488)..(1128488): n is a or c or g or t.
  misc_feature (1128499)..(1128499): n is a or c or g or t.
  misc_feature (1128505)..(1128506): n is a or c or g or t.
  misc_feature (1128517)..(1128518): n is a or c or g or t.
  misc_feature (1128539)..(1128540): n is a or c or g or t.
  misc_feature (1561400)..(1561400): n is a or c or g or t.
  misc_feature (1561477)..(1561477): n is a or c or g or t.
  misc_feature (1561545)..(1561545): n is a or c or g or t.
  misc_feature (1767941)..(1767941): n is a or c or g or t.
MALCTWSPLGKTFKKVNLSALGGLMVKGAVKWVPGEEFQFIGRMEDDKCSVILGDGGISPMKLLLLSVAGCTAYDVVMILQKMREQIKGLEVEISGERREEHPRIYTKVHIHYKIYGNVKEEKARRAIELSQDKYCSASAHVKLSGAELTYSLEIVPDDE

SEQ ID NO: 763 - protein, 16 aa, Thermococcus kodakaraensis KOD1
  misc_feature (414542)..(414542): n is a or c or g or t.
  misc_feature (786890)..(786890): n is a or c or g or t.
  misc_feature (786907)..(786907): n is a or c or g or t.
  misc_feature (786944)..(786946): n is a or c or g or t.
  misc_feature (839139)..(839139): n is a or c or g or t.
  misc_feature (1128488)..(1128488): n is a or c or g or t.
  misc_feature (1128499)..(1128499): n is a or c or g or t.
  misc_feature (1128505)..(1128506): n is a or c or g or t.
  misc_feature (1128517)..(1128518): n is a or c or g or t.
  misc_feature (1128539)..(1128540): n is a or c or g or t.
  misc_feature (1561400)..(1561400): n is a or c or g or t.
  misc_feature (1561477)..(1561477): n is a or c or g or t.
  misc_feature (1561545)..(1561545): n is a or c or g or t.
  misc_feature (1767941)..(1767941): n is a or c or g or t.
MLCSRNEVEVRNAMTG

SEQ ID NO: 764 - protein, 347 aa, Thermococcus kodakaraensis KOD1
  misc_feature (414542)..(414542): n is a or c or g or t.
  misc_feature (786890)..(786890): n is a or c or g or t.
  misc_feature (786907)..(786907): n is a or c or g or t.
  misc_feature (786944)..(786946): n is a or c or g or t.
  misc_feature (839139)..(839139): n is a or c or g or t.
  misc_feature (1128488)..(1128488): n is a or c or g or t.
  misc_feature (1128499)..(1128499): n is a or c or g or t.
  misc_feature (1128505)..(1128506): n is a or c or g or t.
  misc_feature (1128517)..(1128518): n is a or c or g or t.
  misc_feature (1128539)..(1128540): n is a or c or g or t.
  misc_feature (1561400)..(1561400): n is a or c or g or t.
  misc_feature (1561477)..(1561477): n is a or c or g or t.
  misc_feature (1561545)..(1561545): n is a or c or g or t.
  misc_feature (1767941)..(1767941): n is a or c or g or t.
VDSYLMAAAFDAGVKLAAGGMLLFFSHQRHRKAAYYWGFAWIIYAYAIIGDLGIHPEIAAVLLGFFSSLILQGVLRVNEEVSMSQDYIRALSWGPAAIGVYTAILLLFLEKTPETAVMGIVYGASGVFLSIGGLILYRMREFYDQDTAYLGLSLSTYGVYQMLYPVLWNEGFKFWGLFIGLVLTVVTALFMVQLSLGEVFEIEEPKTQVEIQPGVLVVDPAQFEDFKKQFREYPVLAFVRNVEVPSSWKVYRITNLGGYGNVSPTNLPRILETAVDYIRSFENSDLKPVIVLEGLEYLKLYNDFRAIAKFLTSLRDYVAVSNGTLVLVLEKDAWEEREMKTLERLLT

SEQ ID NO: 765 - protein, 254 aa, Thermococcus kodakaraensis KOD1
  misc_feature (414542)..(414542): n is a or c or g or t.
  misc_feature (786890)..(786890): n is a or c or g or t.
  misc_feature (786907)..(786907): n is a or c or g or t.
  misc_feature (786944)..(786946): n is a or c or g or t.
  misc_feature (839139)..(839139): n is a or c or g or t.
  misc_feature (1128488)..(1128488): n is a or c or g or t.
  misc_feature (1128499)..(1128499): n is a or c or g or t.
  misc_feature (1128505)..(1128506): n is a or c or g or t.
  misc_feature (1128517)..(1128518): n is a or c or g or t.
  misc_feature (1128539)..(1128540): n is a or c or g or t.
  misc_feature (1561400)..(1561400): n is a or c or g or t.
  misc_feature (1561477)..(1561477): n is a or c or g or t.
  misc_feature (1561545)..(1561545): n is a or c or g or t.
  misc_feature (1767941)..(1767941): n is a or c or g or t.
VMNMIKLGIKPLDEALGGVKEHSYILLHEEDPRSLGRELVFEFMKNKLENDNLVGFFNISHALPILIEIMKKRGINVDEYLDSLNLAIVDTFGSLYGPRIERRGVWYLSGSLSYELLSRKYAEVVRAHKELWKKENMFEGRELWGVAMDLSEYSNIFGEANALSYFEVSAEIRRRHRAYREYPTGTNIWVFSGKPDRVFSSLYRRVDYVVRTRSELTEEGVKRYMCILKAPGVSDVISFEYSFTRNGIEMKRTD

SEQ ID NO: 766 - protein, 337 aa, Thermococcus kodakaraensis KOD1
  misc_feature (414542)..(414542): n is a or c or g or t.
  misc_feature (786890)..(786890): n is a or c or g or t.
  misc_feature (786907)..(786907): n is a or c or g or t.
  misc_feature (786944)..(786946): n is a or c or g or t.
  misc_feature (839139)..(839139): n is a or c or g or t.
  misc_feature (1128488)..(1128488): n is a or c or g or t.
  misc_feature (1128499)..(1128499): n is a or c or g or t.
  misc_feature (1128505)..(1128506): n is a or c or g or t.
  misc_feature (1128517)..(1128518): n is a or c or g or t.
  misc_feature (1128539)..(1128540): n is a or c or g or t.
  misc_feature (1561400)..(1561400): n is a or c or g or t.
  misc_feature (1561477)..(1561477): n is a or c or g or t.
  misc_feature (1561545)..(1561545): n is a or c or g or t.
  misc_feature (1767941)..(1767941): n is a or c or g or t.
VVLMLTYAQAGVDDEKTSRALKSIISLAKGTFEFRRGKLGEPAEDLGHYAALMDFGDFYLAITTDGVGTKVLVAEAVGKFDTIGIDMIAMNVNDLLCVGAEPVALVDYLAVKEPDERVFEGIAQGLYEGARQAGIAIVGGETAVMPDLINGFDLAGTAIGVVEKRKVITGKKIRPGDAVIGIKSSGIHSNGLTLARKLLIPKYGLDYEYEGKKLWEWLLEPTRIYVKAVLELIENVKVHGLAHITGGGLLNLKRLTSFGFSIEMPPIEGIFRLIYENGVPLEEMFRVFNMGVGMVAVVPREEKEEALQLLNRHFESFELGKVVGEPGIRVENYGIKL

SEQ ID NO: 767 - protein, 211 aa, Thermococcus kodakaraensis KOD1
  misc_feature (414542)..(414542): n is a or c or g or t.
  misc_feature (786890)..(786890): n is a or c or g or t.
  misc_feature (786907)..(786907): n is a or c or g or t.
  misc_feature (786944)..(786946): n is a or c or g or t.
  misc_feature (839139)..(839139): n is a or c or g or t.
  misc_feature (1128488)..(1128488): n is a or c or g or t.
  misc_feature (1128499)..(1128499): n is a or c or g or t.
  misc_feature (1128505)..(1128506): n is a or c or g or t.
  misc_feature (1128517)..(1128518): n is a or c or g or t.
  misc_feature (1128539)..(1128540): n is a or c or g or t.
  misc_feature (1561400)..(1561400): n is a or c or g or t.
  misc_feature (1561477)..(1561477): n is a or c or g or t.
  misc_feature (1561545)..(1561545): n is a or c or g or t.
  misc_feature (1767941)..(1767941): n is a or c or g or t.
MVPWMEERWDFDSWAESYDEDVMSDGWIHSDYERVLRLVAERAKGVVVDVGCGTGNILRFLRCERYIGVEPSEGMRKAFREKWGFEPIDGHFLEIPLPEGSADTVVSTYAFHHVPDEEKGEAIREMLRVLRPGGILIIADVMFESEDEKRRIGEEDGILEEVLEEYFATLDHLGAIFERLGVYWEAERVNRYVWVVAVEKHSNLLTPDHNP

SEQ ID NO: 768 - protein, 118 aa, Thermococcus kodakaraensis KOD1
  misc_feature (414542)..(414542): n is a or c or g or t.
  misc_feature (786890)..(786890): n is a or c or g or t.
  misc_feature (786907)..(786907): n is a or c or g or t.
  misc_feature (786944)..(786946): n is a or c or g or t.
  misc_feature (839139)..(839139): n is a or c or g or t.
  misc_feature (1128488)..(1128488): n is a or c or g or t.
  misc_feature (1128499)..(1128499): n is a or c or g or t.
  misc_feature (1128505)..(1128506): n is a or c or g or t.
  misc_feature (1128517)..(1128518): n is a or c or g or t.
  misc_feature (1128539)..(1128540): n is a or c or g or t.
  misc_feature (1561400)..(1561400): n is a or c or g or t.
  misc_feature (1561477)..(1561477): n is a or c or g or t.
  misc_feature (1561545)..(1561545): n is a or c or g or t.
  misc_feature (1767941)..(1767941): n is a or c or g or t.
VGGSNCVVIMGKNSFNSGILTLLVVIMIILAFVPAYFIGYLYFGLVVVYLAILYVVERRGHRKLSMVISYLFGLVVVYLVMKKAEKWDVRLFTLVAVLGALSLIRRVKNEGSTNPDAG

SEQ ID NO: 769 - protein, 147 aa, Thermococcus kodakaraensis KOD1
  misc_feature (414542)..(414542): n is a or c or g or t.
  misc_feature (786890)..(786890): n is a or c or g or t.
  misc_feature (786907)..(786907): n is a or c or g or t.
  misc_feature (786944)..(786946): n is a or c or g or t.
  misc_feature (839139)..(839139): n is a or c or g or t.
  misc_feature (1128488)..(1128488): n is a or c or g or t.
  misc_feature (1128499)..(1128499): n is a or c or g or t.
  misc_feature (1128505)..(1128506): n is a or c or g or t.
  misc_feature (1128517)..(1128518): n is a or c or g or t.
  misc_feature (1128539)..(1128540): n is a or c or g or t.
  misc_feature (1561400)..(1561400): n is a or c or g or t.
  misc_feature (1561477)..(1561477): n is a or c or g or t.
  misc_feature (1561545)..(1561545): n is a or c or g or t.
  misc_feature (1767941)..(1767941): n is a or c or g or t.
MWPSAKFIDGRVAFSRMPAERELDEVARDFDAVVVLVEDYELPYSLDEWEKRGVEVLHGPIPDFTAPSVEQLLEILRWIEERVREGKKVLIHCMGGLGRSGTVGVAWLMYSRGLSLREALMEVRRKRPGAVETQEQMEVLKELEERI

SEQ ID NO: 770 - protein, 177 aa, Thermococcus kodakaraensis KOD1
  misc_feature (414542)..(414542): n is a or c or g or t.
  misc_feature (786890)..(786890): n is a or c or g or t.
  misc_feature (786907)..(786907): n is a or c or g or t.
  misc_feature (786944)..(786946): n is a or c or g or t.
  misc_feature (839139)..(839139): n is a or c or g or t.
  misc_feature (1128488)..(1128488): n is a or c or g or t.
  misc_feature (1128499)..(1128499): n is a or c or g or t.
  misc_feature (1128505)..(1128506): n is a or c or g or t.
  misc_feature (1128517)..(1128518): n is a or c or g or t.
  misc_feature (1128539)..(1128540): n is a or c or g or t.
  misc_feature (1561400)..(1561400): n is a or c or g or t.
  misc_feature (1561477)..(1561477): n is a or c or g or t.
  misc_feature (1561545)..(1561545): n is a or c or g or t.
  misc_feature (1767941)..(1767941): n is a or c or g or t.
MRRTTKETDIEVELDVEGTVETGDPVLNHLLMALFHYMGRNARVKANYDLRHHLWEDVGITLGLELREKLPGKFARFGSAVMPMDDALILVALDISGRPYLNLELFPLEEEEGFSVTLVREFLWGLARSLRATIHVKQLGGVNAHHIIEAAFKGLGIALAQAIAESERLESTKGVLE

SEQ ID NO: 771 - protein, 233 aa, Thermococcus kodakaraensis KOD1
  misc_feature (414542)..(414542): n is a or c or g or t.
  misc_feature (786890)..(786890): n is a or c or g or t.
  misc_feature (786907)..(786907): n is a or c or g or t.
  misc_feature (786944)..(786946): n is a or c or g or t.
  misc_feature (839139)..(839139): n is a or c or g or t.
  misc_feature (1128488)..(1128488): n is a or c or g or t.
  misc_feature (1128499)..(1128499): n is a or c or g or t.
  misc_feature (1128505)..(1128506): n is a or c or g or t.
  misc_feature (1128517)..(1128518): n is a or c or g or t.
  misc_feature (1128539)..(1128540): n is a or c or g or t.
  misc_feature (1561400)..(1561400): n is a or c or g or t.
  misc_feature (1561477)..(1561477): n is a or c or g or t.
  misc_feature (1561545)..(1561545): n is a or c or g or t.
  misc_feature (1767941)..(1767941): n is a or c or g or t.
MEVYPAIDLMKGRAVRLYRGRRESVKVYGDPVKIAQGFSELVDKIHVVDLDGAFEGRPRNLEVVERIIEETGLRVQVGGGFRTYEAVGRAYEVGVENVILGTKALDTAFLERLTDEFGGITVSLDVKDGRIAVKGWVEEGSIKVRDAFEILRNYVNRFVYTSIERDGTLTGVDEIGRFWGDEEFIYAGGVSSAEDIVRLAERGFSGVIVGKALYEGVVKLEDLLEVAKCLRRG

SEQ ID NO: 772 - protein, 228 aa, Thermococcus kodakaraensis KOD1
  misc_feature (414542)..(414542): n is a or c or g or t.
  misc_feature (786890)..(786890): n is a or c or g or t.
  misc_feature (786907)..(786907): n is a or c or g or t.
  misc_feature (786944)..(786946): n is a or c or g or t.
  misc_feature (839139)..(839139): n is a or c or g or t.
  misc_feature (1128488)..(1128488): n is a or c or g or t.
  misc_feature (1128499)..(1128499): n is a or c or g or t.
  misc_feature (1128505)..(1128506): n is a or c or g or t.
  misc_feature (1128517)..(1128518): n is a or c or g or t.
  misc_feature (1128539)..(1128540): n is a or c or g or t.
  misc_feature (1561400)..(1561400): n is a or c or g or t.
  misc_feature (1561477)..(1561477): n is a or c or g or t.
  misc_feature (1561545)..(1561545): n is a or c or g or t.
  misc_feature (1767941)..(1767941): n is a or c or g or t.
VMVFGLSRAIRKAEKNAIIAELKVYSPKYGDLLKGRNPFEILRAYERAGAVGISYITDPKYFRGSFEFLRKLCRETELPVLRKDFIASKEEVERTAEAGASAVLLITRLLKEELPEFVDFAKEHGLDTLVEVHSEEELAIALQTDSTMIGINNRDIGKLELDDGNVSLTEKLAPLIPKRYVKVSESGIAGTEDLKRALRHADAALIGTALMKTPDPEEFLRKLVEVEV

SEQ ID NO: 773 - protein, 192 aa, Thermococcus kodakaraensis KOD1
  misc_feature (414542)..(414542): n is a or c or g or t.
  misc_feature (786890)..(786890): n is a or c or g or t.
  misc_feature (786907)..(786907): n is a or c or g or t.
  misc_feature (786944)..(786946): n is a or c or g or t.
  misc_feature (839139)..(839139): n is a or c or g or t.
  misc_feature (1128488)..(1128488): n is a or c or g or t.
  misc_feature (1128499)..(1128499): n is a or c or g or t.
  misc_feature (1128505)..(1128506): n is a or c or g or t.
  misc_feature (1128517)..(1128518): n is a or c or g or t.
  misc_feature (1128539)..(1128540): n is a or c or g or t.
  misc_feature (1561400)..(1561400): n is a or c or g or t.
  misc_feature (1561477)..(1561477): n is a or c or g or t.
  misc_feature (1561545)..(1561545): n is a or c or g or t.
  misc_feature (1767941)..(1767941): n is a or c or g or t.
MIVLVNNRDSFVWNLAEYASLFDRVKVVPNTITVGELRRLDPDGVIISPGPGHPLERREVGNSPEIVLEAGVPILGVCLGHQIIATAFGGKVGRVKPRHGKASPVKHDGKGVLRGIKNPLTAGRYHSLAVLEVPREFDVSAVSLDDNVVMGIRHRKLPIEGLQFHPESVLTEWERKEGLRIIKNFVEMSRNG

SEQ ID NO: 774 - protein, 251 aa, Thermococcus kodakaraensis KOD1
  misc_feature (414542)..(414542): n is a or c or g or t.
  misc_feature (786890)..(786890): n is a or c or g or t.
  misc_feature (786907)..(786907): n is a or c or g or t.
  misc_feature (786944)..(786946): n is a or c or g or t.
  misc_feature (839139)..(839139): n is a or c or g or t.
  misc_feature (1128488)..(1128488): n is a or c or g or t.
  misc_feature (1128499)..(1128499): n is a or c or g or t.
  misc_feature (1128505)..(1128506): n is a or c or g or t.
  misc_feature (1128517)..(1128518): n is a or c or g or t.
  misc_feature (1128539)..(1128540): n is a or c or g or t.
  misc_feature (1561400)..(1561400): n is a or c or g or t.
  misc_feature (1561477)..(1561477): n is a or c or g or t.
  misc_feature (1561545)..(1561545): n is a or c or g or t.
  misc_feature (1767941)..(1767941): n is a or c or g or t.
MFEKGSLIPYLTAGDPSVEKTLEFLLAVEEFAGLIELGIPFSDPMADGKTIQESHYRALRNGFKLDDTFRILREFRRHSSTPVILMTYYNPVFRTGVKKFLGEAKASGADGILVVDLPVSHAGEFLDAAKEEGLKTVFLAAPNTPDERLREIDKASTGFVYLISLYGTTGARDRLPETAFEFVRRARKICNNKLAVGFGVSRREQVEELLKAGADGVVVGSALIELISRSENPVEELRRKVAELSGYSRAL

SEQ ID NO: 775 - protein, 103 aa, Thermococcus kodakaraensis KOD1
  misc_feature (414542)..(414542): n is a or c or g or t.
  misc_feature (786890)..(786890): n is a or c or g or t.
  misc_feature (786907)..(786907): n is a or c or g or t.
  misc_feature (786944)..(786946): n is a or c or g or t.
  misc_feature (839139)..(839139): n is a or c or g or t.
  misc_feature (1128488)..(1128488): n is a or c or g or t.
  misc_feature (1128499)..(1128499): n is a or c or g or t.
  misc_feature (1128505)..(1128506): n is a or c or g or t.
  misc_feature (1128517)..(1128518): n is a or c or g or t.
  misc_feature (1128539)..(1128540): n is a or c or g or t.
  misc_feature (1561400)..(1561400): n is a or c or g or t.
  misc_feature (1561477)..(1561477): n is a or c or g or t.
  misc_feature (1561545)..(1561545): n is a or c or g or t.
  misc_feature (1767941)..(1767941): n is a or c or g or t.
MRIAVIGAGMIGGAVARALAEKGHEVIATRRNVEKAKWLGEYGVKVIRNNLEAADWAEVVFLAVKPNKVAKVLGEIREALNGKILVSLAAEVPIKALKGLAPG

SEQ ID NO: 776 - protein, 339 aa, Thermococcus kodakaraensis KOD1
  misc_feature (414542)..(414542): n is a or c or g or t.
  misc_feature (786890)..(786890): n is a or c or g or t.
  misc_feature (786907)..(786907): n is a or c or g or t.
  misc_feature (786944)..(786946): n is a or c or g or t.
  misc_feature (839139)..(839139): n is a or c or g or t.
  misc_feature (1128488)..(1128488): n is a or c or g or t.
  misc_feature (1128499)..(1128499): n is a or c or g or t.
  misc_feature (1128505)..(1128506): n is a or c or g or t.
  misc_feature (1128517)..(1128518): n is a or c or g or t.
  misc_feature (1128539)..(1128540): n is a or c or g or t.
  misc_feature (1561400)..(1561400): n is a or c or g or t.
  misc_feature (1561477)..(1561477): n is a or c or g or t.
  misc_feature (1561545)..(1561545): n is a or c or g or t.
  misc_feature (1767941)..(1767941): n is a or c or g or t.
MRFYREAAEMLGLPDVEVGGFRRAFELIKLKAPRRLVVVIDEFSYLLLADKNTPAVFQAIIDEKLDDRFFLILGGSLLGLMEGLMGYTNPLYGRRTAQLKLKPLGFFHVAEYFRDKPVETVVKIYSVTGGVPMYFRLFRGDDFGRELLETAFSSTSILYEEPEFILREELREVHRYYIILEAMASGKHRLSEIAHWAGIEAKDMPKYLRTLISLDLVRREVPVTESERSRKARYYLKDRFFEFWFRFVKPNRGRVEIGTFEMDWEAFNTYVGKAFEEISRQFLLELNKTNGLPFRFTKIGRWWHKKEEVDLVALNEREKKALFIEVKWKELGKGKRREF

SEQ ID NO: 777 - protein, 231 aa, Thermococcus kodakaraensis KOD1
  misc_feature (414542)..(414542): n is a or c or g or t.
  misc_feature (786890)..(786890): n is a or c or g or t.
  misc_feature (786907)..(786907): n is a or c or g or t.
  misc_feature (786944)..(786946): n is a or c or g or t.
  misc_feature (839139)..(839139): n is a or c or g or t.
  misc_feature (1128488)..(1128488): n is a or c or g or t.
  misc_feature (1128499)..(1128499): n is a or c or g or t.
  misc_feature (1128505)..(1128506): n is a or c or g or t.
  misc_feature (1128517)..(1128518): n is a or c or g or t.
  misc_feature (1128539)..(1128540): n is a or c or g or t.
  misc_feature (1561400)..(1561400): n is a or c or g or t.
  misc_feature (1561477)..(1561477): n is a or c or g or t.
  misc_feature (1561545)..(1561545): n is a or c or g or t.
  misc_feature (1767941)..(1767941): n is a or c or g or t.
MRWEDWKPFYLRIVREMGYSIEEDRKAAQILRALLLEGDEYILRDELEAIVEKKAYVFGAGPSLEKALKEFDFSDGTLIAADGATSALLENDLVPDIIVTDLDGRIPDLRIANDRGSFMVVHAHGDNVDKMTSYVPLFSRVLGTTQTEPLDIVYNFGGFTDGDRAAFLAEELGAREVVLVGFDFGNVVGRWSKPHLKEHSPVWESKRKKFEFAKELLEWLEKNGRARLVYL

SEQ ID NO: 778 - protein, 27 aa, Thermococcus kodakaraensis KOD1
  misc_feature (414542)..(414542): n is a or c or g or t.
  misc_feature (786890)..(786890): n is a or c or g or t.
  misc_feature (786907)..(786907): n is a or c or g or t.
  misc_feature (786944)..(786946): n is a or c or g or t.
  misc_feature (839139)..(839139): n is a or c or g or t.
  misc_feature (1128488)..(1128488): n is a or c or g or t.
  misc_feature (1128499)..(1128499): n is a or c or g or t.
  misc_feature (1128505)..(1128506): n is a or c or g or t.
  misc_feature (1128517)..(1128518): n is a or c or g or t.
  misc_feature (1128539)..(1128540): n is a or c or g or t.
  misc_feature (1561400)..(1561400): n is a or c or g or t.
  misc_feature (1561477)..(1561477): n is a or c or g or t.
  misc_feature (1561545)..(1561545): n is a or c or g or t.
  misc_feature (1767941)..(1767941): n is a or c or g or t.
VMSMAGAGEVARKVPGKLGRGEGETVR

SEQ ID NO: 779 - protein, 406 aa, Thermococcus kodakaraensis KOD1
  misc_feature (414542)..(414542): n is a or c or g or t.
  misc_feature (786890)..(786890): n is a or c or g or t.
  misc_feature (786907)..(786907): n is a or c or g or t.
  misc_feature (786944)..(786946): n is a or c or g or t.
  misc_feature (839139)..(839139): n is a or c or g or t.
  misc_feature (1128488)..(1128488): n is a or c or g or t.
  misc_feature (1128499)..(1128499): n is a or c or g or t.
  misc_feature (1128505)..(1128506): n is a or c or g or t.
  misc_feature (1128517)..(1128518): n is a or c or g or t.
  misc_feature (1128539)..(1128540): n is a or c or g or t.
  misc_feature (1561400)..(1561400): n is a or c or g or t.
  misc_feature (1561477)..(1561477): n is a or c or g or t.
  misc_feature (1561545)..(1561545): n is a or c or g or t.
  misc_feature (1767941)..(1767941): n is a or c or g or t.
MSFRELGLSSASVEAVERKGFSIPTDIQREVIPLLLSAESDIVGQSKTGSGKTAAFGLPILDSIDESIREVQALILTPTRELAIQVTDELRSLRGKRRIYVYSVYGGQPIGPQIRALEGGVHIVVGTPGRVLDHINRGTLNLDGVRFFVLDEADRMLDMGFQEDIEAIFRATPKEKRVLMFSATMPMDVLLLAKKYMRNPEVVIVSRDELVPGEVEQEYIEAVPHRRFDLLTKILSDESNEFYGIVFCQTKAETRELSMRLRAAGFRAEALNGDMSQPAREKTFNRFKARKTKILVATDVAARGLDVPEITHVINYSIPMNPEQYIHRIGRTGRMGKKGKAITFIAPGELRRFRYITKQAGVEVKKSELSEGIPKEYRERLRQEELEGEYRGRWGSMKPRQRRRRY

SEQ ID NO: 780 - protein, 102 aa, Thermococcus kodakaraensis KOD1
  misc_feature (414542)..(414542): n is a or c or g or t.
  misc_feature (786890)..(786890): n is a or c or g or t.
  misc_feature (786907)..(786907): n is a or c or g or t.
  misc_feature (786944)..(786946): n is a or c or g or t.
  misc_feature (839139)..(839139): n is a or c or g or t.
  misc_feature (1128488)..(1128488): n is a or c or g or t.
  misc_feature (1128499)..(1128499): n is a or c or g or t.
  misc_feature (1128505)..(1128506): n is a or c or g or t.
  misc_feature (1128517)..(1128518): n is a or c or g or t.
  misc_feature (1128539)..(1128540): n is a or c or g or t.
  misc_feature (1561400)..(1561400): n is a or c or g or t.
  misc_feature (1561477)..(1561477): n is a or c or g or t.
  misc_feature (1561545)..(1561545): n is a or c or g or t.
  misc_feature (1767941)..(1767941): n is a or c or g or t.
VRGMVEIPEVEELKALLNELGEEGLLERLDAFVRMNGGLESKRGEDFIKVSILGFAEGLLTVLKEKYDEPRVKELYEKIKAKRAELDEQFRKPRIPYLEEEG

SEQ ID NO: 781 - protein, 74 aa, Thermococcus kodakaraensis KOD1
  misc_feature (414542)..(414542): n is a or c or g or t.
  misc_feature (786890)..(786890): n is a or c or g or t.
  misc_feature (786907)..(786907): n is a or c or g or t.
  misc_feature (786944)..(786946): n is a or c or g or t.
  misc_feature (839139)..(839139): n is a or c or g or t.
  misc_feature (1128488)..(1128488): n is a or c or g or t.
  misc_feature (1128499)..(1128499): n is a or c or g or t.
  misc_feature (1128505)..(1128506): n is a or c or g or t.
  misc_feature (1128517)..(1128518): n is a or c or g or t.
  misc_feature (1128539)..(1128540): n is a or c or g or t.
  misc_feature (1561400)..(1561400): n is a or c or g or t.
  misc_feature (1561477)..(1561477): n is a or c or g or t.
  misc_feature (1561545)..(1561545): n is a or c or g or t.
  misc_feature (1767941)..(1767941): n is a or c or g or t.
VHVKYDLQHPYTNYKITHRIGRGGLTSAGRSAGYISHHYNIPDRDGIESVTNVVDPTTDNLVEQDIASAGWLCI

SEQ ID NO: 782 - protein, 175 aa, Thermococcus kodakaraensis KOD1
  misc_feature (414542)..(414542): n is a or c or g or t.
  misc_feature (786890)..(786890): n is a or c or g or t.
  misc_feature (786907)..(786907): n is a or c or g or t.
  misc_feature (786944)..(786946): n is a or c or g or t.
  misc_feature (839139)..(839139): n is a or c or g or t.
  misc_feature (1128488)..(1128488): n is a or c or g or t.
  misc_feature (1128499)..(1128499): n is a or c or g or t.
  misc_feature (1128505)..(1128506): n is a or c or g or t.
  misc_feature (1128517)..(1128518): n is a or c or g or t.
  misc_feature (1128539)..(1128540): n is a or c or g or t.
  misc_feature (1561400)..(1561400): n is a or c or g or t.
  misc_feature (1561477)..(1561477): n is a or c or g or t.
  misc_feature (1561545)..(1561545): n is a or c or g or t.
  misc_feature (1767941)..(1767941): n is a or c or g or t.
VGDCRPNSDLPPLVGSHQKEGCRMRFWAALLAAMLMLTVGSLWVYSSYEGRIGSAGPAFLTTSKDGNRTDMSQVTIYTPTSSLVNVSCNGNGIVEVYDIITGKLVDRHTVYGHARYQIVLPREGDYLVINNHTDEVSCSFRFVKNYPTREVQNALYVSGSIFALLLALIIWRWGR

SEQ ID NO: 783 - protein, 147 aa, Thermococcus kodakaraensis KOD1
  misc_feature (414542)..(414542): n is a or c or g or t.
  misc_feature (786890)..(786890): n is a or c or g or t.
  misc_feature (786907)..(786907): n is a or c or g or t.
  misc_feature (786944)..(786946): n is a or c or g or t.
  misc_feature (839139)..(839139): n is a or c or g or t.
  misc_feature (1128488)..(1128488): n is a or c or g or t.
  misc_feature (1128499)..(1128499): n is a or c or g or t.
  misc_feature (1128505)..(1128506): n is a or c or g or t.
  misc_feature (1128517)..(1128518): n is a or c or g or t.
  misc_feature (1128539)..(1128540): n is a or c or g or t.
  misc_feature (1561400)..(1561400): n is a or c or g or t.
  misc_feature (1561477)..(1561477): n is a or c or g or t.
  misc_feature (1561545)..(1561545): n is a or c or g or t.
  misc_feature (1767941)..(1767941): n is a or c or g or t.
VVLMVERSKVRVLIAKPGLDGHDRGAKVIARALRDAGFEVIYTGIRQTPEQIVESVIQEDVDVLGISILSGAHMVLIPKILKLLEERGIKPNEDILVLAGGIIPPDDAEQLEKMGVAKVFGPGSPISEIIKFIDENVPKLKKFRENA

SEQ ID NO: 784 - protein, 132 aa, Thermococcus kodakaraensis KOD1
  misc_feature (414542)..(414542): n is a or c or g or t.
  misc_feature (786890)..(786890): n is a or c or g or t.
  misc_feature (786907)..(786907): n is a or c or g or t.
  misc_feature (786944)..(786946): n is a or c or g or t.
  misc_feature (839139)..(839139): n is a or c or g or t.
  misc_feature (1128488)..(1128488): n is a or c or g or t.
  misc_feature (1128499)..(1128499): n is a or c or g or t.
  misc_feature (1128505)..(1128506): n is a or c or g or t.
  misc_feature (1128517)..(1128518): n is a or c or g or t.
  misc_feature (1128539)..(1128540): n is a or c or g or t.
  misc_feature (1561400)..(1561400): n is a or c or g or t.
  misc_feature (1561477)..(1561477): n is a or c or g or t.
  misc_feature (1561545)..(1561545): n is a or c or g or t.
  misc_feature (1767941)..(1767941): n is a or c or g or t.
MIKKIDHVGIAVKNLEEAIKVWEGLGLKVDEIEEVPDQKVRTAIIHVGESRIELLEATSEDSPIAKFIEKRGEGIHHIALGVDNIEEHLEKLKEAGYRLIDEKPRIGAGGAKIAFVHPKSVTGVLLELCQRD

SEQ ID NO: 785 - protein, 83 aa, Thermococcus kodakaraensis KOD1
  misc_feature (414542)..(414542): n is a or c or g or t.
  misc_feature (786890)..(786890): n is a or c or g or t.
  misc_feature (786907)..(786907): n is a or c or g or t.
  misc_feature (786944)..(786946): n is a or c or g or t.
  misc_feature (839139)..(839139): n is a or c or g or t.
  misc_feature (1128488)..(1128488): n is a or c or g or t.
  misc_feature (1128499)..(1128499): n is a or c or g or t.
  misc_feature (1128505)..(1128506): n is a or c or g or t.
  misc_feature (1128517)..(1128518): n is a or c or g or t.
  misc_feature (1128539)..(1128540): n is a or c or g or t.
  misc_feature (1561400)..(1561400): n is a or c or g or t.
  misc_feature (1561477)..(1561477): n is a or c or g or t.
  misc_feature (1561545)..(1561545): n is a or c or g or t.
  misc_feature (1767941)..(1767941): n is a or c or g or t.
MVARLGYKNKLVEVRNGVVYLFDGKLWSAPLERVVEYYREGQGAIPGPIREIASDLYRVLLGENLVREMLTNSGGRYGETTAS

SEQ ID NO: 786 - protein, 317 aa, Thermococcus kodakaraensis KOD1
  misc_feature (414542)..(414542): n is a or c or g or t.
  misc_feature (786890)..(786890): n is a or c or g or t.
  misc_feature (786907)..(786907): n is a or c or g or t.
  misc_feature (786944)..(786946): n is a or c or g or t.
  misc_feature (839139)..(839139): n is a or c or g or t.
  misc_feature (1128488)..(1128488): n is a or c or g or t.
  misc_feature (1128499)..(1128499): n is a or c or g or t.
  misc_feature (1128505)..(1128506): n is a or c or g or t.
  misc_feature (1128517)..(1128518): n is a or c or g or t.
  misc_feature (1128539)..(1128540): n is a or c or g or t.
  misc_feature (1561400)..(1561400): n is a or c or g or t.
  misc_feature (1561477)..(1561477): n is a or c or g or t.
  misc_feature (1561545)..(1561545): n is a or c or g or t.
  misc_feature (1767941)..(1767941): n is a or c or g or t.
MAYEEGRQEMNPIWNLALKELYVSVKSRRFIVIVVLYFIIFGLAVYSIKDYLVQMGVPSVDSNELGLWGVSAEIYTTPLAMLFTVNMTIITVLGAVLGVALGADAINREVESGTVRVLLGHPVYRDEIINGKFLGMGLLIAVTYMVSYIVMIAVMLILGIPLDGESLFRSFLAILVTMLYTMVFLSLGILLSTLSKKPETSMLAGVGLAIFLTVFYGIVVGIVAPKLAGPEPPIGTSAYQIWADELHVWMNRLHSINPAHHYVQLVSYIFAGDRFFNYYIPLSDSLIYGFNNLAALLVMLLLPFALAYARFLTSDLN

SEQ ID NO: 787 - protein, 75 aa, Thermococcus kodakaraensis KOD1
  misc_feature (414542)..(414542): n is a or c or g or t.
  misc_feature (786890)..(786890): n is a or c or g or t.
  misc_feature (786907)..(786907): n is a or c or g or t.
  misc_feature (786944)..(786946): n is a or c or g or t.
  misc_feature (839139)..(839139): n is a or c or g or t.
  misc_feature (1128488)..(1128488): n is a or c or g or t.
  misc_feature (1128499)..(1128499): n is a or c or g or t.
  misc_feature (1128505)..(1128506): n is a or c or g or t.
  misc_feature (1128517)..(1128518): n is a or c or g or t.
  misc_feature (1128539)..(1128540): n is a or c or g or t.
  misc_feature (1561400)..(1561400): n is a or c or g or t.
  misc_feature (1561477)..(1561477): n is a or c or g or t.
  misc_feature (1561545)..(1561545): n is a or c or g or t.
  misc_feature (1767941)..(1767941): n is a or c or g or t.
VTALRDLISSWYRVLGIFAIHPSVSDEIAHARRNPARTSYIQWCISKTVAKGIRVLIVKSTFPPSLFRYFHMVIM

SEQ ID NO: 788 - protein, 258 aa, Thermococcus kodakaraensis KOD1
  misc_feature (414542)..(414542): n is a or c or g or t.
  misc_feature (786890)..(786890): n is a or c or g or t.
  misc_feature (786907)..(786907): n is a or c or g or t.
  misc_feature (786944)..(786946): n is a or c or g or t.
  misc_feature (839139)..(839139): n is a or c or g or t.
  misc_feature (1128488)..(1128488): n is a or c or g or t.
  misc_feature (1128499)..(1128499): n is a or c or g or t.
  misc_feature (1128505)..(1128506): n is a or c or g or t.
  misc_feature (1128517)..(1128518): n is a or c or g or t.
  misc_feature (1128539)..(1128540): n is a or c or g or t.
  misc_feature (1561400)..(1561400): n is a or c or g or t.
  misc_feature (1561477)..(1561477): n is a or c or g or t.
  misc_feature (1561545)..(1561545): n is a or c or g or t.
  misc_feature (1767941)..(1767941): n is a or c or g or t.
MYFFLSQRFNSSISELPKVKDMYGWRGRLGLIVPSSNTTMEMELHNYLPEGVSLHTSRMPLRNVTEEELVKMSSLAVESAKLLRDADVELILYGCTSGSFIGGKDYEKELEAKIEDEVKVPVISTSTAVIEALKILDAQSILVITPYTDEINAREKEFLEANEFEVLDIRGLGIEDNLKIGRLEPYEAYRLAKASFIDEADAIFISCTNWRTFEIIEALEEDLGVPVVTSNQASLWLALREMDIMEKIPELGRLFTEY

SEQ ID NO: 789 - protein, 80 aa, Thermococcus kodakaraensis KOD1
  misc_feature (414542)..(414542): n is a or c or g or t.
  misc_feature (786890)..(786890): n is a or c or g or t.
  misc_feature (786907)..(786907): n is a or c or g or t.
  misc_feature (786944)..(786946): n is a or c or g or t.
  misc_feature (839139)..(839139): n is a or c or g or t.
  misc_feature (1128488)..(1128488): n is a or c or g or t.
  misc_feature (1128499)..(1128499): n is a or c or g or t.
  misc_feature (1128505)..(1128506): n is a or c or g or t.
  misc_feature (1128517)..(1128518): n is a or c or g or t.
  misc_feature (1128539)..(1128540): n is a or c or g or t.
  misc_feature (1561400)..(1561400): n is a or c or g or t.
  misc_feature (1561477)..(1561477): n is a or c or g or t.
  misc_feature (1561545)..(1561545): n is a or c or g or t.
  misc_feature (1767941)..(1767941): n is a or c or g or t.
MVRELLEKARGLSMFTAYNTNVDAIVYLNGETVQRLIDEFGAEAVKRRMEEYPREINEPWTSSRGLFTHLRQENRWQCPS

SEQ ID NO: 790 - protein, 382 aa, Thermococcus kodakaraensis KOD1
  misc_feature (414542)..(414542): n is a or c or g or t.
  misc_feature (786890)..(786890): n is a or c or g or t.
  misc_feature (786907)..(786907): n is a or c or g or t.
  misc_feature (786944)..(786946): n is a or c or g or t.
  misc_feature (839139)..(839139): n is a or c or g or t.
  misc_feature (1128488)..(1128488): n is a or c or g or t.
  misc_feature (1128499)..(1128499): n is a or c or g or t.
  misc_feature (1128505)..(1128506): n is a or c or g or t.
  misc_feature (1128517)..(1128518): n is a or c or g or t.
  misc_feature (1128539)..(1128540): n is a or c or g or t.
  misc_feature (1561400)..(1561400): n is a or c or g or t.
  misc_feature (1561477)..(1561477): n is a or c or g or t.
  misc_feature (1561545)..(1561545): n is a or c or g or t.
  misc_feature (1767941)..(1767941): n is a or c or g or t.
VMRNVADLPLHGGHVPQWLARRMGKLTRLVLKLAVEEYGTRGLLERLSDPVWFQAFNNVIGMDWDSSGSTTVTAGMIKEALWKEELGVKVAGGKGKKSRATPEELKRIASLYDLDPEPYVRTSRLVAKVDTVALQTGYQLYHHVFLLDEEGNWAVIQQGMNKRERMARRFHWFNSETFTLNPHKAIAGLEKEFALNTVSREAKEYQKTLLDVVQESPMKIERELESLKAIANGYRPLVYYKPREPWEKDVIKRYESLGKFELNKRALEFARELSVSNYEEFLLLKGLGPSTLRALSLVLELVYDVHPSWKDPVTHPPDPFKFTYAVGGKDKIPFPIDKPAYDELISFLEELVSKHPKEKALVRNVTKITKNWKFPKWEKRPT

SEQ ID NO: 791 - protein, 712 aa, Thermococcus kodakaraensis KOD1
  misc_feature (414542)..(414542): n is a or c or g or t.
  misc_feature (786890)..(786890): n is a or c or g or t.
  misc_feature (786907)..(786907): n is a or c or g or t.
  misc_feature (786944)..(786946): n is a or c or g or t.
  misc_feature (839139)..(839139): n is a or c or g or t.
  misc_feature (1128488)..(1128488): n is a or c or g or t.
  misc_feature (1128499)..(1128499): n is a or c or g or t.
  misc_feature (1128505)..(1128506): n is a or c or g or t.
  misc_feature (1128517)..(1128518): n is a or c or g or t.
  misc_feature (1128539)..(1128540): n is a or c or g or t.
  misc_feature (1561400)..(1561400): n is a or c or g or t.
  misc_feature (1561477)..(1561477): n is a or c or g or t.
  misc_feature (1561545)..(1561545): n is a or c or g or t.
  misc_feature (1767941)..(1767941): n is a or c or g or t.
MRLFFSLFEQKGGEEEEQERKTCNRKKRLSGLLLLLIFTTSIYAQPALAFDFGSWWNGVKERASNTGKMVVSTVVGVVVGGACMAGTMGFGTGACVAMGMAAAGLTYSALELAFGGSRGGDSDSGATITYERQANGTTVKNDDDELNKVIDDANQQTYEGIAELTAKLRSDLVRYDTKEDGATGDLWIEIYAPSKIYGFSAFPVQAKLYTKESNIPFNVIHLRSVEIYLQKENSSVPLWKRVWDYGTGSEGLNGQSVVYSTILKVPDDWVYQVQNAIQTGQVTRDLIEQIFSANTSTWEIFVKVDAYREVWQNDPQYTDQSSCTAQPNHKWDSNTSTCYVFVRNDDIKYTAYTTSAWRHVSMAHDIADLADGFYASLPVKFLNTEASTKWALYQEKYAGALSNFIILTFATPVHVIGSTADYKFYIVPNPGYFEPLNPSFNDDFRFVAVREYKDLSWTVADSIFGNLGTMSPDTPTQKLLTAHYTEDLSTLTYKVYGLAYFTITRDDNITIPLWLVVNPKVSVIPNTRTVLADNQIDQLVQFTDDGKLEASEINQTKAIAASLINGLQEKITAAEDLKKKADAEGNEKASLYAEKAIQAYQDAIEALNKITQTDAVQEYLNWLNVAKKLEQAGDFYMSAAEKALYGEYEQAELDAQKGDELSQLADEYKPHIDILTTAKSMLSKKILGIPLWALLAIVFVLVGAFVVWRKLL

SEQ ID NO: 792 - protein, 158 aa, Thermococcus kodakaraensis KOD1
  misc_feature (414542)..(414542): n is a or c or g or t.
  misc_feature (786890)..(786890): n is a or c or g or t.
  misc_feature (786907)..(786907): n is a or c or g or t.
  misc_feature (786944)..(786946): n is a or c or g or t.
  misc_feature (839139)..(839139): n is a or c or g or t.
  misc_feature (1128488)..(1128488): n is a or c or g or t.
  misc_feature (1128499)..(1128499): n is a or c or g or t.
  misc_feature (1128505)..(1128506): n is a or c or g or t.
  misc_feature (1128517)..(1128518): n is a or c or g or t.
  misc_feature (1128539)..(1128540): n is a or c or g or t.
  misc_feature (1561400)..(1561400): n is a or c or g or t.
  misc_feature (1561477)..(1561477): n is a or c or g or t.
  misc_feature (1561545)..(1561545): n is a or c or g or t.
  misc_feature (1767941)..(1767941): n is a or c or g or t.
VRRMKFMGMKSYIHILYMIVVLAAVVSTAGCIGWGGGGIIIGFGNETYTIPLNTSNSTNSTIPTSELTIHRYEELVYVGGNLTIQELNLTIRPDYDPNKGKFFFIFPDTIYWEPMNVTINNITIIGTGYFTGTTYYIANITILSPEKLTVIVNNPEGQ

SEQ ID NO: 793 - protein, 141 aa, Thermococcus kodakaraensis KOD1
  misc_feature (414542)..(414542): n is a or c or g or t.
  misc_feature (786890)..(786890): n is a or c or g or t.
  misc_feature (786907)..(786907): n is a or c or g or t.
  misc_feature (786944)..(786946): n is a or c or g or t.
  misc_feature (839139)..(839139): n is a or c or g or t.
  misc_feature (1128488)..(1128488): n is a or c or g or t.
  misc_feature (1128499)..(1128499): n is a or c or g or t.
  misc_feature (1128505)..(1128506): n is a or c or g or t.
  misc_feature (1128517)..(1128518): n is a or c or g or t.
  misc_feature (1128539)..(1128540): n is a or c or g or t.
  misc_feature (1561400)..(1561400): n is a or c or g or t.
  misc_feature (1561477)..(1561477): n is a or c or g or t.
  misc_feature (1561545)..(1561545): n is a or c or g or t.
  misc_feature (1767941)..(1767941): n is a or c or g or t.
MKETKEPLAKFQARVNKDNRVTIPRPILEAFGLKQNDYVKVLIRKIEISDKTVTVIAQALLAVKIGKYGAITLPKKLVKEFELRENEPVEVIILDYYKFEELVSEKGKELLSKLQSRNNYWILPADSQYLSEIGIKYKYLF

SEQ ID NO: 794 - protein, 28 aa, Thermococcus kodakaraensis KOD1
  misc_feature (414542)..(414542): n is a or c or g or t.
  misc_feature (786890)..(786890): n is a or c or g or t.
  misc_feature (786907)..(786907): n is a or c or g or t.
  misc_feature (786944)..(786946): n is a or c or g or t.
  misc_feature (839139)..(839139): n is a or c or g or t.
  misc_feature (1128488)..(1128488): n is a or c or g or t.
  misc_feature (1128499)..(1128499): n is a or c or g or t.
  misc_feature (1128505)..(1128506): n is a or c or g or t.
  misc_feature (1128517)..(1128518): n is a or c or g or t.
  misc_feature (1128539)..(1128540): n is a or c or g or t.
  misc_feature (1561400)..(1561400): n is a or c or g or t.
  misc_feature (1561477)..(1561477): n is a or c or g or t.
  misc_feature (1561545)..(1561545): n is a or c or g or t.
  misc_feature (1767941)..(1767941): n is a or c or g or t.
MAFEKANKRNPKEVEDTVKRALAIAGLI

SEQ ID NO: 795 - protein, 41 aa, Thermococcus kodakaraensis KOD1
  misc_feature (414542)..(414542): n is a or c or g or t.
  misc_feature (786890)..(786890): n is a or c or g or t.
  misc_feature (786907)..(786907): n is a or c or g or t.
  misc_feature (786944)..(786946): n is a or c or g or t.
  misc_feature (839139)..(839139): n is a or c or g or t.
  misc_feature (1128488)..(1128488): n is a or c or g or t.
  misc_feature (1128499)..(1128499): n is a or c or g or t.
  misc_feature (1128505)..(1128506): n is a or c or g or t.
  misc_feature (1128517)..(1128518): n is a or c or g or t.
  misc_feature (1128539)..(1128540): n is a or c or g or t.
  misc_feature (1561400)..(1561400): n is a or c or g or t.
  misc_feature (1561477)..(1561477): n is a or c or g or t.
  misc_feature (1561545)..(1561545): n is a or c or g or t.
  misc_feature (1767941)..(1767941): n is a or c or g or t.
MGMLSLFGFREYYNYKNAALIIVNMEDIPRLAKALKEREGR

SEQ ID NO: 796 - protein, 188 aa, Thermococcus kodakaraensis KOD1
  misc_feature (414542)..(414542): n is a or c or g or t.
  misc_feature (786890)..(786890): n is a or c or g or t.
  misc_feature (786907)..(786907): n is a or c or g or t.
  misc_feature (786944)..(786946): n is a or c or g or t.
  misc_feature (839139)..(839139): n is a or c or g or t.
  misc_feature (1128488)..(1128488): n is a or c or g or t.
  misc_feature (1128499)..(1128499): n is a or c or g or t.
  misc_feature (1128505)..(1128506): n is a or c or g or t.
  misc_feature (1128517)..(1128518): n is a or c or g or t.
  misc_feature (1128539)..(1128540): n is a or c or g or t.
  misc_feature (1561400)..(1561400): n is a or c or g or t.
  misc_feature (1561477)..(1561477): n is a or c or g or t.
  misc_feature (1561545)..(1561545): n is a or c or g or t.
  misc_feature (1767941)..(1767941): n is a or c or g or t.
VIHYVRDSDENYYHSDLVMGILAKHGYSVYYWDAYYHGSHGDPIQSYYNLFRGKKIKVFYYYGHTAKILPSTEVNGFMILQNPNFGDTAKVFWGRITGDADMHDALIFVLGCDSFRLRVGATYRTYIGTDRPIDVRLIKDKGTTFWKKLDEGKTAYQAMESIQPSFWEKLTHRYWANLQIDGDKNWRL

SEQ ID NO: 797 - protein, 386 aa, Thermococcus kodakaraensis KOD1
  misc_feature (414542)..(414542): n is a or c or g or t.
  misc_feature (786890)..(786890): n is a or c or g or t.
  misc_feature (786907)..(786907): n is a or c or g or t.
  misc_feature (786944)..(786946): n is a or c or g or t.
  misc_feature (839139)..(839139): n is a or c or g or t.
  misc_feature (1128488)..(1128488): n is a or c or g or t.
  misc_feature (1128499)..(1128499): n is a or c or g or t.
  misc_feature (1128505)..(1128506): n is a or c or g or t.
  misc_feature (1128517)..(1128518): n is a or c or g or t.
  misc_feature (1128539)..(1128540): n is a or c or g or t.
  misc_feature (1561400)..(1561400): n is a or c or g or t.
  misc_feature (1561477)..(1561477): n is a or c or g or t.
  misc_feature (1561545)..(1561545): n is a or c or g or t.
  misc_feature (1767941)..(1767941): n is a or c or g or t.
MNWDRVRGLVLEGKPVVLIDNRREFEADLIYPAEIASPEIVNFMLSMKGLLCLTMDMDEALKRGFFPLPSKEGETNFLVPVDYKETFTGITAEERALTARKIAEGLGVGAFRYPGHLHLLGGIGLNRRRGHTESSLELMEILGFKRYALMVEILDEKGDSHNREYALKLAEEHGLPVLTTDDVWKEFVRRKQLMRIYASARLPTRYGDFRIIAFDNELDFKEHVAIVKEPYGEVPLVRVHSKCLTGDTFASLKCDCGSQLANALRMIAQEGGILLYMDQEGRGIGLKEKIKAYELQDKGFDTVEANKALGRGEDERTYEAAFQMLRALGVSKIRLITNNPRKAKALEEFGIEVVETVPAPGEVTEHNKPYLKVKAEKLGHKLPFKV

SEQ ID NO: 798 - protein, 432 aa, Thermococcus kodakaraensis KOD1
  misc_feature (414542)..(414542): n is a or c or g or t.
  misc_feature (786890)..(786890): n is a or c or g or t.
  misc_feature (786907)..(786907): n is a or c or g or t.
  misc_feature (786944)..(786946): n is a or c or g or t.
  misc_feature (839139)..(839139): n is a or c or g or t.
  misc_feature (1128488)..(1128488): n is a or c or g or t.
  misc_feature (1128499)..(1128499): n is a or c or g or t.
  misc_feature (1128505)..(1128506): n is a or c or g or t.
  misc_feature (1128517)..(1128518): n is a or c or g or t.
  misc_feature (1128539)..(1128540): n is a or c or g or t.
  misc_feature (1561400)..(1561400): n is a or c or g or t.
  misc_feature (1561477)..(1561477): n is a or c or g or t.
  misc_feature (1561545)..(1561545): n is a or c or g or t.
  misc_feature (1767941)..(1767941): n is a or c or g or t.
VMPMAVLIIAGLDTGGGAGLKADIETVSALNEHPLPVVSAITYQNPNEVRGVFIAPPETIREQIRAVRDAFDIRAVKIGLIHGGAIEAIAEETKGLRKILDPVMASTSGFQFLSPEDVGRLKKRLVPGSIVTPNVPEAEVLTGIKINSVEDMRKAARVLVEELSAEAAVVKGGHLNFTDVLYWNGEVFEIPGEHAEGFTHGTGCAFSTALAAFIAKGLRLPEAVEKAKRFVEGAIRFSRGEGKAINPIWELQRDAQRWRSKEELGDAVNRLVKMGELLNRHVAEVGTNFALATDFNEVFAVKGRIVRYDKTVKPVGPVELNASDHLRRALLKMREFYPEVKAVLNLRYSEELVEKAKKLGLKVSFYDRREEPEEVKRAERGTMEWGIETAVKRLGERPDIVYHLGDWGKEPMILVFGSNAEEVVERVRLLIS

SEQ ID NO: 799 - protein, 636 aa, Thermococcus kodakaraensis KOD1
  misc_feature (414542)..(414542): n is a or c or g or t.
  misc_feature (786890)..(786890): n is a or c or g or t.
  misc_feature (786907)..(786907): n is a or c or g or t.
  misc_feature (786944)..(786946): n is a or c or g or t.
  misc_feature (839139)..(839139): n is a or c or g or t.
  misc_feature (1128488)..(1128488): n is a or c or g or t.
  misc_feature (1128499)..(1128499): n is a or c or g or t.
  misc_feature (1128505)..(1128506): n is a or c or g or t.
  misc_feature (1128517)..(1128518): n is a or c or g or t.
  misc_feature (1128539)..(1128540): n is a or c or g or t.
  misc_feature (1561400)..(1561400): n is a or c or g or t.
  misc_feature (1561477)..(1561477): n is a or c or g or t.
  misc_feature (1561545)..(1561545): n is a or c or g or t.
  misc_feature (1767941)..(1767941): n is a or c or g or t.
VALMIVRGKVTGNEIPRFKHRWFGVLEVDAGEKYRLYMTGNAAQWFLTGDEVEIEILSKPKEKNGFKVLDFDDYRLWKFYNGEKIPVWPLWEKELEAKRYSPLTGELLYTYKIQAREAKYESDFEAIAELEQYHYASQKEKVALWRCENGHIFEANTKGACPVCGSEDVHILEIKGSTPASRFLILELVEREEYEPRILSYVRVDPPIPLMHRRLPNGEIEKNIREKVFPEDWFHPAFWPERIMRELYEELKKKYKKRVARSYLWEEAKWKALKETNTAGARIARVVVHPDYRSDGLGQLSVKAALEWIAERRIPEMRKRKHIVETIAQMARYNPFFEKVGFKFLWETASGRPVLFYPLTEEAKEYIERFLKEDPYAPKDGRLWRPSYGKVEPLSGPIVFKDVSKVFESELDVKGLPDEIRELLEAFGVRHRVIQRPVLRNLNFEIKPGELIAVVGASGAGKTTLLRLILGAANGWWEERFRPTTGEIEVPKNVKVSVMIPGEFEPSFGTESILEHVYRKIGDLNAAVEVLNRAGLSDAVLYRAKYSELSTGQKERARIASLLAEKPNLLLIDEFAAHLDTLTAMRVARKVAEIIREAGITALIITHRPEVLKALDPDRVLFVGYGTARVQGKEKS

SEQ ID NO: 800 - protein, 479 aa, Thermococcus kodakaraensis KOD1
  misc_feature (414542)..(414542): n is a or c or g or t.
  misc_feature (786890)..(786890): n is a or c or g or t.
  misc_feature (786907)..(786907): n is a or c or g or t.
  misc_feature (786944)..(786946): n is a or c or g or t.
  misc_feature (839139)..(839139): n is a or c or g or t.
  misc_feature (1128488)..(1128488): n is a or c or g or t.
  misc_feature (1128499)..(1128499): n is a or c or g or t.
  misc_feature (1128505)..(1128506): n is a or c or g or t.
  misc_feature (1128517)..(1128518): n is a or c or g or t.
  misc_feature (1128539)..(1128540): n is a or c or g or t.
  misc_feature (1561400)..(1561400): n is a or c or g or t.
  misc_feature (1561477)..(1561477): n is a or c or g or t.
  misc_feature (1561545)..(1561545): n is a or c or g or t.
  misc_feature (1767941)..(1767941): n is a or c or g or t.
VVGMGIKIYNTLTRQKEEFKPLREGEVRMYVCGPTVYDYTHIGHARTYIAFDVIRRYLEHKGYTVLMVMNFTDIDDKIIKRANETGEDPKELAEKFLKYFLEDMKALKVKPADIYPRVTEHIQDIIDFIRKLQEKGYAYEGSDGVYFEVRKFKDYGKLSKVKLEDLVKGARVEPGEGKKNPEDFALWKKAKPGEPKWESPWGEGRPGWHIECSTMSTKYLGESFDIHGGGSDLIFPHHENEIAQTEACTGHEWVRYWMHTGFLMVNGEKMSKSLGNFVTIREALERYDPEVIRLFVLQRHYRSPLDYTEEGLEHAKNNLERLYNTLENIRVAMERAEISFKWGEEEFEAYEAIRDGRKKFYDAMDDDFNTAEALKAVFEVSNAINRYLTQVEKPKESILRKAWEFFKMVSEVFGIFEDYFREQKAGEEEALIKLLIDVRAQLRKERKFDLADKIRDELRNLGIQLEDTPQGTVWKRIKV

SEQ ID NO: 801 - protein, 85 aa, Thermococcus kodakaraensis KOD1
  misc_feature (414542)..(414542): n is a or c or g or t.
  misc_feature (786890)..(786890): n is a or c or g or t.
  misc_feature (786907)..(786907): n is a or c or g or t.
  misc_feature (786944)..(786946): n is a or c or g or t.
  misc_feature (839139)..(839139): n is a or c or g or t.
  misc_feature (1128488)..(1128488): n is a or c or g or t.
  misc_feature (1128499)..(1128499): n is a or c or g or t.
  misc_feature (1128505)..(1128506): n is a or c or g or t.
  misc_feature (1128517)..(1128518): n is a or c or g or t.
  misc_feature (1128539)..(1128540): n is a or c or g or t.
  misc_feature (1561400)..(1561400): n is a or c or g or t.
  misc_feature (1561477)..(1561477): n is a or c or g or t.
  misc_feature (1561545)..(1561545): n is a or c or g or t.
  misc_feature (1767941)..(1767941): n is a or c or g or t.
MYIIVVYDVSVERVNRVKKFLRQHLHWVQNSVFEGEVTLAEFERIKAGIGELIDGDEDSVVIYKLRSMPKREVMGVEKNPIEDII

SEQ ID NO: 802 - protein, 169 aa, Thermococcus kodakaraensis KOD1
  misc_feature (414542)..(414542): n is a or c or g or t.
  misc_feature (786890)..(786890): n is a or c or g or t.
  misc_feature (786907)..(786907): n is a or c or g or t.
  misc_feature (786944)..(786946): n is a or c or g or t.
  misc_feature (839139)..(839139): n is a or c or g or t.
  misc_feature (1128488)..(1128488): n is a or c or g or t.
  misc_feature (1128499)..(1128499): n is a or c or g or t.
  misc_feature (1128505)..(1128506): n is a or c or g or t.
  misc_feature (1128517)..(1128518): n is a or c or g or t.
  misc_feature (1128539)..(1128540): n is a or c or g or t.
  misc_feature (1561400)..(1561400): n is a or c or g or t.
  misc_feature (1561477)..(1561477): n is a or c or g or t.
  misc_feature (1561545)..(1561545): n is a or c or g or t.
  misc_feature (1767941)..(1767941): n is a or c or g or t.
VVKMGSVLWVLKSGKKIHGKVLGLYPYYVEIDLSTGEGLCTCSKGGNCEHVEAVRRAYENGAYFSENSKLAEVNPEAVVWEFLIEVPTLAVEVSVKELISALKRDESGSETARLFFRTMKLIELSGREEYLHVLEEAFEEFARVFPDYPLTEKIEKELEALKGRTRKAL

SEQ ID NO: 803 - protein, 268 aa, Thermococcus kodakaraensis KOD1
  misc_feature (414542)..(414542): n is a or c or g or t.
  misc_feature (786890)..(786890): n is a or c or g or t.
  misc_feature (786907)..(786907): n is a or c or g or t.
  misc_feature (786944)..(786946): n is a or c or g or t.
  misc_feature (839139)..(839139): n is a or c or g or t.
  misc_feature (1128488)..(1128488): n is a or c or g or t.
  misc_feature (1128499)..(1128499): n is a or c or g or t.
  misc_feature (1128505)..(1128506): n is a or c or g or t.
  misc_feature (1128517)..(1128518): n is a or c or g or t.
  misc_feature (1128539)..(1128540): n is a or c or g or t.
  misc_feature (1561400)..(1561400): n is a or c or g or t.
  misc_feature (1561477)..(1561477): n is a or c or g or t.
  misc_feature (1561545)..(1561545): n is a or c or g or t.
  misc_feature (1767941)..(1767941): n is a or c or g or t.
VVVKMVKDRMVELLQEHFELNLYEARAYVALVGFGVLTPAELASVSEVPAPRTYDVLRSLEKKGFAISQPGKVNKYRPVHPENILEKFIEEWQERVKEELEAKKKAKEELIELMKPLIETEIPKYGVERVWVVRGIRNATLKTKEMFEEVKEKILLADDGYIAINLENDLIKAIDNGAKAKIIVSKSLLKRLEGSKIMEYAKKGKLELRALDKFELPMLICDDEVFFALEDMAARYFNYETQVWIKDFRVRDLFEAKFNEYWEKAEKV

SEQ ID NO: 804 - protein, 270 aa, Thermococcus kodakaraensis KOD1
  misc_feature (414542)..(414542): n is a or c or g or t.
  misc_feature (786890)..(786890): n is a or c or g or t.
  misc_feature (786907)..(786907): n is a or c or g or t.
  misc_feature (786944)..(786946): n is a or c or g or t.
  misc_feature (839139)..(839139): n is a or c or g or t.
  misc_feature (1128488)..(1128488): n is a or c or g or t.
  misc_feature (1128499)..(1128499): n is a or c or g or t.
  misc_feature (1128505)..(1128506): n is a or c or g or t.
  misc_feature (1128517)..(1128518): n is a or c or g or t.
  misc_feature (1128539)..(1128540): n is a or c or g or t.
  misc_feature (1561400)..(1561400): n is a or c or g or t.
  misc_feature (1561477)..(1561477): n is a or c or g or t.
  misc_feature (1561545)..(1561545): n is a or c or g or t.
  misc_feature (1767941)..(1767941): n is a or c or g or t.
MIAHLVNTDVGSRGIGRLYLDYRTRNFHFLEDAAETFLNNLERTLIVTGFPIPPSMTPETDGPPGALAVAKAVEKLGGRAEVLSYPEVMGALRPFGVTFARDGDVSEYSLVVAIETPGRAVDGRYYSMSGMEITREAFDGLVIEAREYGIPTIAVGDGGNEAGMGNVRDLIELYIPLGEKIASVVEVDHLITAGVSNWGSYGLVAHASILAGTNLLADWDEERAVKALTSAGLIDGVRKKSSESVDGIGLEVHKEVVELLKALINDALGG

SEQ ID NO: 805 - protein, 206 aa, Thermococcus kodakaraensis KOD1
  misc_feature (414542)..(414542): n is a or c or g or t.
  misc_feature (786890)..(786890): n is a or c or g or t.
  misc_feature (786907)..(786907): n is a or c or g or t.
  misc_feature (786944)..(786946): n is a or c or g or t.
  misc_feature (839139)..(839139): n is a or c or g or t.
  misc_feature (1128488)..(1128488): n is a or c or g or t.
  misc_feature (1128499)..(1128499): n is a or c or g or t.
  misc_feature (1128505)..(1128506): n is a or c or g or t.
  misc_feature (1128517)..(1128518): n is a or c or g or t.
  misc_feature (1128539)..(1128540): n is a or c or g or t.
  misc_feature (1561400)..(1561400): n is a or c or g or t.
  misc_feature (1561477)..(1561477): n is a or c or g or t.
  misc_feature (1561545)..(1561545): n is a or c or g or t.
  misc_feature (1767941)..(1767941): n is a or c or g or t.
MKLEEFISDPKSRELIETVREFAKSFFDREGTHGFSHVERVFNLCMHIGKEEGADLEVLALAALLHDIARPLEDSGKVEDHALEGARIARRYLRSLGYPEDKVEAVAHAIEAHRFSRGPEPATLEAKILSDADKLDAIGAVGIARVFMYSGEHGRGIDASIKHFEEKILKLKDLMYTETARKMAEERHRFTEEFIERLRREIEGEI

SEQ ID NO: 806 - protein, 166 aa, Thermococcus kodakaraensis KOD1
  misc_feature (414542)..(414542): n is a or c or g or t.
  misc_feature (786890)..(786890): n is a or c or g or t.
  misc_feature (786907)..(786907): n is a or c or g or t.
  misc_feature (786944)..(786946): n is a or c or g or t.
  misc_feature (839139)..(839139): n is a or c or g or t.
  misc_feature (1128488)..(1128488): n is a or c or g or t.
  misc_feature (1128499)..(1128499): n is a or c or g or t.
  misc_feature (1128505)..(1128506): n is a or c or g or t.
  misc_feature (1128517)..(1128518): n is a or c or g or t.
  misc_feature (1128539)..(1128540): n is a or c or g or t.
  misc_feature (1561400)..(1561400): n is a or c or g or t.
  misc_feature (1561477)..(1561477): n is a or c or g or t.
  misc_feature (1561545)..(1561545): n is a or c or g or t.
  misc_feature (1767941)..(1767941): n is a or c or g or t.
VGACWKGKLEGDESDVYRVFENLLTACYYFLQPEHPHVQKLTRFEKKNVEEAGFRLKGEEVVVYQGVERNSIYYACSTGKTARIYYHNGLLEFTDCPEYKGKHKGVVELPLREFIEDVLKVSKEYLEKYAPIIEKIRLEHGEKPDDYDFLQKFYLEVERLYKEKFG

SEQ ID NO: 807 - protein, 212 aa, Thermococcus kodakaraensis KOD1
  misc_feature (414542)..(414542): n is a or c or g or t.
  misc_feature (786890)..(786890): n is a or c or g or t.
  misc_feature (786907)..(786907): n is a or c or g or t.
  misc_feature (786944)..(786946): n is a or c or g or t.
  misc_feature (839139)..(839139): n is a or c or g or t.
  misc_feature (1128488)..(1128488): n is a or c or g or t.
  misc_feature (1128499)..(1128499): n is a or c or g or t.
  misc_feature (1128505)..(1128506): n is a or c or g or t.
  misc_feature (1128517)..(1128518): n is a or c or g or t.
  misc_feature (1128539)..(1128540): n is a or c or g or t.
  misc_feature (1561400)..(1561400): n is a or c or g or t.
  misc_feature (1561477)..(1561477): n is a or c or g or t.
  misc_feature (1561545)..(1561545): n is a or c or g or t.
  misc_feature (1767941)..(1767941): n is a or c or g or t.
VSWWLGSLKPMRLVGKHIEIDVDPNAPTCFPSPIPTLMRIDRRLIIGGIFKSSGCTPLMMDTNLHGMFQDLLDLCISFLDPDFDEQGEMAYPRREARKLGFKIGDSTKLYQTSLFVDQGVTTVFFELVGERLRIHYLNELLGWSDCEDARKTHRGTFEVPFLEFAEDVLVLSRRFLTEVAPIIEEVCPELDDPEYLWKLYLELNARLVGEDD

SEQ ID NO: 808 - protein, 438 aa, Thermococcus kodakaraensis KOD1
  misc_feature (414542)..(414542): n is a or c or g or t.
  misc_feature (786890)..(786890): n is a or c or g or t.
  misc_feature (786907)..(786907): n is a or c or g or t.
  misc_feature (786944)..(786946): n is a or c or g or t.
  misc_feature (839139)..(839139): n is a or c or g or t.
  misc_feature (1128488)..(1128488): n is a or c or g or t.
  misc_feature (1128499)..(1128499): n is a or c or g or t.
  misc_feature (1128505)..(1128506): n is a or c or g or t.
  misc_feature (1128517)..(1128518): n is a or c or g or t.
  misc_feature (1128539)..(1128540): n is a or c or g or t.
  misc_feature (1561400)..(1561400): n is a or c or g or t.
  misc_feature (1561477)..(1561477): n is a or c or g or t.
  misc_feature (1561545)..(1561545): n is a or c or g or t.
  misc_feature (1767941)..(1767941): n is a or c or g or t.
MYRTHYSSEITEELNGQKVKVAGWVWEVKDLGGIKFLWIRDRDGIVQITAPKKKVDPELFKLIPKLRSEDVVAVEGVVNFTPKAKLGFEILPEKIVVLNRAETPLPLDPTGKVKAELDTRLDNRFMDLRRPEVMAIFKIRSSVFKAVRDFFHENGFIEIHTPKIIATATEGGTELFPMKYFEEDAFLAQSPQLYKQIMMASGLDRVYEIAPIFRAEEHNTTRHLNEAWSIDSEMAFIEDEEEVMSFLERLVAHAINYVREHNAKELDILNFELEEPKLPFPRVSYDKALEILGDLGKEIPWGEDIDTEGERLLGKYMMENENAPLYFLYQYPSEAKPFYIMKYDNKPEICRAFDLEYRGVEISSGGQREHRHDILVEQIKEKGLNPESFEFYLKAFRYGMPPHGGFGLGAERLIKQMLDLPNIREVILFPRDRRRLTP

SEQ ID NO: 809 - protein, 501 aa, Thermococcus kodakaraensis KOD1
  misc_feature (414542)..(414542): n is a or c or g or t.
  misc_feature (786890)..(786890): n is a or c or g or t.
  misc_feature (786907)..(786907): n is a or c or g or t.
  misc_feature (786944)..(786946): n is a or c or g or t.
  misc_feature (839139)..(839139): n is a or c or g or t.
  misc_feature (1128488)..(1128488): n is a or c or g or t.
  misc_feature (1128499)..(1128499): n is a or c or g or t.
  misc_feature (1128505)..(1128506): n is a or c or g or t.
  misc_feature (1128517)..(1128518): n is a or c or g or t.
  misc_feature (1128539)..(1128540): n is a or c or g or t.
  misc_feature (1561400)..(1561400): n is a or c or g or t.
  misc_feature (1561477)..(1561477): n is a or c or g or t.
  misc_feature (1561545)..(1561545): n is a or c or g or t.
  misc_feature (1767941)..(1767941): n is a or c or g or t.
MRKLLALILGIVLMVSGGITSNKGIVRAEETNYATVGPSVQLNLGDSVTLGEYTIKFSDISVDYSQVSLTIQGPTGAPSTIIVPEGSNAYYPNSKNPKLVFGAAVWTKDKKPLLYLDIKSPLKKVNGDPLILSAGKSYTLPVGTIKVYKVTSTEVTFTIYLPNNPSKSITLKEGESGGVAYAFPNTDFKYYDFVYVELLDITPGKSAKFNVYMPAVPATKISVSRAGGSSSSSGSGTSTTQTLISLYDGLLYTNEKLTITQNKTKYELQLVSAVSTKASIKVYKDGKALDTYIISIGAIKDIPNTPLKVLISKSEPQYGRVSLTVYGPEDAKATPILRPATIVASIDTVPKTVMVGQDMVIIVTVENKGKGDAYDVNVAAPVPNGFKLVSSVKSWTFKSFPAFTKMPALIYVLQPTKVGKFDIGRVMVTYYDDQSLETGKQKTIYSQPLSGIIVYGLPEIKVSAVASNGTHEGNYVHTEAGKKVLLKFNVSASEGDPTTSS

SEQ ID NO: 810 - protein, 331 aa, Thermococcus kodakaraensis KOD1
  misc_feature (414542)..(414542): n is a or c or g or t.
  misc_feature (786890)..(786890): n is a or c or g or t.
  misc_feature (786907)..(786907): n is a or c or g or t.
  misc_feature (786944)..(786946): n is a or c or g or t.
  misc_feature (839139)..(839139): n is a or c or g or t.
  misc_feature (1128488)..(1128488): n is a or c or g or t.
  misc_feature (1128499)..(1128499): n is a or c or g or t.
  misc_feature (1128505)..(1128506): n is a or c or g or t.
  misc_feature (1128517)..(1128518): n is a or c or g or t.
  misc_feature (1128539)..(1128540): n is a or c or g or t.
  misc_feature (1561400)..(1561400): n is a or c or g or t.
  misc_feature (1561477)..(1561477): n is a or c or g or t.
  misc_feature (1561545)..(1561545): n is a or c or g or t.
  misc_feature (1767941)..(1767941): n is a or c or g or t.
MLAVKVPKREAEKIRRKLIELGVLAKGYSPKREGNFVLFPVEMPVEGFELVEAEFEKTERRPHSYREVVEVPDEIKPLLPSSFDIIGDIAIIELPEELMDYGKAIGEAILKVHRHIKAVFAKGSKVSGEYRIRELIHLAGEKRTETLHRENGIRLKLDIARVYYTPRLATERMRVFERTQPGEIVFDMFAGVGPYSILLAKKAKLVFACDINPWAVRYLEENKKLNKTPNVIPILGDVRKVAGQIKADRVIMNLPKFADRFLKEAMMSVKSGGIVHYYGFGPEEDLFSEHEQKIKAVARELGFKVELLDERRVRPYAPRQFNIAIDFRVWK

SEQ ID NO: 811 - protein, 266 aa, Thermococcus kodakaraensis KOD1
  misc_feature (414542)..(414542): n is a or c or g or t.
  misc_feature (786890)..(786890): n is a or c or g or t.
  misc_feature (786907)..(786907): n is a or c or g or t.
  misc_feature (786944)..(786946): n is a or c or g or t.
  misc_feature (839139)..(839139): n is a or c or g or t.
  misc_feature (1128488)..(1128488): n is a or c or g or t.
  misc_feature (1128499)..(1128499): n is a or c or g or t.
  misc_feature (1128505)..(1128506): n is a or c or g or t.
  misc_feature (1128517)..(1128518): n is a or c or g or t.
  misc_feature (1128539)..(1128540): n is a or c or g or t.
  misc_feature (1561400)..(1561400): n is a or c or g or t.
  misc_feature (1561477)..(1561477): n is a or c or g or t.
  misc_feature (1561545)..(1561545): n is a or c or g or t.
  misc_feature (1767941)..(1767941): n is a or c or g or t.
MSEVIRVLLEEATKVAEKIGAKALVIMEELPEEEIPDVGITVVIVGSTFDVEKDNVKRISIPQNLDLNNLLNLISAFLLEHGILSEGDSFVYVTENLIGVRTIKRSIVAMKSFFAQNQNVLQRMLEIAIELSIEGREGNPVGTIFVIGDTRRVLKHSRQLIPNPFKGHRINVLDKESKEIIKEFAQLDGAFLIREDGRIVAAGRYLEVEPRVIDLMLPPGLGSRHIAAAGITKITSAMAISLSESGTIRIFKNGLMLLEYNPRLKY

SEQ ID NO: 812 - protein, 112 aa, Thermococcus kodakaraensis KOD1
  misc_feature (414542)..(414542): n is a or c or g or t.
  misc_feature (786890)..(786890): n is a or c or g or t.
  misc_feature (786907)..(786907): n is a or c or g or t.
  misc_feature (786944)..(786946): n is a or c or g or t.
  misc_feature (839139)..(839139): n is a or c or g or t.
  misc_feature (1128488)..(1128488): n is a or c or g or t.
  misc_feature (1128499)..(1128499): n is a or c or g or t.
  misc_feature (1128505)..(1128506): n is a or c or g or t.
  misc_feature (1128517)..(1128518): n is a or c or g or t.
  misc_feature (1128539)..(1128540): n is a or c or g or t.
  misc_feature (1561400)..(1561400): n is a or c or g or t.
  misc_feature (1561477)..(1561477): n is a or c or g or t.
  misc_feature (1561545)..(1561545): n is a or c or g or t.
  misc_feature (1767941)..(1767941): n is a or c or g or t.
VVVVTRYFGGIKLGYGGLVKAYSDAASLAIENAGIVEVHETERFEVTFPYNLFHTVRSTIEENGGRVVGEEYGELVKFTVETRKGEAEPLMELLTERTRGRVRLRPLFMRSV

SEQ ID NO: 813 - protein, 53 aa, Thermococcus kodakaraensis KOD1
  misc_feature (414542)..(414542): n is a or c or g or t.
  misc_feature (786890)..(786890): n is a or c or g or t.
  misc_feature (786907)..(786907): n is a or c or g or t.
  misc_feature (786944)..(786946): n is a or c or g or t.
  misc_feature (839139)..(839139): n is a or c or g or t.
  misc_feature (1128488)..(1128488): n is a or c or g or t.
  misc_feature (1128499)..(1128499): n is a or c or g or t.
  misc_feature (1128505)..(1128506): n is a or c or g or t.
  misc_feature (1128517)..(1128518): n is a or c or g or t.
  misc_feature (1128539)..(1128540): n is a or c or g or t.
  misc_feature (1561400)..(1561400): n is a or c or g or t.
  misc_feature (1561477)..(1561477): n is a or c or g or t.
  misc_feature (1561545)..(1561545): n is a or c or g or t.
  misc_feature (1767941)..(1767941): n is a or c or g or t.
MAKWKCIVCGYIYDEDEGDPDSGIAPGTKFEDLPDDWVCPLCGAPKDMFEKIE

SEQ ID NO: 814 - protein, 472 aa, Thermococcus kodakaraensis KOD1
  misc_feature (414542)..(414542): n is a or c or g or t.
  misc_feature (786890)..(786890): n is a or c or g or t.
  misc_feature (786907)..(786907): n is a or c or g or t.
  misc_feature (786944)..(786946): n is a or c or g or t.
  misc_feature (839139)..(839139): n is a or c or g or t.
  misc_feature (1128488)..(1128488): n is a or c or g or t.
  misc_feature (1128499)..(1128499): n is a or c or g or t.
  misc_feature (1128505)..(1128506): n is a or c or g or t.
  misc_feature (1128517)..(1128518): n is a or c or g or t.
  misc_feature (1128539)..(1128540): n is a or c or g or t.
  misc_feature (1561400)..(1561400): n is a or c or g or t.
  misc_feature (1561477)..(1561477): n is a or c or g or t.
  misc_feature (1561545)..(1561545): n is a or c or g or t.
  misc_feature (1767941)..(1767941): n is a or c or g or t.
MMKTALTPQKFLRTLMYISGHMHTLGKIYIPPVQTTIEVFPMAEGYREYRDKVLGFIEDHENWRKHTINLIASENVTSPSVTRAVASGFMHKYAEGWPKQRYYQGCKYVDEVELIGVELFTKLFGSDFADLRPISGTNANQAVFFGLTQPGDKAIVLHTSHGGHISHMPFGAAGMRGLEVHTWPFDNEEFNIDVDKAEKLIREVEPKIVVFGGSLFPFPHPVKELAPVAKEVGAYVMYDGAHVLGLIAGKQFQDPLREGADIITASTHKTFPGPQGGVIIYKRFGETEEIAKLQWAIFPGVLSNHHLHHMAGKVITAAEMLEYGEKYAAQIVKNAKALAEALAEEGFKVIGEDKGYTESHQVIVDVSDLHPAAGGWAAPLLEEAGIILNKNLLPWDPLEKVNEPSGLRIGVQEMTRVGMMEDEMKEIARFIRRVLIDKEDPAKVRRDVYGFRAEYQKVYYSFDHGLPLRLRE

SEQ ID NO: 815 - protein, 110 aa, Thermococcus kodakaraensis KOD1
  misc_feature (414542)..(414542): n is a or c or g or t.
  misc_feature (786890)..(786890): n is a or c or g or t.
  misc_feature (786907)..(786907): n is a or c or g or t.
  misc_feature (786944)..(786946): n is a or c or g or t.
  misc_feature (839139)..(839139): n is a or c or g or t.
  misc_feature (1128488)..(1128488): n is a or c or g or t.
  misc_feature (1128499)..(1128499): n is a or c or g or t.
  misc_feature (1128505)..(1128506): n is a or c or g or t.
  misc_feature (1128517)..(1128518): n is a or c or g or t.
  misc_feature (1128539)..(1128540): n is a or c or g or t.
  misc_feature (1561400)..(1561400): n is a or c or g or t.
  misc_feature (1561477)..(1561477): n is a or c or g or t.
  misc_feature (1561545)..(1561545): n is a or c or g or t.
  misc_feature (1767941)..(1767941): n is a or c or g or t.
MKFCPKCGNLMLPDRKRKVWVCRSCGYEEPFDEEKDREKTKITKKVEHKPDEEIIVVEQDLKTLPTTKVTCPKCGNDTAYWWEMQTRAGDEPSTIFYKCTKCGYTWRAYE

SEQ ID NO: 816 - protein, 408 aa, Thermococcus kodakaraensis KOD1
  misc_feature (414542)..(414542): n is a or c or g or t.
  misc_feature (786890)..(786890): n is a or c or g or t.
  misc_feature (786907)..(786907): n is a or c or g or t.
  misc_feature (786944)..(786946): n is a or c or g or t.
  misc_feature (839139)..(839139): n is a or c or g or t.
  misc_feature (1128488)..(1128488): n is a or c or g or t.
  misc_feature (1128499)..(1128499): n is a or c or g or t.
  misc_feature (1128505)..(1128506): n is a or c or g or t.
  misc_feature (1128517)..(1128518): n is a or c or g or t.
  misc_feature (1128539)..(1128540): n is a or c or g or t.
  misc_feature (1561400)..(1561400): n is a or c or g or t.
  misc_feature (1561477)..(1561477): n is a or c or g or t.
  misc_feature (1561545)..(1561545): n is a or c or g or t.
  misc_feature (1767941)..(1767941): n is a or c or g or t.
VMLMAGKVRNIVVEELVRTPVEMQKVELVERKGIGHPDSIADGIAEAVSRALSREYVKRYGIILHHNTDQVEVVGGRAYPQFGGGEVIKPIYILLSGRAVEMVDREFFPVHEIALKAAKDYLRKAVRHLDLEHHVIIDSRIGQGSVDLVGVFNKAKKNPIPLANDTSFGVGYAPLSETEKIVLETEKYLNSDEFKKKYPAVGEDIKVMGLRKGDEIDLTIAAAIVDSEVDNPDDYMAVKEAIYEAAKGIVESHTERPTNIYVNTADDPKEGIYYITVTGTSAEAGDDGSVGRGNRVNGLITPNRHMSMEAAAGKNPVSHVGKIYNILSMLIANDIAEQVEGVEEVYVRILSQIGKPIDEPLVASVQIIPKKGYSIDVLQKPAYEIADEWLANITKIQKMILEDKVNVF

SEQ ID NO: 817 - protein, 97 aa, Thermococcus kodakaraensis KOD1
  misc_feature (414542)..(414542): n is a or c or g or t.
  misc_feature (786890)..(786890): n is a or c or g or t.
  misc_feature (786907)..(786907): n is a or c or g or t.
  misc_feature (786944)..(786946): n is a or c or g or t.
  misc_feature (839139)..(839139): n is a or c or g or t.
  misc_feature (1128488)..(1128488): n is a or c or g or t.
  misc_feature (1128499)..(1128499): n is a or c or g or t.
  misc_feature (1128505)..(1128506): n is a or c or g or t.
  misc_feature (1128517)..(1128518): n is a or c or g or t.
  misc_feature (1128539)..(1128540): n is a or c or g or t.
  misc_feature (1561400)..(1561400): n is a or c or g or t.
  misc_feature (1561477)..(1561477): n is a or c or g or t.
  misc_feature (1561545)..(1561545): n is a or c or g or t.
  misc_feature (1767941)..(1767941): n is a or c or g or t.
MIVRGRILGAGVVAPFEVRKDERGLYVRVELPDKLFEHSIDCPCLEPLEFLGLLLPALEEELGEVKGVFVEKVEKEKHHSLLKSFLRFLSKGGHTTP

SEQ ID NO: 818 - protein, 252 aa, Thermococcus kodakaraensis KOD1
  misc_feature (414542)..(414542): n is a or c or g or t.
  misc_feature (786890)..(786890): n is a or c or g or t.
  misc_feature (786907)..(786907): n is a or c or g or t.
  misc_feature (786944)..(786946): n is a or c or g or t.
  misc_feature (839139)..(839139): n is a or c or g or t.
  misc_feature (1128488)..(1128488): n is a or c or g or t.
  misc_feature (1128499)..(1128499): n is a or c or g or t.
  misc_feature (1128505)..(1128506): n is a or c or g or t.
  misc_feature (1128517)..(1128518): n is a or c or g or t.
  misc_feature (1128539)..(1128540): n is a or c or g or t.
  misc_feature (1561400)..(1561400): n is a or c or g or t.
  misc_feature (1561477)..(1561477): n is a or c or g or t.
  misc_feature (1561545)..(1561545): n is a or c or g or t.
  misc_feature (1767941)..(1767941): n is a or c or g or t.
MVMMASATSSTVLSSISLNSLGRRVWSIMVTLPGSYLTLLGSLVSSSGLYLISMRTTPKGLREELKAPSVSEMALRIFVTGPAGVGKTTLVERVAREVDRWGYIVGGVITREVRRGGRRIGFKITALDTGEEGTLASLRGTSHLPGVPFGKYVVHVDEIERVAVPAIRRAIVEADLIVIDEIGPMEYTSNEFIRAVGEVLKSEKPLLAVVHRKFIDRFRPLGEVHTLSFENRNAEFGIILDRVMKELKGIRG

SEQ ID NO: 819 - protein, 484 aa, Thermococcus kodakaraensis KOD1
  misc_feature (414542)..(414542): n is a or c or g or t.
  misc_feature (786890)..(786890): n is a or c or g or t.
  misc_feature (786907)..(786907): n is a or c or g or t.
  misc_feature (786944)..(786946): n is a or c or g or t.
  misc_feature (839139)..(839139): n is a or c or g or t.
  misc_feature (1128488)..(1128488): n is a or c or g or t.
  misc_feature (1128499)..(1128499): n is a or c or g or t.
  misc_feature (1128505)..(1128506): n is a or c or g or t.
  misc_feature (1128517)..(1128518): n is a or c or g or t.
  misc_feature (1128539)..(1128540): n is a or c or g or t.
  misc_feature (1561400)..(1561400): n is a or c or g or t.
  misc_feature (1561477)..(1561477): n is a or c or g or t.
  misc_feature (1561545)..(1561545): n is a or c or g or t.
  misc_feature (1767941)..(1767941): n is a or c or g or t.
MRRFIGILLIIVLGLSVVASGCIGGNEGSSAGSSGKGITLTIVTRHDATIQYKVKQLFLQSDIAKQYNIEDIKFIGVPESLWPSYIEKGADVGWGGGPTLFDNMYRMGYLAPITDQKILDLIGNQIPEELAGMPMVRKNGSQVYWIAAALSSFGFTVNKEVLNKQGLPFPNKWEDIASPDWARDPQMYGIADPTRSTSNTRIYQIILQAFGWDEGWRIMTLIAANSKVYEASDAVRDAVINGEIAAGNTIDFYGYTAMKQNPNCVYVIPAGESIINGDPIALLKYSKHPEAAQAFIYWVLTEGQAVWMSPEINRLPINAEVFNKTITEDEAKILFKGENAGKTYSEAVPALVKAYELTISSEGIPFDDARALKTVNSLQYYFKATLVDVNGPLHQAWMALVNAYKEGKITQEQFEKLKDELTAPIEFKDPETGQMVTFTEEYAAKINDRIATDAGFQSQLMDEWRSAAQEKYNKVLEELKKITG

SEQ ID NO: 820 - protein, 55 aa, Thermococcus kodakaraensis KOD1
  misc_feature (414542)..(414542): n is a or c or g or t.
  misc_feature (786890)..(786890): n is a or c or g or t.
  misc_feature (786907)..(786907): n is a or c or g or t.
  misc_feature (786944)..(786946): n is a or c or g or t.
  misc_feature (839139)..(839139): n is a or c or g or t.
  misc_feature (1128488)..(1128488): n is a or c or g or t.
  misc_feature (1128499)..(1128499): n is a or c or g or t.
  misc_feature (1128505)..(1128506): n is a or c or g or t.
  misc_feature (1128517)..(1128518): n is a or c or g or t.
  misc_feature (1128539)..(1128540): n is a or c or g or t.
  misc_feature (1561400)..(1561400): n is a or c or g or t.
  misc_feature (1561477)..(1561477): n is a or c or g or t.
  misc_feature (1561545)..(1561545): n is a or c or g or t.
  misc_feature (1767941)..(1767941): n is a or c or g or t.
MLVFGPKSGEFSWKGSDIGSHPHRAKSENKRVTVPVEVNTLQLEPLRTKHGLQIH

SEQ ID NO: 821 - protein, 89 aa, Thermococcus kodakaraensis KOD1
  misc_feature (414542)..(414542): n is a or c or g or t.
  misc_feature (786890)..(786890): n is a or c or g or t.
  misc_feature (786907)..(786907): n is a or c or g or t.
  misc_feature (786944)..(786946): n is a or c or g or t.
  misc_feature (839139)..(839139): n is a or c or g or t.
  misc_feature (1128488)..(1128488): n is a or c or g or t.
  misc_feature (1128499)..(1128499): n is a or c or g or t.
  misc_feature (1128505)..(1128506): n is a or c or g or t.
  misc_feature (1128517)..(1128518): n is a or c or g or t.
  misc_feature (1128539)..(1128540): n is a or c or g or t.
  misc_feature (1561400)..(1561400): n is a or c or g or t.
  misc_feature (1561477)..(1561477): n is a or c or g or t.
  misc_feature (1561545)..(1561545): n is a or c or g or t.
  misc_feature (1767941)..(1767941): n is a or c or g or t.
VMLMGRTTKVGSAGRFGPRYGLKIRRRVAAVEARMKQKHVCPVCGRKAVRRISTGIWQCQKCGATFAGGAYLPTTPAGKVAKRVTASKA

SEQ ID NO: 822 - protein, 77 aa, Thermococcus kodakaraensis KOD1
  misc_feature (414542)..(414542): n is a or c or g or t.
  misc_feature (786890)..(786890): n is a or c or g or t.
  misc_feature (786907)..(786907): n is a or c or g or t.
  misc_feature (786944)..(786946): n is a or c or g or t.
  misc_feature (839139)..(839139): n is a or c or g or t.
  misc_feature (1128488)..(1128488): n is a or c or g or t.
  misc_feature (1128499)..(1128499): n is a or c or g or t.
  misc_feature (1128505)..(1128506): n is a or c or g or t.
  misc_feature (1128517)..(1128518): n is a or c or g or t.
  misc_feature (1128539)..(1128540): n is a or c or g or t.
  misc_feature (1561400)..(1561400): n is a or c or g or t.
  misc_feature (1561477)..(1561477): n is a or c or g or t.
  misc_feature (1561545)..(1561545): n is a or c or g or t.
  misc_feature (1767941)..(1767941): n is a or c or g or t.
VAFLVFTATLVSYRVIFGPTLADRAVALNTATTKAVVIIAMLSILYDAPYLLDVSIVLLMVNAVGGLIIAKYLEVRA

SEQ ID NO: 823 - protein, 76 aa, Thermococcus kodakaraensis KOD1
  misc_feature (414542)..(414542): n is a or c or g or t.
  misc_feature (786890)..(786890): n is a or c or g or t.
  misc_feature (786907)..(786907): n is a or c or g or t.
  misc_feature (786944)..(786946): n is a or c or g or t.
  misc_feature (839139)..(839139): n is a or c or g or t.
  misc_feature (1128488)..(1128488): n is a or c or g or t.
  misc_feature (1128499)..(1128499): n is a or c or g or t.
  misc_feature (1128505)..(1128506): n is a or c or g or t.
  misc_feature (1128517)..(1128518): n is a or c or g or t.
  misc_feature (1128539)..(1128540): n is a or c or g or t.
  misc_feature (1561400)..(1561400): n is a or c or g or t.
  misc_feature (1561477)..(1561477): n is a or c or g or t.
  misc_feature (1561545)..(1561545): n is a or c or g or t.
  misc_feature (1767941)..(1767941): n is a or c or g or t.
MLGTIHEVLLAAIILLSVSVVEAEKLSAAVLRYGLLSLAFVIVLIQLKAPDVALSAVVVGAIVTGLFLYTIKEVGE

SEQ ID NO: 824 - protein, 355 aa, Thermococcus kodakaraensis KOD1
  misc_feature (414542)..(414542): n is a or c or g or t.
  misc_feature (786890)..(786890): n is a or c or g or t.
  misc_feature (786907)..(786907): n is a or c or g or t.
  misc_feature (786944)..(786946): n is a or c or g or t.
  misc_feature (839139)..(839139): n is a or c or g or t.
  misc_feature (1128488)..(1128488): n is a or c or g or t.
  misc_feature (1128499)..(1128499): n is a or c or g or t.
  misc_feature (1128505)..(1128506): n is a or c or g or t.
  misc_feature (1128517)..(1128518): n is a or c or g or t.
  misc_feature (1128539)..(1128540): n is a or c or g or t.
  misc_feature (1561400)..(1561400): n is a or c or g or t.
  misc_feature (1561477)..(1561477): n is a or c or g or t.
  misc_feature (1561545)..(1561545): n is a or c or g or t.
  misc_feature (1767941)..(1767941): n is a or c or g or t.
MPLSKKIRVMVVDDSAFMRRILRDILESDPDIEVCCEARDGIEAIEKVKTEKPDVITLDIEMPRMNGLDALKFIMSKYPTPVIMVSALTQEGAEATIKALEYGAIDFIPKPSSSISINMRELRDEIIAKVKEAAKVPRRFLQLRRRRVLSEQLKKAKKVGEPARRAVAIAASTGGPQSLLKVFEKLPGELDAAILLVQHMPPGFTRSFAARLDRISKLNVKEAEDGEVVNKDWAYVAPGDYHMEVTLRNGKPTIKLYKGPKIHGVRPAADPMMKSVAEVFGRRTVGVVMTGMGRDGAEGIVAIKRKGGITIAQDKETSIIYGMPKAAAETGMVDYIVPLDKIADTIVMALRKIPR

SEQ ID NO: 825 - protein, 548 aa, Thermococcus kodakaraensis KOD1
  misc_feature (414542)..(414542): n is a or c or g or t.
  misc_feature (786890)..(786890): n is a or c or g or t.
  misc_feature (786907)..(786907): n is a or c or g or t.
  misc_feature (786944)..(786946): n is a or c or g or t.
  misc_feature (839139)..(839139): n is a or c or g or t.
  misc_feature (1128488)..(1128488): n is a or c or g or t.
  misc_feature (1128499)..(1128499): n is a or c or g or t.
  misc_feature (1128505)..(1128506): n is a or c or g or t.
  misc_feature (1128517)..(1128518): n is a or c or g or t.
  misc_feature (1128539)..(1128540): n is a or c or g or t.
  misc_feature (1561400)..(1561400): n is a or c or g or t.
  misc_feature (1561477)..(1561477): n is a or c or g or t.
  misc_feature (1561545)..(1561545): n is a or c or g or t.
  misc_feature (1767941)..(1767941): n is a or c or g or t.
MEDMSQYLEEFLSDARDRIDSISNAVLRLEEAVKNGDEEAKRASIDQIFRDAHTLKGTAATMGFMKLSEAAHKMENLFDAIRNGLVEATPDVVDLVLEFIEAIEEMINNIEETGKEGDVDVDELFEKANALLKGYTREKGAKKAEEEKPKVPSTEEGPPQSQEATPTEVSGNVYHVKAIFYPDAQLRGVRAFLILRDLEEIGEVLETKPERSIIEDGSADVDELEFKVATKASPEEIKKLVGRHPEIKDVIVTLLEEGTPKPVKTEEGTKTAEEQPSEGGGITLRILLEKDAPLKGIRSFLVLQEIEKRAKVLSTNPSRLDIQNGDLIDGHYFEVTLAPDANLDEIKEAVLKHPDVAGVEVVEPGSKPPEKPSEAQGTQAEAKKPEVQPKPEVKKQPPAPREKIKMSKLIKVDVSHLDKLMNLVGELVINKGRLEQIAERLGDRELIETLSTTSRLMAELQDEIMQMRLTPVAEVFNKFPRMVRSLARKEGKEVEFIMEGTEIEVDRTILDKLGDVLVHLLRNAIDHGIEPPEERERSLENRARADLS

SEQ ID NO: 826 - protein, 207 aa, Thermococcus kodakaraensis KOD1
  misc_feature (414542)..(414542): n is a or c or g or t.
  misc_feature (786890)..(786890): n is a or c or g or t.
  misc_feature (786907)..(786907): n is a or c or g or t.
  misc_feature (786944)..(786946): n is a or c or g or t.
  misc_feature (839139)..(839139): n is a or c or g or t.
  misc_feature (1128488)..(1128488): n is a or c or g or t.
  misc_feature (1128499)..(1128499): n is a or c or g or t.
  misc_feature (1128505)..(1128506): n is a or c or g or t.
  misc_feature (1128517)..(1128518): n is a or c or g or t.
  misc_feature (1128539)..(1128540): n is a or c or g or t.
  misc_feature (1561400)..(1561400): n is a or c or g or t.
  misc_feature (1561477)..(1561477): n is a or c or g or t.
  misc_feature (1561545)..(1561545): n is a or c or g or t.
  misc_feature (1767941)..(1767941): n is a or c or g or t.
VDYEEYIKNMDEFTKSALLETFNIGASRAADALSEMLGHPVTIEVPQLEITSLKNLPEKVGEDVKVAVYVGLGNEFSGHAFFIMDFDDATRLFDLMMMQEPGTTTEIDEMVQSAIMEMGNILISAYANALSEFLGLTIEQTPPEIAIDFLPAILDFALADIGQYCDYTMLLGTVIKVEGIEFNEHFFILPKPEDMVKVLEKLTGGML

SEQ ID NO: 827 - protein, 751 aa, Thermococcus kodakaraensis KOD1
  misc_feature (414542)..(414542): n is a or c or g or t.
  misc_feature (786890)..(786890): n is a or c or g or t.
  misc_feature (786907)..(786907): n is a or c or g or t.
  misc_feature (786944)..(786946): n is a or c or g or t.
  misc_feature (839139)..(839139): n is a or c or g or t.
  misc_feature (1128488)..(1128488): n is a or c or g or t.
  misc_feature (1128499)..(1128499): n is a or c or g or t.
  misc_feature (1128505)..(1128506): n is a or c or g or t.
  misc_feature (1128517)..(1128518): n is a or c or g or t.
  misc_feature (1128539)..(1128540): n is a or c or g or t.
  misc_feature (1561400)..(1561400): n is a or c or g or t.
  misc_feature (1561477)..(1561477): n is a or c or g or t.
  misc_feature (1561545)..(1561545): n is a or c or g or t.
  misc_feature (1767941)..(1767941): n is a or c or g or t.
VVSDMEFKKKIISIVVLGFVIVAVLTSGMLLYSENNMANEIETQLTPLMQQWAEQTVSAKSEALAKEFQAFFDEVEALGTTTEKLAVIGIQELESEGYKFGEGDYVEPLNEILMEHFETVAAADSRISSVYFGDKYGNMFIYPEQELPEGYDPRVRPWYQEAVKAGKGVWSDPYQDASSGKWVVTYAVPIYRNGELIGVIGLDVFIDTLVNEIKSVKVGETGYAYVVNEDGLIIAHPNEQYVMKLNVFEQESLKPIADIVRSGKDSGVVTYEWQGVKATAAGYKIPSTGWYVFTKVPTAEVTEGVMAVIRTVQDNTQKTTYMMIVLLLAISTVIVLAAYRLISTSLMPLVALGAAAQALAEGKLSEVKEKLRGIQYLEEDEIGMLIKAFESVSKDMVGTLQGIAEKLERLAEGDLSNGLSVEAKGELREIIEDVKDMSTKMRELLGNIVGLTEKLEKHANMLAQVANDVTEAINQVNEAVQQVSIEAQRQQENINEITEGMRLVADMSEESVRAMEEFEGAVNEVVHIADEGRQKGEVSAQQIQSIQEMMGNIEAAVNRVNEMSRSIEEITNVITGIAEQTNLLALNAAIEAARAGEAGRGFAVVAQEIRNLAEESKKAADNIKEIIGRMTDEIKDAVNATQRGVSVVSESSETLRETTEYLTNIAELISDTGARLGHVKEQILRTQEEVDKALKALENLAASAEETTASAEEVSSAVEEQTAAIEELKRAADELKKIVDELRRQTSNFRL

SEQ ID NO: 828 - protein, 249 aa, Thermococcus kodakaraensis KOD1
  misc_feature (414542)..(414542): n is a or c or g or t.
  misc_feature (786890)..(786890): n is a or c or g or t.
  misc_feature (786907)..(786907): n is a or c or g or t.
  misc_feature (786944)..(786946): n is a or c or g or t.
  misc_feature (839139)..(839139): n is a or c or g or t.
  misc_feature (1128488)..(1128488): n is a or c or g or t.
  misc_feature (1128499)..(1128499): n is a or c or g or t.
  misc_feature (1128505)..(1128506): n is a or c or g or t.
  misc_feature (1128517)..(1128518): n is a or c or g or t.
  misc_feature (1128539)..(1128540): n is a or c or g or t.
  misc_feature (1561400)..(1561400): n is a or c or g or t.
  misc_feature (1561477)..(1561477): n is a or c or g or t.
  misc_feature (1561545)..(1561545): n is a or c or g or t.
  misc_feature (1767941)..(1767941): n is a or c or g or t.
VITLVVLLIGIVVAVGISAFLVSRMMQSYTREIYQVLESTIAESRSVAPVQTAPEVTEGANESELKLKTPQKTKVTKNEEELLEQLRSIINERMGKILDEAKEKKKRILTLLDFARGYALGYVTEDDYNAFLVKVLNELEEFKRLWLMKFPAKKDKEQLELMITYVSKTKLPLAIKTKDKGTIVLKHEEALIKMTEYINSAVSILDDLIEKRGGDPAVTPLEIRLSNEVRKLQEKVKKLEARLEELSAI

SEQ ID NO: 829 - protein, 344 aa, Thermococcus kodakaraensis KOD1
  misc_feature (414542)..(414542): n is a or c or g or t.
  misc_feature (786890)..(786890): n is a or c or g or t.
  misc_feature (786907)..(786907): n is a or c or g or t.
  misc_feature (786944)..(786946): n is a or c or g or t.
  misc_feature (839139)..(839139): n is a or c or g or t.
  misc_feature (1128488)..(1128488): n is a or c or g or t.
  misc_feature (1128499)..(1128499): n is a or c or g or t.
  misc_feature (1128505)..(1128506): n is a or c or g or t.
  misc_feature (1128517)..(1128518): n is a or c or g or t.
  misc_feature (1128539)..(1128540): n is a or c or g or t.
  misc_feature (1561400)..(1561400): n is a or c or g or t.
  misc_feature (1561477)..(1561477): n is a or c or g or t.
  misc_feature (1561545)..(1561545): n is a or c or g or t.
  misc_feature (1767941)..(1767941): n is a or c or g or t.
MRAMTIAQVRVKATIQSTWKGSTSIKWRDAMAYLENDRITLRYLRMGQVVGEDVFPFSSLIDIGIKIPDELKLDPQLPHFGMKFYVPGSGEKTLVLTIGSNLLIYDEKAFKTFIHRVFEVLINGVKVKLLLARMRGGALNMDAKWEDGTLRIVTVRSVRKNRRERNIIVLTSEGKPVPLFSDMEDLDIEEIEMDNKKVEAWKIKHFYEKESVVSYLFVEDKKVRLYILRYLLTYRKDYVELLIKASEEFPTIKAEFQEELERELKELGGLDEMEQQVLMALYSGMDPLTLHEMFGISEKEIEDIYDRLIDKGLLKLVMIRKVVDLTRDGRKLVNKLMKYNMGVM

SEQ ID NO: 830 - protein, 117 aa, Thermococcus kodakaraensis KOD1
  misc_feature (414542)..(414542): n is a or c or g or t.
  misc_feature (786890)..(786890): n is a or c or g or t.
  misc_feature (786907)..(786907): n is a or c or g or t.
  misc_feature (786944)..(786946): n is a or c or g or t.
  misc_feature (839139)..(839139): n is a or c or g or t.
  misc_feature (1128488)..(1128488): n is a or c or g or t.
  misc_feature (1128499)..(1128499): n is a or c or g or t.
  misc_feature (1128505)..(1128506): n is a or c or g or t.
  misc_feature (1128517)..(1128518): n is a or c or g or t.
  misc_feature (1128539)..(1128540): n is a or c or g or t.
  misc_feature (1561400)..(1561400): n is a or c or g or t.
  misc_feature (1561477)..(1561477): n is a or c or g or t.
  misc_feature (1561545)..(1561545): n is a or c or g or t.
  misc_feature (1767941)..(1767941): n is a or c or g or t.
MQNIPPQVQAMLGQLESYQQQLQLVVQQKQKVQLELTEAKKALDEIESLPDDAVVYKTVGTLIVKTTKDKAVAELKEKIETLEVRLNALERQEKKLNEKLKELTAQIQSALRPPTAG

SEQ ID NO: 831 - protein, 356 aa, Thermococcus kodakaraensis KOD1
  misc_feature (414542)..(414542): n is a or c or g or t.
  misc_feature (786890)..(786890): n is a or c or g or t.
  misc_feature (786907)..(786907): n is a or c or g or t.
  misc_feature (786944)..(786946): n is a or c or g or t.
  misc_feature (839139)..(839139): n is a or c or g or t.
  misc_feature (1128488)..(1128488): n is a or c or g or t.
  misc_feature (1128499)..(1128499): n is a or c or g or t.
  misc_feature (1128505)..(1128506): n is a or c or g or t.
  misc_feature (1128517)..(1128518): n is a or c or g or t.
  misc_feature (1128539)..(1128540): n is a or c or g or t.
  misc_feature (1561400)..(1561400): n is a or c or g or t.
  misc_feature (1561477)..(1561477): n is a or c or g or t.
  misc_feature (1561545)..(1561545): n is a or c or g or t.
  misc_feature (1767941)..(1767941): n is a or c or g or t.
VNIQNAGEARVFVSALYPEGFRQIAEYDIKNNRQIILNLGDLRKAWEDEYRKNKRLSQPLILLTIVTKDGNVSIESVSFDWKELPQSRGVVPKFRPLKNAVKTSSEQTNDVQPLYYYSRTLVDSYEWTAPTVVAQVIPDSSTKGYISYTYSINKKVGFSINAFVDKDWTRLASYNIVQKDETGSHYANFPQGSPYYIWMNVKYRYERWRVYSAGWVWYEEYVYVKDFYPSTITGGTSKPSDAQVPPIDRWIDEGVHESTGDIGYYAFHIWDLNTSDFAVDVLKFIDILEAVGKISETAAEKASLVGLFIDVGFEYDNMKAFDFDLSLDSDVQTRHHVWRGESTDISTVPVLCFKVD

SEQ ID NO: 832 - protein, 244 aa, Thermococcus kodakaraensis KOD1
  misc_feature (414542)..(414542): n is a or c or g or t.
  misc_feature (786890)..(786890): n is a or c or g or t.
  misc_feature (786907)..(786907): n is a or c or g or t.
  misc_feature (786944)..(786946): n is a or c or g or t.
  misc_feature (839139)..(839139): n is a or c or g or t.
  misc_feature (1128488)..(1128488): n is a or c or g or t.
  misc_feature (1128499)..(1128499): n is a or c or g or t.
  misc_feature (1128505)..(1128506): n is a or c or g or t.
  misc_feature (1128517)..(1128518): n is a or c or g or t.
  misc_feature (1128539)..(1128540): n is a or c or g or t.
  misc_feature (1561400)..(1561400): n is a or c or g or t.
  misc_feature (1561477)..(1561477): n is a or c or g or t.
  misc_feature (1561545)..(1561545): n is a or c or g or t.
  misc_feature (1767941)..(1767941): n is a or c or g or t.
VVKMWDTSKDYRLLVAEKSVELFLKTIEGAKFKGKWDKKRTIQLAKEMIPEIQAMRYSYIDPKELVDTPQMKALKEKALGIIEALGGEDWHHKFLSLADKSEREKVEEAVAKVRFFLNTILGLDRRLALGKINDPVIAVDIKVGEVMSVAKHPNADRLLVTNVNIGDRAITVVTNDLTVKEGNRVAVALLPPANFRGIVSEGMFLGAGEGVLKDVNGEIGGLPKGIPLEALNETRNIVEAFLKG

SEQ ID NO: 833 - protein, 430 aa, Thermococcus kodakaraensis KOD1
  misc_feature (414542)..(414542): n is a or c or g or t.
  misc_feature (786890)..(786890): n is a or c or g or t.
  misc_feature (786907)..(786907): n is a or c or g or t.
  misc_feature (786944)..(786946): n is a or c or g or t.
  misc_feature (839139)..(839139): n is a or c or g or t.
  misc_feature (1128488)..(1128488): n is a or c or g or t.
  misc_feature (1128499)..(1128499): n is a or c or g or t.
  misc_feature (1128505)..(1128506): n is a or c or g or t.
  misc_feature (1128517)..(1128518): n is a or c or g or t.
  misc_feature (1128539)..(1128540): n is a or c or g or t.
  misc_feature (1561400)..(1561400): n is a or c or g or t.
  misc_feature (1561477)..(1561477): n is a or c or g or t.
  misc_feature (1561545)..(1561545): n is a or c or g or t.
  misc_feature (1767941)..(1767941): n is a or c or g or t.
MKKAVFALLLIGLVGFSVVASGCIGGGGGGSEKIKILYTYTGSFGDAAKGKQATQAQLQQGAWVIYQVAGGTGLGVFEAINDYLKANNKKMGPPFAIGVDSAQDWIKPGAIIASMMKRVDVGVYNAVKQAEENKFEGGVVELGLKEGGVKLSTIDDVKAMFNALPEDTKKKKLQELGFNSEDELFQFLEETRNQVPDWIWQAVDELQNKIINGEIVVPKATSKDQIEQLRNAEDWAAMENLAKEWAKNEPKAQTYFNETLNQRENTKKIAIVYDVGGRGDLSFNDMAYLGASRAAKDFGLQITELQSNSENDYLPNLRSLAKSGEYDIIIAVGFMMTNAVKQVAQEYPNQRFVIIDGYDPEMPHNVQMVLFKENEGSALAGALASLIALNDGKDTIGIVLGMEIPVLYKFEGGYRFGAYWGLDYYENHKK

SEQ ID NO: 834 - protein, 508 aa, Thermococcus kodakaraensis KOD1
  misc_feature (414542)..(414542): n is a or c or g or t.
  misc_feature (786890)..(786890): n is a or c or g or t.
  misc_feature (786907)..(786907): n is a or c or g or t.
  misc_feature (786944)..(786946): n is a or c or g or t.
  misc_feature (839139)..(839139): n is a or c or g or t.
  misc_feature (1128488)..(1128488): n is a or c or g or t.
  misc_feature (1128499)..(1128499): n is a or c or g or t.
  misc_feature (1128505)..(1128506): n is a or c or g or t.
  misc_feature (1128517)..(1128518): n is a or c or g or t.
  misc_feature (1128539)..(1128540): n is a or c or g or t.
  misc_feature (1561400)..(1561400): n is a or c or g or t.
  misc_feature (1561477)..(1561477): n is a or c or g or t.
  misc_feature (1561545)..(1561545): n is a or c or g or t.
  misc_feature (1767941)..(1767941): n is a or c or g or t.
MEEKTPILEMRDIVKVYPDGTKALHGVTVQVYEGEILGLLGENGAGKTTLMKILFGMLKPTNGKIFLRGKEVRFKSPADAIANGIGMVHQHFTLVDVFTALENIILGMEGHGLFSKIDLEKARGEIKALMDELNFQVPLDVPVENLPVGVQQRVEILKMLYRNVDILILDEPTAVLTPIEVKELFAVLRKLKAQGKTIIFISHKLNEVMEITDRVTVIRKGKVIGTVKTSEATPQLLARMMVGRDVVLRIQKPPKEPGNTVLKVENLWVKGDRGEEAVRGVSFEVRAGEIFGIAGVEGNGQSELIEAISGLRRVEKGRIYLNGVDITGKSPRDLYDMGFAHIPEDRTHMGLVIEMSVMENSILGMHWRKEFSRGFGLIDWGRVKKHASELIEEFEISAPGVNAPAKSLSGGNQQKLIVAREVSKKPEFIIAAQPTRGVDVASTEYIRNYLVKLRNENKAVLLVSADLDEVLQLSDRMAIMYEGQFMGVVKPEEVTEEQIGLMMGGVKA

SEQ ID NO: 835 - protein, 328 aa, Thermococcus kodakaraensis KOD1
  misc_feature (414542)..(414542): n is a or c or g or t.
  misc_feature (786890)..(786890): n is a or c or g or t.
  misc_feature (786907)..(786907): n is a or c or g or t.
  misc_feature (786944)..(786946): n is a or c or g or t.
  misc_feature (839139)..(839139): n is a or c or g or t.
  misc_feature (1128488)..(1128488): n is a or c or g or t.
  misc_feature (1128499)..(1128499): n is a or c or g or t.
  misc_feature (1128505)..(1128506): n is a or c or g or t.
  misc_feature (1128517)..(1128518): n is a or c or g or t.
  misc_feature (1128539)..(1128540): n is a or c or g or t.
  misc_feature (1561400)..(1561400): n is a or c or g or t.
  misc_feature (1561477)..(1561477): n is a or c or g or t.
  misc_feature (1561545)..(1561545): n is a or c or g or t.
  misc_feature (1767941)..(1767941): n is a or c or g or t.
VKTVKPRVYELSPEEVRQVLGVIESYGVNEVEVENLASFLDDMIESPKERLEYARRLLNEGNVDKAVLVVGDGTGTLIVKIENVAEIRVFVREYEKLMRALGLRGDRVKLIAQGAEAKIYEADFEEVFGVPLLKERVIVKHRIPKRYRIKEIDVKLRKERTVREARILHRAKEFGVNCPHVYEVDLRDMKLVMEYIEGQRLKELLESVPMEERLELCREVGRQIGKLHKAGIVHGDLTTSNMIFRDGKVYLIDFGLADFDSTLEARGVDLHLLRRAMESTHYTWFERGFEAVLEGYAEVLGEEARKEVEEKMREIESRGRYRERSWLS

SEQ ID NO: 836 - protein, 247 aa, Thermococcus kodakaraensis KOD1
  misc_feature (414542)..(414542): n is a or c or g or t.
  misc_feature (786890)..(786890): n is a or c or g or t.
  misc_feature (786907)..(786907): n is a or c or g or t.
  misc_feature (786944)..(786946): n is a or c or g or t.
  misc_feature (839139)..(839139): n is a or c or g or t.
  misc_feature (1128488)..(1128488): n is a or c or g or t.
  misc_feature (1128499)..(1128499): n is a or c or g or t.
  misc_feature (1128505)..(1128506): n is a or c or g or t.
  misc_feature (1128517)..(1128518): n is a or c or g or t.
  misc_feature (1128539)..(1128540): n is a or c or g or t.
  misc_feature (1561400)..(1561400): n is a or c or g or t.
  misc_feature (1561477)..(1561477): n is a or c or g or t.
  misc_feature (1561545)..(1561545): n is a or c or g or t.
  misc_feature (1767941)..(1767941): n is a or c or g or t.
VRGAVMIKAVLFDLDDTLVDTTKLAELARRNAVENMVRHGLPVDFDTAYNELLELINEYGSNFGRHFDYLLRRLDLPQNPKWIAAGVIAYHNTKFAYLRSVKNARRVLLELKREGYKVAVVTDGDPIKQWEKILRLELDEYFDDVFISDYLGVKKPHPKIFLKALRKLDVKPEEAVMVGDRLYSDIYGAKNVGMTTVWFRYGKYRDREMEYVEYADFTIERLEDLLKIIRGLNNEEKARSDTEVHAD

SEQ ID NO: 837 - protein, 93 aa, Thermococcus kodakaraensis KOD1
  misc_feature (414542)..(414542): n is a or c or g or t.
  misc_feature (786890)..(786890): n is a or c or g or t.
  misc_feature (786907)..(786907): n is a or c or g or t.
  misc_feature (786944)..(786946): n is a or c or g or t.
  misc_feature (839139)..(839139): n is a or c or g or t.
  misc_feature (1128488)..(1128488): n is a or c or g or t.
  misc_feature (1128499)..(1128499): n is a or c or g or t.
  misc_feature (1128505)..(1128506): n is a or c or g or t.
  misc_feature (1128517)..(1128518): n is a or c or g or t.
  misc_feature (1128539)..(1128540): n is a or c or g or t.
  misc_feature (1561400)..(1561400): n is a or c or g or t.
  misc_feature (1561477)..(1561477): n is a or c or g or t.
  misc_feature (1561545)..(1561545): n is a or c or g or t.
  misc_feature (1767941)..(1767941): n is a or c or g or t.
MLWLERTPLRKLARLYIYYVERVRKKAHPYVEKWGFIGLTVFVAVPLPGTGVWTGALAAYLFGIEKKRTVPALILGGLLSMGITIGPALGVFG

SEQ ID NO: 838 - protein, 315 aa, Thermococcus kodakaraensis KOD1
  misc_feature (414542)..(414542): n is a or c or g or t.
  misc_feature (786890)..(786890): n is a or c or g or t.
  misc_feature (786907)..(786907): n is a or c or g or t.
  misc_feature (786944)..(786946): n is a or c or g or t.
  misc_feature (839139)..(839139): n is a or c or g or t.
  misc_feature (1128488)..(1128488): n is a or c or g or t.
  misc_feature (1128499)..(1128499): n is a or c or g or t.
  misc_feature (1128505)..(1128506): n is a or c or g or t.
  misc_feature (1128517)..(1128518): n is a or c or g or t.
  misc_feature (1128539)..(1128540): n is a or c or g or t.
  misc_feature (1561400)..(1561400): n is a or c or g or t.
  misc_feature (1561477)..(1561477): n is a or c or g or t.
  misc_feature (1561545)..(1561545): n is a or c or g or t.
  misc_feature (1767941)..(1767941): n is a or c or g or t.
VRGLKGIFLFFMVIILISPFVGRMLFNPLSMSDLDKTILLQVRLPRVVTSLLVGASLSLAGLTFQNVFRNPLAGPNLLGVTSGSAFGAVLAILLSADPYVIQISAFLLGLLAVGVVWRLSRLVGNGILGLILAGIAVSAFFSALVGMAKYLADPYDKLPAIVFWLLGSFAGLRWDDVRIMLVPLVVSIVGITLLRWPLNVISLSEEEARGLGVNVRLYRGIFIALAALGVSASTAMAGMISWVGLVSPHVARLSVGHDTRTLVPASALVGASLLLVCDDVARSVTTFEVPLGVVTALIGAPTLIIILRRGIYAKG

SEQ ID NO: 839 - protein, 253 aa, Thermococcus kodakaraensis KOD1
  misc_feature (414542)..(414542): n is a or c or g or t.
  misc_feature (786890)..(786890): n is a or c or g or t.
  misc_feature (786907)..(786907): n is a or c or g or t.
  misc_feature (786944)..(786946): n is a or c or g or t.
  misc_feature (839139)..(839139): n is a or c or g or t.
  misc_feature (1128488)..(1128488): n is a or c or g or t.
  misc_feature (1128499)..(1128499): n is a or c or g or t.
  misc_feature (1128505)..(1128506): n is a or c or g or t.
  misc_feature (1128517)..(1128518): n is a or c or g or t.
  misc_feature (1128539)..(1128540): n is a or c or g or t.
  misc_feature (1561400)..(1561400): n is a or c or g or t.
  misc_feature (1561477)..(1561477): n is a or c or g or t.
  misc_feature (1561545)..(1561545): n is a or c or g or t.
  misc_feature (1767941)..(1767941): n is a or c or g or t.
MKKVLSLLLVLMACGCIGASEKQTPSNVSTPSYSKISTYPLGNPPNWSNWTLAVLNDNRTYTWEELSKLSNDTMRIPDLNLGRTVEWRGVRPQRLGRGDFVTVINENGEVVSIPYNVSMLLAIYMDGKPMSTPIRLVASLSYGCRCNWLPGIRLVDFVNRSKALGVYGEVNNELWLSPRSFAALGNGSVHLNELLDKADVRPIARRVIFITPNGELPYSLAKIKKLNPLVVFEGKFKVPSLGIEDLRGIRLEG

SEQ ID NO: 840 - protein, 220 aa, Thermococcus kodakaraensis KOD1
  misc_feature (414542)..(414542): n is a or c or g or t.
  misc_feature (786890)..(786890): n is a or c or g or t.
  misc_feature (786907)..(786907): n is a or c or g or t.
  misc_feature (786944)..(786946): n is a or c or g or t.
  misc_feature (839139)..(839139): n is a or c or g or t.
  misc_feature (1128488)..(1128488): n is a or c or g or t.
  misc_feature (1128499)..(1128499): n is a or c or g or t.
  misc_feature (1128505)..(1128506): n is a or c or g or t.
  misc_feature (1128517)..(1128518): n is a or c or g or t.
  misc_feature (1128539)..(1128540): n is a or c or g or t.
  misc_feature (1561400)..(1561400): n is a or c or g or t.
  misc_feature (1561477)..(1561477): n is a or c or g or t.
  misc_feature (1561545)..(1561545): n is a or c or g or t.
  misc_feature (1767941)..(1767941): n is a or c or g or t.
MRLIILNDNVPAEGLLNDWGWSVLVEGRNRFIFDADTNPLVLAHNSKALGVSLNDLDFAFLSHWHYDHYGGLPYVGELNPGLRLYAPPGNRAMALRWGFDVMEVFTAGEIAKGIWTSGPLDDFEQALGVETSSGLVVIVGCSHPGVDRLTKALLDVSGYEKAHLVIGGYHGPSRRTLDRLAEMAEFIAPAHCSGDFAKAYVRKTYPEKYVGVMTGSIIEV

SEQ ID NO: 841 - protein, 351 aa, Thermococcus kodakaraensis KOD1
  misc_feature (414542)..(414542): n is a or c or g or t.
  misc_feature (786890)..(786890): n is a or c or g or t.
  misc_feature (786907)..(786907): n is a or c or g or t.
  misc_feature (786944)..(786946): n is a or c or g or t.
  misc_feature (839139)..(839139): n is a or c or g or t.
  misc_feature (1128488)..(1128488): n is a or c or g or t.
  misc_feature (1128499)..(1128499): n is a or c or g or t.
  misc_feature (1128505)..(1128506): n is a or c or g or t.
  misc_feature (1128517)..(1128518): n is a or c or g or t.
  misc_feature (1128539)..(1128540): n is a or c or g or t.
  misc_feature (1561400)..(1561400): n is a or c or g or t.
  misc_feature (1561477)..(1561477): n is a or c or g or t.
  misc_feature (1561545)..(1561545): n is a or c or g or t.
  misc_feature (1767941)..(1767941): n is a or c or g or t.
MDGFEKELKEFEITNKATDLFLFSISVHMHELGLKSFFLYLLYFQLQNSEALVNTSTYYKHFCLSKMFKFQIQNFFGGSMRGVKILLLVGVLAGILLVAGCIGSENAPGSSEKKPFAGQTVVVCSGAGLMKPMEELIGMFENETGAKVEVHYGGSSEIFGILQTTCGCDVFVPGAWYYTQQAAERGYILNGTVKNVTYHIPVIAVPKGNPKGIHSLEDLAKPGVRVVLGDPKAAAIGKVSRKVLEKNGLWEEVKPNVVTFTPTVNQLLIYIATGQADAAIIWEDMTTWAQSKGKIEVVEIPSEQNIIKTIPTAVTVCAEKDGHLEVAKAFNGFIANHTEIWEKWGFRPWRG

SEQ ID NO: 842 - protein, 354 aa, Thermococcus kodakaraensis KOD1
  misc_feature (414542)..(414542): n is a or c or g or t.
  misc_feature (786890)..(786890): n is a or c or g or t.
  misc_feature (786907)..(786907): n is a or c or g or t.
  misc_feature (786944)..(786946): n is a or c or g or t.
  misc_feature (839139)..(839139): n is a or c or g or t.
  misc_feature (1128488)..(1128488): n is a or c or g or t.
  misc_feature (1128499)..(1128499): n is a or c or g or t.
  misc_feature (1128505)..(1128506): n is a or c or g or t.
  misc_feature (1128517)..(1128518): n is a or c or g or t.
  misc_feature (1128539)..(1128540): n is a or c or g or t.
  misc_feature (1561400)..(1561400): n is a or c or g or t.
  misc_feature (1561477)..(1561477): n is a or c or g or t.
  misc_feature (1561545)..(1561545): n is a or c or g or t.
  misc_feature (1767941)..(1767941): n is a or c or g or t.
VVEVPLLEVENLSIDLGDFHLRDVSLSVEENDYLTIIGPTGAGKSVLLEAIAGFYPLLKGRVILEGKDITREPPERRGMSIVYQDYVLFPHMTVFENIAFGLRKKGLVRAEIEREVRHIAEELHIDHLLHRKPGTLSGGEQQRTALARALVVRPRVLLMDEPFSALDSKTREKLRSLVRNVIDEYGTTVLHVTHDFEDVFALAKHVAVMRDGRIVQFGTPEEVFSRPADEFIADFVRTNLLRGEVVGKEGELTAVRVGNVILYTADDAEGKVTLSIRPEDIILAREPGECSAQNVVPVLIESLEKRGHLVWLSLSSEGVPLSAVVTPNAAELLGIKPGEKFYAMFKASALRVIK

SEQ ID NO: 843 - protein, 66 aa, Thermococcus kodakaraensis KOD1
  misc_feature (414542)..(414542): n is a or c or g or t.
  misc_feature (786890)..(786890): n is a or c or g or t.
  misc_feature (786907)..(786907): n is a or c or g or t.
  misc_feature (786944)..(786946): n is a or c or g or t.
  misc_feature (839139)..(839139): n is a or c or g or t.
  misc_feature (1128488)..(1128488): n is a or c or g or t.
  misc_feature (1128499)..(1128499): n is a or c or g or t.
  misc_feature (1128505)..(1128506): n is a or c or g or t.
  misc_feature (1128517)..(1128518): n is a or c or g or t.
  misc_feature (1128539)..(1128540): n is a or c or g or t.
  misc_feature (1561400)..(1561400): n is a or c or g or t.
  misc_feature (1561477)..(1561477): n is a or c or g or t.
  misc_feature (1561545)..(1561545): n is a or c or g or t.
  misc_feature (1767941)..(1767941): n is a or c or g or t.
MMEIIEAVYENGVLIPLKKPKLKEHSKVIIKIIDEEELDKLLDSLIIEKVENIDYKRLKEAYYESL

SEQ ID NO: 844 - protein, 102 aa, Thermococcus kodakaraensis KOD1
  misc_feature (414542)..(414542): n is a or c or g or t.
  misc_feature (786890)..(786890): n is a or c or g or t.
  misc_feature (786907)..(786907): n is a or c or g or t.
  misc_feature (786944)..(786946): n is a or c or g or t.
  misc_feature (839139)..(839139): n is a or c or g or t.
  misc_feature (1128488)..(1128488): n is a or c or g or t.
  misc_feature (1128499)..(1128499): n is a or c or g or t.
  misc_feature (1128505)..(1128506): n is a or c or g or t.
  misc_feature (1128517)..(1128518): n is a or c or g or t.
  misc_feature (1128539)..(1128540): n is a or c or g or t.
  misc_feature (1561400)..(1561400): n is a or c or g or t.
  misc_feature (1561477)..(1561477): n is a or c or g or t.
  misc_feature (1561545)..(1561545): n is a or c or g or t.
  misc_feature (1767941)..(1767941): n is a or c or g or t.
MAIMRLWHGRVPREKRDAYERFLIERAVPDYSSVEGLLKLYFTRRDEEKETHFLLVTIWDSWESIKKFAGENPELAKYYPEDDEFLLEKEKYVQHYEIFYEK

SEQ ID NO: 845 - protein, 153 aa, Thermococcus kodakaraensis KOD1
  misc_feature (414542)..(414542): n is a or c or g or t.
  misc_feature (786890)..(786890): n is a or c or g or t.
  misc_feature (786907)..(786907): n is a or c or g or t.
  misc_feature (786944)..(786946): n is a or c or g or t.
  misc_feature (839139)..(839139): n is a or c or g or t.
  misc_feature (1128488)..(1128488): n is a or c or g or t.
  misc_feature (1128499)..(1128499): n is a or c or g or t.
  misc_feature (1128505)..(1128506): n is a or c or g or t.
  misc_feature (1128517)..(1128518): n is a or c or g or t.
  misc_feature (1128539)..(1128540): n is a or c or g or t.
  misc_feature (1561400)..(1561400): n is a or c or g or t.
  misc_feature (1561477)..(1561477): n is a or c or g or t.
  misc_feature (1561545)..(1561545): n is a or c or g or t.
  misc_feature (1767941)..(1767941): n is a or c or g or t.
MAEMIIPYPQLQKILERTCELAVIKPRAEEMMDIVEKKLADLFEVAYENAKAENADTIKMRHIPITKGFRNSMNLFRAVIEDEGVEIEPIRKYVLKKIPGDRPLEEDVVNELPIIAGTLFVLIGRVIKALHPEIKNVYPEHIEEAKKVLDYTL

SEQ ID NO: 846 - protein, 380 aa, Thermococcus kodakaraensis KOD1
  misc_feature (414542)..(414542): n is a or c or g or t.
  misc_feature (786890)..(786890): n is a or c or g or t.
  misc_feature (786907)..(786907): n is a or c or g or t.
  misc_feature (786944)..(786946): n is a or c or g or t.
  misc_feature (839139)..(839139): n is a or c or g or t.
  misc_feature (1128488)..(1128488): n is a or c or g or t.
  misc_feature (1128499)..(1128499): n is a or c or g or t.
  misc_feature (1128505)..(1128506): n is a or c or g or t.
  misc_feature (1128517)..(1128518): n is a or c or g or t.
  misc_feature (1128539)..(1128540): n is a or c or g or t.
  misc_feature (1561400)..(1561400): n is a or c or g or t.
  misc_feature (1561477)..(1561477): n is a or c or g or t.
  misc_feature (1561545)..(1561545): n is a or c or g or t.
  misc_feature (1767941)..(1767941): n is a or c or g or t.
VGKMGELFVLGVILASLFASSSPVSAEETLTVYSYDSIEPWMKEIIPIFEQKYNVKVRLVLFGDAGEVLSRLIMEKDNPQADVVIGIDNSYLQKAIKEGILIPYKPENAKYIPDWIIKNFDPEFHLTPYDYGAIAIVYKKNEVPNPPKTFEELTKPEWKGKLIVENPLTSSTGMAFLLWTIAVYGDKWPYYWEALRENDVIVVKGWSAGWEMWDKGQAPLFVSYATDPAYSACNYNDTSIGAVFLSNTAYVQIEGAGIVNGTKHLELAKAFVNFLISKEAQEKLPLNQWMYPVNSEVELPECFSYALDVGKAKVVSIPADELAKNTDKWLKEWRAIMVEGKSASEISPTSTASAEKSGGICGPALLVGLAILPLALRRRG

SEQ ID NO: 847 - protein, 431 aa, Thermococcus kodakaraensis KOD1
  misc_feature (414542)..(414542): n is a or c or g or t.
  misc_feature (786890)..(786890): n is a or c or g or t.
  misc_feature (786907)..(786907): n is a or c or g or t.
  misc_feature (786944)..(786946): n is a or c or g or t.
  misc_feature (839139)..(839139): n is a or c or g or t.
  misc_feature (1128488)..(1128488): n is a or c or g or t.
  misc_feature (1128499)..(1128499): n is a or c or g or t.
  misc_feature (1128505)..(1128506): n is a or c or g or t.
  misc_feature (1128517)..(1128518): n is a or c or g or t.
  misc_feature (1128539)..(1128540): n is a or c or g or t.
  misc_feature (1561400)..(1561400): n is a or c or g or t.
  misc_feature (1561477)..(1561477): n is a or c or g or t.
  misc_feature (1561545)..(1561545): n is a or c or g or t.
  misc_feature (1767941)..(1767941): n is a or c or g or t.
VIDKVYCADVTPEMEGKKVKLAGWVYRKREVGKKVFIVLRDSSGIVQVVFSKDLNEEAYREAKKVGIESSVIIEGTVKADPRAPTGAEVQGEKLQIIQNVDFFPITKDASDEFLLDVRHLHLRSPKVAAIMKVKGTLMQAAREWLLQDGWYEVFPPILVTGAVEGGATLFKLKYFDRYAYLSQSAQLYLEAAIFGLEKVWSLTPSFRAEKSRTRRHLTEFWHLELEAAWMDLWDIMKVEEELVSYMVQRTLELRKKEIELYRKDDIKTLKNAVPPFPRISYDEAIDILQSKGVNIEWGEDMGADEERVLTEEFESPFFVYGYPKHIKAFYMKEDPEDPRKVLAADMLAPEGYGEIIGGSQREDDYDKLVQRILEEGMKPEDYEWYLDLRKYGSVPHSGFGLGLERLVAWVLKLDHVRWATLFPRTPSRLYP

SEQ ID NO: 848 - protein, 1390 aa, Thermococcus kodakaraensis KOD1
  misc_feature (414542)..(414542): n is a or c or g or t.
  misc_feature (786890)..(786890): n is a or c or g or t.
  misc_feature (786907)..(786907): n is a or c or g or t.
  misc_feature (786944)..(786946): n is a or c or g or t.
  misc_feature (839139)..(839139): n is a or c or g or t.
  misc_feature (1128488)..(1128488): n is a or c or g or t.
  misc_feature (1128499)..(1128499): n is a or c or g or t.
  misc_feature (1128505)..(1128506): n is a or c or g or t.
  misc_feature (1128517)..(1128518): n is a or c or g or t.
  misc_feature (1128539)..(1128540): n is a or c or g or t.
  misc_feature (1561400)..(1561400): n is a or c or g or t.
  misc_feature (1561477)..(1561477): n is a or c or g or t.
  misc_feature (1561545)..(1561545): n is a or c or g or t.
  misc_feature (1767941)..(1767941): n is a or c or g or t.
MSGIRWAEREYTDEEIYSILSEPVREWFKRKFGTFTPPQRYAVLEIHKGENVLISSPTGSGKTLSAFLSAINELILLGKESKLEDKIYVLYVSPLRALNNDIKRNLEGPLAEIKEVAKELGYELPEIRVGIRTSDTSSYEKSKMVKKPPHILITTPESLAIALNAPKFSERLKTVKYVIIDEVHALAENKRGSHLALSIERLQEMAENEFVRIGLSATIHPLEEVAKFVFGFNDDGTPRPGLIVDVSFAKQTEIKVESVVEDLIYTDAGTLSDALYNRLAELIREHRTTLIFTNTRSGAERVAFNLKKRFPEFEGLIEAHHSSLSREVRLDVEEKLKRGELKAVVCVSGDSKILTGKGPVEIGRLNSNMIAGIWRFQTELVRFEEPHRVEYRREGVKIRTRLGFEIKATKEHKFLTVDENGELRWVEAWKLKEGNWVGVVRRLPSPNVKVSILDLLPPNAYLKLKGEFLRELKLSIQAKFGSIRTYAKKKRWSESYLVKQLNGVYPFRWERLSAVLKDLDLRMTENDVERITSDKGKYSLPIEFTPSMARLLGFWMADGSWKGGTLTLFSSDRKMLEKYKELCKEEFGVVGRIRMLNESTYSLEISFNLLPAIFKNLTGNTERKSKLGTFPSIIYSLPEEHKREFLAGYFDGDGFLEVKGGRVYSAGFSTFNKRFAEGIRDILLQLGIVSSIRAREYDEVQKFKGRVIPKKGASYTVSVLGGEYLKRFFDAVRPWRSDYEGWEGMYNEGYSNSDVVPNLGKRLRSIRERLGISAYRMSKMGFYNPVRVELGEREISRRNLRLLVEFYERVAKEKRVEDVLEELSYLRELAEGDVFFDRITSVEPAYIDVAYGIINSETENYIVEGFISKNSSTSLELGIDIGTIDLVVLIGSPKSVNRALQRIGRAGHRLHDVSKGVILALDRDDLVEVTVLAHNARNRRLDRVRIPKNPLDVLVQHIVGMALYKVWEVEEAYRLVRRAYPFHELPFEDFMSVLKYLSGGYEGLEDRKVYAKIWLEDGKFGRRGKMTRAIYYMNVGTIPDEAKIRVYTMDKQMIGTVEEEFAERLMPGDIFVLAGRTYEFIKSRGNKIYVVPREGAKPTIPAWFSEMLPLSFDLALDVQRFRREVKELLNKKRAKSLLMRKYGIDERAAKAIIAYFREQERYSTVPDDETVLVEEVEKENTYEYFFHTLIGRRANDALSRAFAYAVGRRKGVNVGIALNDNGFLLRVPKEARLSEAEIRELFQLEDLREILKRALDNTELLKRRFRHVANRGFLILRRYVGGSKRLGRQQVIAVSLLKVLKEHYPDFPLLKEVYREIMEDKMDVENAELFLSWVREGKIKVVFERNELPSPFAFNLEAIGSSDVVLMEDRREMIKALYRKIMALIGENAT

SEQ ID NO: 849 - protein, 554 aa, Thermococcus kodakaraensis KOD1
  misc_feature (414542)..(414542): n is a or c or g or t.
  misc_feature (786890)..(786890): n is a or c or g or t.
  misc_feature (786907)..(786907): n is a or c or g or t.
  misc_feature (786944)..(786946): n is a or c or g or t.
  misc_feature (839139)..(839139): n is a or c or g or t.
  misc_feature (1128488)..(1128488): n is a or c or g or t.
  misc_feature (1128499)..(1128499): n is a or c or g or t.
  misc_feature (1128505)..(1128506): n is a or c or g or t.
  misc_feature (1128517)..(1128518): n is a or c or g or t.
  misc_feature (1128539)..(1128540): n is a or c or g or t.
  misc_feature (1561400)..(1561400): n is a or c or g or t.
  misc_feature (1561477)..(1561477): n is a or c or g or t.
  misc_feature (1561545)..(1561545): n is a or c or g or t.
  misc_feature (1767941)..(1767941): n is a or c or g or t.
MVVEMAWNDWIVKHAKALVVLWILVVILTAPFAAKLSDLTNYSTDQFLPKDVESVKTMDTLEKEFPSFTTSENQTYMIIHGIDVNDPKTRDAYERFKVEAKPYGDNFTSYYDALDILQNESYNITLNITKTAANLSGILYDSAVNGSDTYRMLLLGIENLTNQVRLLNETLPELADAYLKLETNLTILYNQTLELKGALNETDMAYVQLHQNLTKASTQLKELNSTIAMLNIKLYNLSESYAKAYLGAMGVYEALSAKTNAYQTCNLDPQTAQAVAAQLGVPVEFVYAVFNATYSAYHTYGPSAITDELLANVTGGIISNTLTYSLEKSLVKAYSYAFYSGVIAFDRTHGSNYTLLESGENAEAAVIEIAENALQGTPEVVARAGGTYAVPGFGEVSAKVLAKVLNVAVGLGRNPTAGAVEDATVEVAKAILDGSPLLSLPNADYVLKTLLVSGPTKELEESILANALAEKLSEDQRKMAEPVAKTVTTFDPMAEGVLSQNSSALKEATVSLLSEILREKGVELPNDVLAKVYDSNGNVGPIAKEILVKETARQ

SEQ ID NO: 850 - protein, 727 aa, Thermococcus kodakaraensis KOD1
  misc_feature (414542)..(414542): n is a or c or g or t.
  misc_feature (786890)..(786890): n is a or c or g or t.
  misc_feature (786907)..(786907): n is a or c or g or t.
  misc_feature (786944)..(786946): n is a or c or g or t.
  misc_feature (839139)..(839139): n is a or c or g or t.
  misc_feature (1128488)..(1128488): n is a or c or g or t.
  misc_feature (1128499)..(1128499): n is a or c or g or t.
  misc_feature (1128505)..(1128506): n is a or c or g or t.
  misc_feature (1128517)..(1128518): n is a or c or g or t.
  misc_feature (1128539)..(1128540): n is a or c or g or t.
  misc_feature (1561400)..(1561400): n is a or c or g or t.
  misc_feature (1561477)..(1561477): n is a or c or g or t.
  misc_feature (1561545)..(1561545): n is a or c or g or t.
  misc_feature (1767941)..(1767941): n is a or c or g or t.
VKDALREVLLAVAENYPMSETEIEELTKEKVAELVEEFMKDTESKLGMRIDPAKLAEIAFKFKDNPEGMDREDVAPVEKDVYTALYNKAKLYINMLKSDDNRTMLVIFVPKALKGVNDLEKQSKFQYENSIKAKEVALKEFGKLSPSVEVYVTGTPIQTYEAIKYGKEDNDKTTKFSIAGAFIVLLILMGVAFLATLLPFTGVATATLTALGILYLLAKGDILDVGSWAQMLTVTTALGLGIDYSTYYLHRFREYLAEGYDHNKAASEALKRAKDAVLASASTDIIAFASFVLAYEFPIFKTMGIIAPLAVIVVLLASLTFIPSITVLIGDKPIFWWPRHIEHHLENIDLHERSRIAEWAVKHAKVVTIIALLIAVPAAYNFVNFNGTHDIKLFIPKDSETYHFLQLSEDTVGAGVTSPTYVVIDLGHKVSDSDLARINELVDRISKVSGVRYVYTITQPFGERIDNATLDELTKFEGDRYISKDRHKVLIQVTGEYGATDDRSKDMVREIRSIVEDEKDSRKIADGMVGGNTALALDLSNLINDVFWHRIFPVALLLMFLSLIPTLKGLPAVITTMGTIAAGVLLSIGVSSWLFEKVFGQQVMWFLPMLVFIVLMGVGIDYNSFYLVKARDEFERRKPEEALIVAAGTMDTLVVGLAAVLAATYGSLMTGATWGIREIGFALALGVLLTATAVVYFIGPATMALFGEKAWWPLFNNREKVSPRRRK

SEQ ID NO: 851 - protein, 92 aa, Thermococcus kodakaraensis KOD1
  misc_feature (414542)..(414542): n is a or c or g or t.
  misc_feature (786890)..(786890): n is a or c or g or t.
  misc_feature (786907)..(786907): n is a or c or g or t.
  misc_feature (786944)..(786946): n is a or c or g or t.
  misc_feature (839139)..(839139): n is a or c or g or t.
  misc_feature (1128488)..(1128488): n is a or c or g or t.
  misc_feature (1128499)..(1128499): n is a or c or g or t.
  misc_feature (1128505)..(1128506): n is a or c or g or t.
  misc_feature (1128517)..(1128518): n is a or c or g or t.
  misc_feature (1128539)..(1128540): n is a or c or g or t.
  misc_feature (1561400)..(1561400): n is a or c or g or t.
  misc_feature (1561477)..(1561477): n is a or c or g or t.
  misc_feature (1561545)..(1561545): n is a or c or g or t.
  misc_feature (1767941)..(1767941): n is a or c or g or t.
MESNLREIERKQNMIRAINRVSPCEDILKKIDELLYTKKHKKWDRKKAEITPKLFEMMIKEKKAPLEFKEILEEAIRKCGFEPEFSDEFEYI

SEQ ID NO: 852 - protein, 289 aa, Thermococcus kodakaraensis KOD1
  misc_feature (414542)..(414542): n is a or c or g or t.
  misc_feature (786890)..(786890): n is a or c or g or t.
  misc_feature (786907)..(786907): n is a or c or g or t.
  misc_feature (786944)..(786946): n is a or c or g or t.
  misc_feature (839139)..(839139): n is a or c or g or t.
  misc_feature (1128488)..(1128488): n is a or c or g or t.
  misc_feature (1128499)..(1128499): n is a or c or g or t.
  misc_feature (1128505)..(1128506): n is a or c or g or t.
  misc_feature (1128517)..(1128518): n is a or c or g or t.
  misc_feature (1128539)..(1128540): n is a or c or g or t.
  misc_feature (1561400)..(1561400): n is a or c or g or t.
  misc_feature (1561477)..(1561477): n is a or c or g or t.
  misc_feature (1561545)..(1561545): n is a or c or g or t.
  misc_feature (1767941)..(1767941): n is a or c or g or t.
VLPIKIGLIDEREVIIELSKEVSGKELVEASTYLREPMLVPLYKPPLREFMAQYLYSSGPVVEDLIGEAFTEEEILFSEVYRAILHAVADGKSKSGEIASYLVSQGLLDSPSSIQKYLKVLSTMDIIRKVPIFRKRRRFSYSIASPLLDLHFYLSSKYAYTELETPLEFIRSAVNEKVPRHVEKYIESLLGKVYGLRPVRIEEPDLEVDIALQGFKRLELVGEVKWKSRVKREEVWKIEEKLSRFNCRKVLVVPDESVLESEPKTVEVLTPEDLLTLAQKSLRKELGEE

SEQ ID NO: 853 - protein, 31 aa, Thermococcus kodakaraensis KOD1
  misc_feature (414542)..(414542): n is a or c or g or t.
  misc_feature (786890)..(786890): n is a or c or g or t.
  misc_feature (786907)..(786907): n is a or c or g or t.
  misc_feature (786944)..(786946): n is a or c or g or t.
  misc_feature (839139)..(839139): n is a or c or g or t.
  misc_feature (1128488)..(1128488): n is a or c or g or t.
  misc_feature (1128499)..(1128499): n is a or c or g or t.
  misc_feature (1128505)..(1128506): n is a or c or g or t.
  misc_feature (1128517)..(1128518): n is a or c or g or t.
  misc_feature (1128539)..(1128540): n is a or c or g or t.
  misc_feature (1561400)..(1561400): n is a or c or g or t.
  misc_feature (1561477)..(1561477): n is a or c or g or t.
  misc_feature (1561545)..(1561545): n is a or c or g or t.
  misc_feature (1767941)..(1767941): n is a or c or g or t.
VEIKKPLLGVSEDELSDLGIGGRYIFKVLWD

SEQ ID NO: 854 - protein, 153 aa, Thermococcus kodakaraensis KOD1
  misc_feature (414542)..(414542): n is a or c or g or t.
  misc_feature (786890)..(786890): n is a or c or g or t.
  misc_feature (786907)..(786907): n is a or c or g or t.
  misc_feature (786944)..(786946): n is a or c or g or t.
  misc_feature (839139)..(839139): n is a or c or g or t.
  misc_feature (1128488)..(1128488): n is a or c or g or t.
  misc_feature (1128499)..(1128499): n is a or c or g or t.
  misc_feature (1128505)..(1128506): n is a or c or g or t.
  misc_feature (1128517)..(1128518): n is a or c or g or t.
  misc_feature (1128539)..(1128540): n is a or c or g or t.
  misc_feature (1561400)..(1561400): n is a or c or g or t.
  misc_feature (1561477)..(1561477): n is a or c or g or t.
  misc_feature (1561545)..(1561545): n is a or c or g or t.
  misc_feature (1767941)..(1767941): n is a or c or g or t.
MIIHQEVLKVAIITLVGEKLAKPGVEFIFYGPAEPCKTCKLAGVCVGNLEPGRRYKILRVRSMPSHSCPLHEGKVRVVEVVEPSIEVAIEPRLAVVGSVITLKLEDCPDLDKRDLFKPEGLFDGDSVKIIEITGEVECNGKTYKIAKVMRKKE

SEQ ID NO: 855 - protein, 269 aa, Thermococcus kodakaraensis KOD1
  misc_feature (414542)..(414542): n is a or c or g or t.
  misc_feature (786890)..(786890): n is a or c or g or t.
  misc_feature (786907)..(786907): n is a or c or g or t.
  misc_feature (786944)..(786946): n is a or c or g or t.
  misc_feature (839139)..(839139): n is a or c or g or t.
  misc_feature (1128488)..(1128488): n is a or c or g or t.
  misc_feature (1128499)..(1128499): n is a or c or g or t.
  misc_feature (1128505)..(1128506): n is a or c or g or t.
  misc_feature (1128517)..(1128518): n is a or c or g or t.
  misc_feature (1128539)..(1128540): n is a or c or g or t.
  misc_feature (1561400)..(1561400): n is a or c or g or t.
  misc_feature (1561477)..(1561477): n is a or c or g or t.
  misc_feature (1561545)..(1561545): n is a or c or g or t.
  misc_feature (1767941)..(1767941): n is a or c or g or t.
VSTGGKMKAVEAENLTILYSGQPALSDVTFTLEEGKTLLLLGPNGAGKTTLLKTIACFHREYTGELRVFERPPCEARELIGYVPQSQSLNERVPLTALEVVAMGGVYRKGFVHFRIPGEVIEKAEKVLEFVGLGGIGDRLFRELSGGQKQRVLLARALMSDPRLLLLDEPLSALDPSARAEVANVLDKIKREKGVTMIITTHDINPLLEIGDLVMLINRRLIAFGRPEEVLTDEVIKSVYGPMAKVIPVGGKVYCITGDFHIHRGGEKI

SEQ ID NO: 856 - protein, 238 aa, Thermococcus kodakaraensis KOD1
  misc_feature (414542)..(414542): n is a or c or g or t.
  misc_feature (786890)..(786890): n is a or c or g or t.
  misc_feature (786907)..(786907): n is a or c or g or t.
  misc_feature (786944)..(786946): n is a or c or g or t.
  misc_feature (839139)..(839139): n is a or c or g or t.
  misc_feature (1128488)..(1128488): n is a or c or g or t.
  misc_feature (1128499)..(1128499): n is a or c or g or t.
  misc_feature (1128505)..(1128506): n is a or c or g or t.
  misc_feature (1128517)..(1128518): n is a or c or g or t.
  misc_feature (1128539)..(1128540): n is a or c or g or t.
  misc_feature (1561400)..(1561400): n is a or c or g or t.
  misc_feature (1561477)..(1561477): n is a or c or g or t.
  misc_feature (1561545)..(1561545): n is a or c or g or t.
  misc_feature (1767941)..(1767941): n is a or c or g or t.
MVHSYLGGEPMKIAGIDEAGRGPVIGPMVIAAVVVDENSLPKLEELKVRDSKKLTPKRREKLFNEILGVLDDYVILELPPDVIGSREGTLNEFEVENFAKALNSLKVKPDVIYADAADVDEERFARELGERLNFEAEVVAKHKADDIFPVVSAASILAKVTRDRAVEKLKEEYGEIGSGYPSDPRTRAFLENYYREHGEFPPIVRKGWKTLKKIAEKVESEKKAEERQATLDRYFRKV

SEQ ID NO: 857 - protein, 383 aa, Thermococcus kodakaraensis KOD1
  misc_feature (414542)..(414542): n is a or c or g or t.
  misc_feature (786890)..(786890): n is a or c or g or t.
  misc_feature (786907)..(786907): n is a or c or g or t.
  misc_feature (786944)..(786946): n is a or c or g or t.
  misc_feature (839139)..(839139): n is a or c or g or t.
  misc_feature (1128488)..(1128488): n is a or c or g or t.
  misc_feature (1128499)..(1128499): n is a or c or g or t.
  misc_feature (1128505)..(1128506): n is a or c or g or t.
  misc_feature (1128517)..(1128518): n is a or c or g or t.
  misc_feature (1128539)..(1128540): n is a or c or g or t.
  misc_feature (1561400)..(1561400): n is a or c or g or t.
  misc_feature (1561477)..(1561477): n is a or c or g or t.
  misc_feature (1561545)..(1561545): n is a or c or g or t.
  misc_feature (1767941)..(1767941): n is a or c or g or t.
MLEGITEEKIREAEELIKRGYSEKKLRARLGKDWELIAEIARARIRAKDKFSRSDLWMDMEGLRYATHEVVAKYRAERLKEFGVESIADVSCGIGIQLIFYAMKVERAYGIDIDPLKIEFARRNAEKYGVSNIEFINADSLSPETVERVDAEVVFSDPARPPEAPERDLEGLLPSPLKIYEAYKKKTRAFIFDLPPQMKREKVPWKGEFEYIDLFGALNRLTFYTEPLARAERSAVILPAGARLESDPSLEDIVEWADRPGDYLYEIPQSIDYADLINELFHRLPVEARMLLREKRRVLATGDEPIKSPYLKRTYSVVGVLPFHPVRINDFLRKEGFGRATLRISVPESEYWRIRKKIEENLRGERRAFVFKVGEKAVIAEEL

SEQ ID NO: 858 - protein, 1003 aa, Thermococcus kodakaraensis KOD1
  misc_feature (414542)..(414542): n is a or c or g or t.
  misc_feature (786890)..(786890): n is a or c or g or t.
  misc_feature (786907)..(786907): n is a or c or g or t.
  misc_feature (786944)..(786946): n is a or c or g or t.
  misc_feature (839139)..(839139): n is a or c or g or t.
  misc_feature (1128488)..(1128488): n is a or c or g or t.
  misc_feature (1128499)..(1128499): n is a or c or g or t.
  misc_feature (1128505)..(1128506): n is a or c or g or t.
  misc_feature (1128517)..(1128518): n is a or c or g or t.
  misc_feature (1128539)..(1128540): n is a or c or g or t.
  misc_feature (1561400)..(1561400): n is a or c or g or t.
  misc_feature (1561477)..(1561477): n is a or c or g or t.
  misc_feature (1561545)..(1561545): n is a or c or g or t.
  misc_feature (1767941)..(1767941): n is a or c or g or t.
VVNMKTEAKEKLKKSEPGEGQAFPKAYLYFKEYGLPVLVLLLAYIGYRIRAVTSGFKLFLDPDTFYHFEMYKLAIQDWIPKYYAYAEPPMGIKPSGYLGLYTVQAMFYKFAHALFGMNEFEAFKVWPPFVGAMMVIGTYLVVRKLHSSWAGFWGAALMMGFWGAIEKTYSGNNRGEGPFVMFFLFTVYFLLLYLDEERWNWKKVLGLVFFLVLSPLYMGVWTGSSLGVMILLATGVVVPVIFFTVGDTEHLRRFVTEYYPAFGLSIIAGIFLAQSGFVGIRNFLVFSFEVLIAGTVLVLIMLYGERFLNFSDWMHRLGTVVGIGIAGFLAFYAYFGKALFNFLRAATQSTPLYQTVAELQTPSWRYIIATFSLKPKGSQGDSIIFIFSLLGLFVLGWKFYRGVKEKRYETYKHFIPLFHYLGTIYLFKQAVRFSFQASVAAIILAAIAMGEAFLYVERMRDTVTVKALYTAFLILMLVPMPYVSASYSYDAMKSESLKIRLTNSKMPGSVPEAWTDALLWIKNNSDPYATVLSWWDYGYWEESSLLSHRRAVSDGGHGYDRRYIIAKFFSHSGNAGEVDLEAWGDDYVITFLDPFDGSSDFGKFNAIAYLGGAIAYGERYPMFSYVYYNDIVVTNDTIAVKAGNGYVVPDIVVDLIRGQVFKNKEPTHPFVLYIYPYMTSSNQIYPIGILAYEKIALSNYLQLGLGVPISLNGEESEKLFANFKLEYTGYNGYTKKQGVYVPSVRVYKFTPFAIHRIEAMMNGNWTRVYDSINGGGLEVKSGNTTLPLTGEQKLRLYISAFGRDVKNGTLIFEAYNGTELVDRQVLVKNLNIDHLNETPVEVTVKIPQAEKYRFILLQEGPVGVTNGPVYVNGKLANPSMPLKPGESGNIELTEAFEKDYTNVKFTLRGVVYYYVAPNGNDINRPEFYLEPHMDIIGYIPVAELDKVQEGDNLIRGQASVPKDFFDSYIQELKQKYGDKVVVVGKRLEPIFLTQKEYVLWEGH

SEQ ID NO: 859 - protein, 163 aa, Thermococcus kodakaraensis KOD1
  misc_feature (414542)..(414542): n is a or c or g or t.
  misc_feature (786890)..(786890): n is a or c or g or t.
  misc_feature (786907)..(786907): n is a or c or g or t.
  misc_feature (786944)..(786946): n is a or c or g or t.
  misc_feature (839139)..(839139): n is a or c or g or t.
  misc_feature (1128488)..(1128488): n is a or c or g or t.
  misc_feature (1128499)..(1128499): n is a or c or g or t.
  misc_feature (1128505)..(1128506): n is a or c or g or t.
  misc_feature (1128517)..(1128518): n is a or c or g or t.
  misc_feature (1128539)..(1128540): n is a or c or g or t.
  misc_feature (1561400)..(1561400): n is a or c or g or t.
  misc_feature (1561477)..(1561477): n is a or c or g or t.
  misc_feature (1561545)..(1561545): n is a or c or g or t.
  misc_feature (1767941)..(1767941): n is a or c or g or t.
MHPKLNKLLVVPMKLNTGYVRASGYAHKVRRVLFALVKGKVDPKEVVRAAGELNSKIFEEFQKLGVEKEDVVRISVEFSIKDGSIVWDYDTLSIEVYKKSEEERLAKAMEEVEARERELDQKIREVEELALKLRSVAEELVEKIEELKQEHTSLKLKAEMEES

SEQ ID NO: 860 - protein, 340 aa, Thermococcus kodakaraensis KOD1
  misc_feature (414542)..(414542): n is a or c or g or t.
  misc_feature (786890)..(786890): n is a or c or g or t.
  misc_feature (786907)..(786907): n is a or c or g or t.
  misc_feature (786944)..(786946): n is a or c or g or t.
  misc_feature (839139)..(839139): n is a or c or g or t.
  misc_feature (1128488)..(1128488): n is a or c or g or t.
  misc_feature (1128499)..(1128499): n is a or c or g or t.
  misc_feature (1128505)..(1128506): n is a or c or g or t.
  misc_feature (1128517)..(1128518): n is a or c or g or t.
  misc_feature (1128539)..(1128540): n is a or c or g or t.
  misc_feature (1561400)..(1561400): n is a or c or g or t.
  misc_feature (1561477)..(1561477): n is a or c or g or t.
  misc_feature (1561545)..(1561545): n is a or c or g or t.
  misc_feature (1767941)..(1767941): n is a or c or g or t.
VIMGGIKIEPKTAIFAGGCFWCMEEAFERLPGVIEAISGYTGGWVENPTYELVSTGETGHREAVKVIYDPSKISYERLLDVFWRNIDPTDPGGQFADRGEQYKTAIFYLDEEQRELAEESKRRLELSGIFDEPIATEILPAKEFYPAEDYHQGYYFRFEANYKGYKLYSGRLGFIKSVWEKNRHFRLFPEREGYWLGYVKPSDAELKRQLTPLQYRVTQLGDTEEPFHNEYWNNHEEGIYVDVVSGEPLFSLLDKYDSGTGWPSFTKPLEEWAVVEAGECEGFLCGREVRSRFAGSHLGHVFDEPTPTGKRYCINSAALRFIPRDELRRYGYTAYEGIFK

SEQ ID NO: 861 - protein, 174 aa, Thermococcus kodakaraensis KOD1
  misc_feature (414542)..(414542): n is a or c or g or t.
  misc_feature (786890)..(786890): n is a or c or g or t.
  misc_feature (786907)..(786907): n is a or c or g or t.
  misc_feature (786944)..(786946): n is a or c or g or t.
  misc_feature (839139)..(839139): n is a or c or g or t.
  misc_feature (1128488)..(1128488): n is a or c or g or t.
  misc_feature (1128499)..(1128499): n is a or c or g or t.
  misc_feature (1128505)..(1128506): n is a or c or g or t.
  misc_feature (1128517)..(1128518): n is a or c or g or t.
  misc_feature (1128539)..(1128540): n is a or c or g or t.
  misc_feature (1561400)..(1561400): n is a or c or g or t.
  misc_feature (1561477)..(1561477): n is a or c or g or t.
  misc_feature (1561545)..(1561545): n is a or c or g or t.
  misc_feature (1767941)..(1767941): n is a or c or g or t.
MEVTEKEIFEIAVNSEIRAKEAYEKLASMTKSDIIRDELLFLAKEEDKHREIIEKMAERFAAEGGESKKIEMEVMGEFKVIAEKMAEAIKKPDINLDEIYEIAMQAELVSEKLYKELAKYASNEKTKLLLEMLADMERNHYNILKKQYDYIMRYPELYKEELYDQLMKDINFNF

SEQ ID NO: 862 - protein, 17 aa, Thermococcus kodakaraensis KOD1
  misc_feature (414542)..(414542): n is a or c or g or t.
  misc_feature (786890)..(786890): n is a or c or g or t.
  misc_feature (786907)..(786907): n is a or c or g or t.
  misc_feature (786944)..(786946): n is a or c or g or t.
  misc_feature (839139)..(839139): n is a or c or g or t.
  misc_feature (1128488)..(1128488): n is a or c or g or t.
  misc_feature (1128499)..(1128499): n is a or c or g or t.
  misc_feature (1128505)..(1128506): n is a or c or g or t.
  misc_feature (1128517)..(1128518): n is a or c or g or t.
  misc_feature (1128539)..(1128540): n is a or c or g or t.
  misc_feature (1561400)..(1561400): n is a or c or g or t.
  misc_feature (1561477)..(1561477): n is a or c or g or t.
  misc_feature (1561545)..(1561545): n is a or c or g or t.
  misc_feature (1767941)..(1767941): n is a or c or g or t.
MEARTMGKELARYRTVT

SEQ ID NO: 863 - protein, 799 aa, Thermococcus kodakaraensis KOD1
  misc_feature (414542)..(414542): n is a or c or g or t.
  misc_feature (786890)..(786890): n is a or c or g or t.
  misc_feature (786907)..(786907): n is a or c or g or t.
  misc_feature (786944)..(786946): n is a or c or g or t.
  misc_feature (839139)..(839139): n is a or c or g or t.
  misc_feature (1128488)..(1128488): n is a or c or g or t.
  misc_feature (1128499)..(1128499): n is a or c or g or t.
  misc_feature (1128505)..(1128506): n is a or c or g or t.
  misc_feature (1128517)..(1128518): n is a or c or g or t.
  misc_feature (1128539)..(1128540): n is a or c or g or t.
  misc_feature (1561400)..(1561400): n is a or c or g or t.
  misc_feature (1561477)..(1561477): n is a or c or g or t.
  misc_feature (1561545)..(1561545): n is a or c or g or t.
  misc_feature (1767941)..(1767941): n is a or c or g or t.
MKTTLKVNGMTCAMCVKTIEMALAGLEGVKAAKANLNSETVFVDFDESKVSINQIIRAIEDVGYEVIRERRDAVIKIGGMTCAMCVKTVENAIRELPGVLDVSVNLATESARVSYNPALVTIEDIKGAVEGVGYEFLGVEGEESHDIEKEVRERHIKEMKRSLLVAWGIGIPLFLSMQLKRLGIEVENLIYVQFLLATVAIAYAGRGIFKKAYSSLRHMTLNMEVMYAMGIGSAYLTSVLATLGVIPREFNFYEASVLLMAFLLLGRYLEARAKGRTSEAIKKLMGLQAKKATVVRDGKEIEVPISEVKVGDIVVVRPGERIPVDGTVIEGESYVDESMITGEPIPVLKKSGEKVIGGTINRNSVLKVRAEKVGRDTLLAQIIKLVEEAQNTKPPVQRLADTVVTYFIPAVLTIALLSFTYWYFIAGKPLVFAFTAFLSVLVIACPCAFGLATPTALTVGVGKGAELGILIKNGEALEIARKATVVLFDKTGTLTKGKPEVTDVITFDVDEGEFLELVASAEKRSEHPLGEAIVRKAEELGIEVEEPEEFEAVTGKGVRAKVRGKEVLAGNRRLMVENGIDLESVEETLQRLESEGKTAIVVAMDGKIVGIIAIADTIKKGAREAIEDLHRMGKKVGMITGDNRRTAEAIGKALGVDYILAEVLPGDKANEVKKLQEKGKVVVFVGDGINDAPAMAQADVGIAVGNATDIVMESGEVVLVRNDPRDVVRAIKLSQKTISKIKQNIFWAMFYNTILIPFAAGLAYVLFGVTFRPEWAAGAMSLSSVSVVTNSLMLKRVRV

SEQ ID NO: 864 - protein, 106 aa, Thermococcus kodakaraensis KOD1
  misc_feature (414542)..(414542): n is a or c or g or t.
  misc_feature (786890)..(786890): n is a or c or g or t.
  misc_feature (786907)..(786907): n is a or c or g or t.
  misc_feature (786944)..(786946): n is a or c or g or t.
  misc_feature (839139)..(839139): n is a or c or g or t.
  misc_feature (1128488)..(1128488): n is a or c or g or t.
  misc_feature (1128499)..(1128499): n is a or c or g or t.
  misc_feature (1128505)..(1128506): n is a or c or g or t.
  misc_feature (1128517)..(1128518): n is a or c or g or t.
  misc_feature (1128539)..(1128540): n is a or c or g or t.
  misc_feature (1561400)..(1561400): n is a or c or g or t.
  misc_feature (1561477)..(1561477): n is a or c or g or t.
  misc_feature (1561545)..(1561545): n is a or c or g or t.
  misc_feature (1767941)..(1767941): n is a or c or g or t.
MAGVGMIVEYDENVDFTKGKAVLWFSIPGCPPCRLVEAFMKELSEEFGEIAIVHVNAEKWSGLVEGFRILNVPTLVYLKDGKEVARQNLIRGKGEVLIKFEEPREL

SEQ ID NO: 865 - protein, 59 aa, Thermococcus kodakaraensis KOD1
  misc_feature (414542)..(414542): n is a or c or g or t.
  misc_feature (786890)..(786890): n is a or c or g or t.
  misc_feature (786907)..(786907): n is a or c or g or t.
  misc_feature (786944)..(786946): n is a or c or g or t.
  misc_feature (839139)..(839139): n is a or c or g or t.
  misc_feature (1128488)..(1128488): n is a or c or g or t.
  misc_feature (1128499)..(1128499): n is a or c or g or t.
  misc_feature (1128505)..(1128506): n is a or c or g or t.
  misc_feature (1128517)..(1128518): n is a or c or g or t.
  misc_feature (1128539)..(1128540): n is a or c or g or t.
  misc_feature (1561400)..(1561400): n is a or c or g or t.
  misc_feature (1561477)..(1561477): n is a or c or g or t.
  misc_feature (1561545)..(1561545): n is a or c or g or t.
  misc_feature (1767941)..(1767941): n is a or c or g or t.
MVVLDHGTLGYITFGLMSFSMLSGAFIFLSKKRQFWIKVHLLVSILAYIFMVWTIWVVG

SEQ ID NO: 866 - protein, 61 aa, Thermococcus kodakaraensis KOD1
  misc_feature (414542)..(414542): n is a or c or g or t.
  misc_feature (786890)..(786890): n is a or c or g or t.
  misc_feature (786907)..(786907): n is a or c or g or t.
  misc_feature (786944)..(786946): n is a or c or g or t.
  misc_feature (839139)..(839139): n is a or c or g or t.
  misc_feature (1128488)..(1128488): n is a or c or g or t.
  misc_feature (1128499)..(1128499): n is a or c or g or t.
  misc_feature (1128505)..(1128506): n is a or c or g or t.
  misc_feature (1128517)..(1128518): n is a or c or g or t.
  misc_feature (1128539)..(1128540): n is a or c or g or t.
  misc_feature (1561400)..(1561400): n is a or c or g or t.
  misc_feature (1561477)..(1561477): n is a or c or g or t.
  misc_feature (1561545)..(1561545): n is a or c or g or t.
  misc_feature (1767941)..(1767941): n is a or c or g or t.
VYLMDEAMKLGKKTGASGFDVLFLACAKVCGAVLITDDLKMYEKAREIGIMSQLLREISSP

SEQ ID NO: 867 - protein, 311 aa, Thermococcus kodakaraensis KOD1
  misc_feature (414542)..(414542): n is a or c or g or t.
  misc_feature (786890)..(786890): n is a or c or g or t.
  misc_feature (786907)..(786907): n is a or c or g or t.
  misc_feature (786944)..(786946): n is a or c or g or t.
  misc_feature (839139)..(839139): n is a or c or g or t.
  misc_feature (1128488)..(1128488): n is a or c or g or t.
  misc_feature (1128499)..(1128499): n is a or c or g or t.
  misc_feature (1128505)..(1128506): n is a or c or g or t.
  misc_feature (1128517)..(1128518): n is a or c or g or t.
  misc_feature (1128539)..(1128540): n is a or c or g or t.
  misc_feature (1561400)..(1561400): n is a or c or g or t.
  misc_feature (1561477)..(1561477): n is a or c or g or t.
  misc_feature (1561545)..(1561545): n is a or c or g or t.
  misc_feature (1767941)..(1767941): n is a or c or g or t.
VEMLVWAGSIVIGIILLVVFGDRLSDKIVEVAEKAGVSPLIISLVVISLATTLPEITTSAMASITKAEGIALGNALGSIFANIALILGLASVIRPLKAGSGAYENSLVMLASLGFLMLLSVDGTLSRLDGALLLVAYALYLRWLYKKHFRKGRESGAERHTKATALDYVLLLIYGGLMVIGARLVVYGGRNIAEALGVAEYVIGATIVAIGTSLPEMTNALYGAIRERGSISVGNIIGANIMNALVVLGLASLIRPIPTGASTLTIVLVLMAMLPMIAELKRSGGLDRRIGFYFLILYAAYLVLLFSGAKL

SEQ ID NO: 868 - protein, 163 aa, Thermococcus kodakaraensis KOD1
  misc_feature (414542)..(414542): n is a or c or g or t.
  misc_feature (786890)..(786890): n is a or c or g or t.
  misc_feature (786907)..(786907): n is a or c or g or t.
  misc_feature (786944)..(786946): n is a or c or g or t.
  misc_feature (839139)..(839139): n is a or c or g or t.
  misc_feature (1128488)..(1128488): n is a or c or g or t.
  misc_feature (1128499)..(1128499): n is a or c or g or t.
  misc_feature (1128505)..(1128506): n is a or c or g or t.
  misc_feature (1128517)..(1128518): n is a or c or g or t.
  misc_feature (1128539)..(1128540): n is a or c or g or t.
  misc_feature (1561400)..(1561400): n is a or c or g or t.
  misc_feature (1561477)..(1561477): n is a or c or g or t.
  misc_feature (1561545)..(1561545): n is a or c or g or t.
  misc_feature (1767941)..(1767941): n is a or c or g or t.
MKVLWAPWRIEYIRSPKHEGCIFCDFPKENRDKERLILYRGKHAFVIMNNYPYNPGHVMVAPYRHVGRWEDLTDEELLEIMKLSQLMIKAIKKAMNPDGFNLGVNLGRVAGAGIDDHVHLHIVPRWNGDTNFMPVIADTKVIPESLQEAYEELKKAIDEVLKE

SEQ ID NO: 869 - protein, 309 aa, Thermococcus kodakaraensis KOD1
  misc_feature (414542)..(414542): n is a or c or g or t.
  misc_feature (786890)..(786890): n is a or c or g or t.
  misc_feature (786907)..(786907): n is a or c or g or t.
  misc_feature (786944)..(786946): n is a or c or g or t.
  misc_feature (839139)..(839139): n is a or c or g or t.
  misc_feature (1128488)..(1128488): n is a or c or g or t.
  misc_feature (1128499)..(1128499): n is a or c or g or t.
  misc_feature (1128505)..(1128506): n is a or c or g or t.
  misc_feature (1128517)..(1128518): n is a or c or g or t.
  misc_feature (1128539)..(1128540): n is a or c or g or t.
  misc_feature (1561400)..(1561400): n is a or c or g or t.
  misc_feature (1561477)..(1561477): n is a or c or g or t.
  misc_feature (1561545)..(1561545): n is a or c or g or t.
  misc_feature (1767941)..(1767941): n is a or c or g or t.
MLERLFSLGYSKTFAERYYQLWGERALAIAEAMERPLPRCFRVNTLRIEVHKLTKLLNKKGFQFKRVPWAREGFCLTREPFSITSTPEYLSGLLYIQEASSMYPPVALGPKPGEVVADMAAAPGGKTSYMAQLMENGGIIYAFDVGEDRLRETRLNLSRLGVTNTILFHSSSLHIDELGVEFDKILLDAPCTGSGTIHKNPERKANRTMEDVKFCQGLQMKLLEKGLSVLKKGGVLVYSTCSLEPEENEFVIQWVLDNFEVELLPLRYGEPALTKPFGIELSEEIKKARRFYPDRHGTSGFFVAKIKKL

SEQ ID NO: 870 - protein, 363 aa, Thermococcus kodakaraensis KOD1
  misc_feature (414542)..(414542): n is a or c or g or t.
  misc_feature (786890)..(786890): n is a or c or g or t.
  misc_feature (786907)..(786907): n is a or c or g or t.
  misc_feature (786944)..(786946): n is a or c or g or t.
  misc_feature (839139)..(839139): n is a or c or g or t.
  misc_feature (1128488)..(1128488): n is a or c or g or t.
  misc_feature (1128499)..(1128499): n is a or c or g or t.
  misc_feature (1128505)..(1128506): n is a or c or g or t.
  misc_feature (1128517)..(1128518): n is a or c or g or t.
  misc_feature (1128539)..(1128540): n is a or c or g or t.
  misc_feature (1561400)..(1561400): n is a or c or g or t.
  misc_feature (1561477)..(1561477): n is a or c or g or t.
  misc_feature (1561545)..(1561545): n is a or c or g or t.
  misc_feature (1767941)..(1767941): n is a or c or g or t.
MKVLVLGAGNVGRAVAWDLRDEFEVYVGDIDGEKLKAVGEFATPLKVNAANFEELVEVMKSFDLVVGTLPGRFGYGSIKAAIKAGVDMVDVSFMPENPLELKEGAEKANVTVIFDAGFAPGLSHILMGRIWNQLDTLEEGRIWVGGLPKDPKPPLYYRITWSPKDLIEEYTRPARVIRNGAVTTVDPLGEIREVNINGMEFEAFVSDGLRSLLESVRAETLEEWTLRWPGHLEKMRVLRELGFFREENLDFTLKVISPLMSFESPDFSIMLVEGEGVENGERKRMSYLLYDEEKDGFTSMSRVTGFTAAIIARIVAEGSCIYGVIPPEILGMRIDTFSRIVGEIRERGITLEEVEGNASPDNS

SEQ ID NO: 871 - protein, 152 aa, Thermococcus kodakaraensis KOD1
  misc_feature (414542)..(414542): n is a or c or g or t.
  misc_feature (786890)..(786890): n is a or c or g or t.
  misc_feature (786907)..(786907): n is a or c or g or t.
  misc_feature (786944)..(786946): n is a or c or g or t.
  misc_feature (839139)..(839139): n is a or c or g or t.
  misc_feature (1128488)..(1128488): n is a or c or g or t.
  misc_feature (1128499)..(1128499): n is a or c or g or t.
  misc_feature (1128505)..(1128506): n is a or c or g or t.
  misc_feature (1128517)..(1128518): n is a or c or g or t.
  misc_feature (1128539)..(1128540): n is a or c or g or t.
  misc_feature (1561400)..(1561400): n is a or c or g or t.
  misc_feature (1561477)..(1561477): n is a or c or g or t.
  misc_feature (1561545)..(1561545): n is a or c or g or t.
  misc_feature (1767941)..(1767941): n is a or c or g or t.
VVDMRILVLVDGSKWSQKAALHAFSVAKKKGAKVVLFSVLDRKEAQAIAVSLAMRSGDVEKLKKFEETAWKEMKKGIHDVISALLELGQREGINCSFRIVEGNAREKVLEEANSGKYSLVVMGAYGKSGKTRIGSLLEDVVGVIKPPVMIVR

SEQ ID NO: 872 - protein, 288 aa, Thermococcus kodakaraensis KOD1
  misc_feature (414542)..(414542): n is a or c or g or t.
  misc_feature (786890)..(786890): n is a or c or g or t.
  misc_feature (786907)..(786907): n is a or c or g or t.
  misc_feature (786944)..(786946): n is a or c or g or t.
  misc_feature (839139)..(839139): n is a or c or g or t.
  misc_feature (1128488)..(1128488): n is a or c or g or t.
  misc_feature (1128499)..(1128499): n is a or c or g or t.
  misc_feature (1128505)..(1128506): n is a or c or g or t.
  misc_feature (1128517)..(1128518): n is a or c or g or t.
  misc_feature (1128539)..(1128540): n is a or c or g or t.
  misc_feature (1561400)..(1561400): n is a or c or g or t.
  misc_feature (1561477)..(1561477): n is a or c or g or t.
  misc_feature (1561545)..(1561545): n is a or c or g or t.
  misc_feature (1767941)..(1767941): n is a or c or g or t.
MEFLYTYETLKLEFPLVEPEKARFILLGVPFDGTTSYKAGARFGPTLIRQATLNLESYILDYDLDIAELPIADIGDIAVVAGDPRKTADRVRETLEELKKANPKAIPILLGGEHSQTLGAVEALKPASYVVFDAHLDLRNSYEDNPYNHACVARRISELGVKEAIFGIRSGTKEEVDFARERDIPWVHARDYSFDAFVDLVEALPEPVYLSIDIDVFDLSMVPSTGTPEAGGLRFWEVVEAIEWLVEKKEIAGFDIMEVAGEKLGDPTALTAAKLLFYSIGAMAKFGR

SEQ ID NO: 873 - protein, 439 aa, Thermococcus kodakaraensis KOD1
  misc_feature (414542)..(414542): n is a or c or g or t.
  misc_feature (786890)..(786890): n is a or c or g or t.
  misc_feature (786907)..(786907): n is a or c or g or t.
  misc_feature (786944)..(786946): n is a or c or g or t.
  misc_feature (839139)..(839139): n is a or c or g or t.
  misc_feature (1128488)..(1128488): n is a or c or g or t.
  misc_feature (1128499)..(1128499): n is a or c or g or t.
  misc_feature (1128505)..(1128506): n is a or c or g or t.
  misc_feature (1128517)..(1128518): n is a or c or g or t.
  misc_feature (1128539)..(1128540): n is a or c or g or t.
  misc_feature (1561400)..(1561400): n is a or c or g or t.
  misc_feature (1561477)..(1561477): n is a or c or g or t.
  misc_feature (1561545)..(1561545): n is a or c or g or t.
  misc_feature (1767941)..(1767941): n is a or c or g or t.
MEGVAWLLATIGIALILAKIGDSIIERFELPGVLGELIMGMILGNLVYFGYVAPDYLPIVSGMGYESVLNQIAEFLAKLGIIFLLFLGALDADIEQLKKTGLTATVSTVLGVFVPLVLGWWALMAMGYPSREAFAGGVLLTATSIGLTVRVMMDLGVLRSEVGAASLSASVMDDFLGIALIIFAVGTGSLFELSIKIVAFFIITGVLGWYFIDHYIRFAERLHVEKGILGMAIGMMFLFAALAEGWFAAAIEGAFMMGLILSKLPEGKRIMEDVRAIGYGLLIPFFFVHTGAMLNLKVFEHGDAITLAAVLSVIAIVGKIVGRGFGAWITAWGRGRDFLFTRENFWMSLQMGIGSVPRTEVALVNLMVAIHGGAIPSTDAPKFIAATLIFITVSVLITPPLLKWAFKAEIEKAKAEKAAQKVGRIQETKEKIKELKGSE

SEQ ID NO: 874 - protein, 56 aa, Thermococcus kodakaraensis KOD1
  misc_feature (414542)..(414542): n is a or c or g or t.
  misc_feature (786890)..(786890): n is a or c or g or t.
  misc_feature (786907)..(786907): n is a or c or g or t.
  misc_feature (786944)..(786946): n is a or c or g or t.
  misc_feature (839139)..(839139): n is a or c or g or t.
  misc_feature (1128488)..(1128488): n is a or c or g or t.
  misc_feature (1128499)..(1128499): n is a or c or g or t.
  misc_feature (1128505)..(1128506): n is a or c or g or t.
  misc_feature (1128517)..(1128518): n is a or c or g or t.
  misc_feature (1128539)..(1128540): n is a or c or g or t.
  misc_feature (1561400)..(1561400): n is a or c or g or t.
  misc_feature (1561477)..(1561477): n is a or c or g or t.
  misc_feature (1561545)..(1561545): n is a or c or g or t.
  misc_feature (1767941)..(1767941): n is a or c or g or t.
VRMSKRLRPDCWFGTGKSALENLRRLIEFHISRDAEFLTLREFYHEYQKLKREGEL

SEQ ID NO: 875 - protein, 349 aa, Thermococcus kodakaraensis KOD1
  misc_feature (414542)..(414542): n is a or c or g or t.
  misc_feature (786890)..(786890): n is a or c or g or t.
  misc_feature (786907)..(786907): n is a or c or g or t.
  misc_feature (786944)..(786946): n is a or c or g or t.
  misc_feature (839139)..(839139): n is a or c or g or t.
  misc_feature (1128488)..(1128488): n is a or c or g or t.
  misc_feature (1128499)..(1128499): n is a or c or g or t.
  misc_feature (1128505)..(1128506): n is a or c or g or t.
  misc_feature (1128517)..(1128518): n is a or c or g or t.
  misc_feature (1128539)..(1128540): n is a or c or g or t.
  misc_feature (1561400)..(1561400): n is a or c or g or t.
  misc_feature (1561477)..(1561477): n is a or c or g or t.
  misc_feature (1561545)..(1561545): n is a or c or g or t.
  misc_feature (1767941)..(1767941): n is a or c or g or t.
MREAMWWEPLENNRVRCRLCPLNCIIDDGKRGSCKVRKNIGGRLYTLNYGKVSSIAADPVEKKPLFHFWPGSCAFSIATVGCNMHCKHCQNWEISQADESFPYLHDMTPEMIVTMAKKYGCESIAYTYNEPTIWYEFVLDTAKLAKKEGLYNLMITNGYINEEPFRELAPYIDAMNIDIKAFNDEFYMKIASVPSGEPSRRTAVIAKKEFGIHVELTYLIIPTLNDKEEEIRAFARWVVEETGDDTPVHFSRFFPHYKLLHLPPTPVETIEMAYRVAKEEGLKFVYIGNVPGHPGEHTYCPKCEKPLIVRYGFEIVEYNVTDDGRCGFCGEPIPIVGTYTKKRYPGMWW

SEQ ID NO: 876 - protein, 612 aa, Thermococcus kodakaraensis KOD1
  misc_feature (414542)..(414542): n is a or c or g or t.
  misc_feature (786890)..(786890): n is a or c or g or t.
  misc_feature (786907)..(786907): n is a or c or g or t.
  misc_feature (786944)..(786946): n is a or c or g or t.
  misc_feature (839139)..(839139): n is a or c or g or t.
  misc_feature (1128488)..(1128488): n is a or c or g or t.
  misc_feature (1128499)..(1128499): n is a or c or g or t.
  misc_feature (1128505)..(1128506): n is a or c or g or t.
  misc_feature (1128517)..(1128518): n is a or c or g or t.
  misc_feature (1128539)..(1128540): n is a or c or g or t.
  misc_feature (1561400)..(1561400): n is a or c or g or t.
  misc_feature (1561477)..(1561477): n is a or c or g or t.
  misc_feature (1561545)..(1561545): n is a or c or g or t.
  misc_feature (1767941)..(1767941): n is a or c or g or t.
MKVKKIAALAVGAAMVGATLGFASATEVPNIPKDFFVKNGEPNVKIVIGSQAAAQDVASAADIAVALGTLLYTEEDVKVKDASVVVKKDVAYDPADIPVFDNLYKGNYKLKEDLKDVEGWWNGAFDKDDYPEFTVTLKDSPWDDGIFNKDDPGWEDVGKVTVYNAVEWKDGNDNNYWKDPKGNWHDATDVSIHYTVAIGKIELKGFDEVDTTDIDEFSDFTLIVDDVVANVSFSLNAYEKTLKDKVLGATEETYAVSDVKPSSSYSLYQADVIKGVEKGDTITLFGKTIKVLDIGDDYIEYGNDWGEKYVNKDEVATFGDYTIKVIDIDVNKVKALFEVSGPAGSKIVTLDTDDRTDIKDSETLFNGGIRIKLLDTFIGIGGTTSALIEVQTDISYIEDGKEFMPGWIAKLGIKDGKLEWFALQNKEELEGKEVKLFDTYKVDYVADIMKKKNPKDDKTYAAMSAYVVIDPLKPEYTTKELGVGDELEGWTIDDIKATASPAKAAVVSKITTPITVLDDEIIEAGLDSVDSNLILVGGPVVNKVTAALADKLGVPTTYEEWAADENLKAGVVKYIDNCPTIGGHGVVLVAGADRDGTKAAAEALMEYLAGLH

SEQ ID NO: 877 - protein, 159 aa, Thermococcus kodakaraensis KOD1
  misc_feature (414542)..(414542): n is a or c or g or t.
  misc_feature (786890)..(786890): n is a or c or g or t.
  misc_feature (786907)..(786907): n is a or c or g or t.
  misc_feature (786944)..(786946): n is a or c or g or t.
  misc_feature (839139)..(839139): n is a or c or g or t.
  misc_feature (1128488)..(1128488): n is a or c or g or t.
  misc_feature (1128499)..(1128499): n is a or c or g or t.
  misc_feature (1128505)..(1128506): n is a or c or g or t.
  misc_feature (1128517)..(1128518): n is a or c or g or t.
  misc_feature (1128539)..(1128540): n is a or c or g or t.
  misc_feature (1561400)..(1561400): n is a or c or g or t.
  misc_feature (1561477)..(1561477): n is a or c or g or t.
  misc_feature (1561545)..(1561545): n is a or c or g or t.
  misc_feature (1767941)..(1767941): n is a or c or g or t.
VVSDSTPLIHLAKIDRLELLREFFGEIIIPEAVYRECVLEGGNSEDALAIKNAKWIKVEKISDEKLKRALMLELDEGESEAIVLAIERNAELILIDDYDGREVARALGLKVVGTIGILLKAKLLGKIKSLREELERLKATGFWLSEEFYERILKETGEL

SEQ ID NO: 878 - protein, 501 aa, Thermococcus kodakaraensis KOD1
  misc_feature (414542)..(414542): n is a or c or g or t.
  misc_feature (786890)..(786890): n is a or c or g or t.
  misc_feature (786907)..(786907): n is a or c or g or t.
  misc_feature (786944)..(786946): n is a or c or g or t.
  misc_feature (839139)..(839139): n is a or c or g or t.
  misc_feature (1128488)..(1128488): n is a or c or g or t.
  misc_feature (1128499)..(1128499): n is a or c or g or t.
  misc_feature (1128505)..(1128506): n is a or c or g or t.
  misc_feature (1128517)..(1128518): n is a or c or g or t.
  misc_feature (1128539)..(1128540): n is a or c or g or t.
  misc_feature (1561400)..(1561400): n is a or c or g or t.
  misc_feature (1561477)..(1561477): n is a or c or g or t.
  misc_feature (1561545)..(1561545): n is a or c or g or t.
  misc_feature (1767941)..(1767941): n is a or c or g or t.
MELSYPEKLTLIKLAELKRAKVEELVKESGLEQVAVMRALLGLQAKGLAKLHERSERVVKLTETGMKYAQIGLPEWRALKVLREKGKATLDDLKDVLSEDELKPIVGLLRREGWANVRKEDGKLVLEITEKGREASERPIDKALKLLAERGEVPVKEIEKLVPVNELKRRKIGEEDVITERVAEITEKGEELVKKGLELKKEVSVLTPELIKSGKWREVEFRKFDIKAPVRRIYPGKKQPYRAFLDKIRRRLIEMGFIEMTVDSLIETQFWNFDALFQPQNHPAREWTDTYQLKYPKVGSLPDEELVARVKAAHEHGGDTGSRGWGYVWSPERAMLLMPRAHGTALDARQLAKGVEIPGKYFTIQRVFRPDVLDRTHLIEFNQIDGFVVGEDLNFRHLLGILKRFAVEIAGAKKVKFLPDYYPFTEPSVQMSAYHPELGWVEFGGAGIFREEMTKALGIDVPVIAWGIGIDRLAMFKLGIDDIRYLFSYDLRWLREARLVW

SEQ ID NO: 879 - protein, 136 aa, Thermococcus kodakaraensis KOD1
  misc_feature (414542)..(414542): n is a or c or g or t.
  misc_feature (786890)..(786890): n is a or c or g or t.
  misc_feature (786907)..(786907): n is a or c or g or t.
  misc_feature (786944)..(786946): n is a or c or g or t.
  misc_feature (839139)..(839139): n is a or c or g or t.
  misc_feature (1128488)..(1128488): n is a or c or g or t.
  misc_feature (1128499)..(1128499): n is a or c or g or t.
  misc_feature (1128505)..(1128506): n is a or c or g or t.
  misc_feature (1128517)..(1128518): n is a or c or g or t.
  misc_feature (1128539)..(1128540): n is a or c or g or t.
  misc_feature (1561400)..(1561400): n is a or c or g or t.
  misc_feature (1561477)..(1561477): n is a or c or g or t.
  misc_feature (1561545)..(1561545): n is a or c or g or t.
  misc_feature (1767941)..(1767941): n is a or c or g or t.
VIVDTNVIISALIPKNSKLREFLLTTEIPLHAPDYMLRELKRYWTIIEEKARKRGITEPELAHFREELLGRIISHPLSEYRGFINEAYRICREFDEKDTPFVALALSLRLPIITNDKDLLAHAGEYEAIPLNDVLR

SEQ ID NO: 880 - protein, 459 aa, Thermococcus kodakaraensis KOD1
  misc_feature (414542)..(414542): n is a or c or g or t.
  misc_feature (786890)..(786890): n is a or c or g or t.
  misc_feature (786907)..(786907): n is a or c or g or t.
  misc_feature (786944)..(786946): n is a or c or g or t.
  misc_feature (839139)..(839139): n is a or c or g or t.
  misc_feature (1128488)..(1128488): n is a or c or g or t.
  misc_feature (1128499)..(1128499): n is a or c or g or t.
  misc_feature (1128505)..(1128506): n is a or c or g or t.
  misc_feature (1128517)..(1128518): n is a or c or g or t.
  misc_feature (1128539)..(1128540): n is a or c or g or t.
  misc_feature (1561400)..(1561400): n is a or c or g or t.
  misc_feature (1561477)..(1561477): n is a or c or g or t.
  misc_feature (1561545)..(1561545): n is a or c or g or t.
  misc_feature (1767941)..(1767941): n is a or c or g or t.
MYTSAEPSGILRTTMGMANRRKFRKRIYRPFGSWYGDSMLREILSRFEDLVVIKEPVKKELEITRYLLKYPDRPVLFEDVEGWKVAGNIWSTRKRIATYLNTTREELIHLIAEAMENPRQYKEVKEAPFLKNSTKDFSLKKLPIPKYYPRDGGQYFTSAMVIAKDDNGFVNVSFHRMMVRDEKTAAIRLVPRHLYAMWKEKAENGEDLDVRIVVGNPVHLLLAGSVSTAYGVSELEIASAMSEIAFGKPLEVIELGGIPVPIESEFVFEARITPELVDEGPFVDITGTYDIVRRQPLVVFEKMYHVDDPIFHALLSGGYEHYMLMGLPKEPQIYASVKRVVPKVHGVRLTEGGAMWLHAVVSITKQHDGDGKNAILAAFAGHPSLKRVIVVDEDINIYDDREVEWAVATRFQPDRDLVIVPNARGSSLDPSAEKGLTAKWGIDATKPLGRKEEFERARV

SEQ ID NO: 881 - protein, 247 aa, Thermococcus kodakaraensis KOD1
  misc_feature (414542)..(414542): n is a or c or g or t.
  misc_feature (786890)..(786890): n is a or c or g or t.
  misc_feature (786907)..(786907): n is a or c or g or t.
  misc_feature (786944)..(786946): n is a or c or g or t.
  misc_feature (839139)..(839139): n is a or c or g or t.
  misc_feature (1128488)..(1128488): n is a or c or g or t.
  misc_feature (1128499)..(1128499): n is a or c or g or t.
  misc_feature (1128505)..(1128506): n is a or c or g or t.
  misc_feature (1128517)..(1128518): n is a or c or g or t.
  misc_feature (1128539)..(1128540): n is a or c or g or t.
  misc_feature (1561400)..(1561400): n is a or c or g or t.
  misc_feature (1561477)..(1561477): n is a or c or g or t.
  misc_feature (1561545)..(1561545): n is a or c or g or t.
  misc_feature (1767941)..(1767941): n is a or c or g or t.
VPAMRAVAFVGYKKSGKTTTVEAVARVLKERGYRVAIAKSMHAEFDREGTDTWRFSRVADAVLVRAEDTDALLFKAKDINALFSMVSADFLLLEGFKSVEHVPRVVCARTPEEVEELDGGLAIAVSGVVASRGITEINGLPVIDATREPEKLADLVEEKAFILPNIDCGLCGFRCAEMARMIVKGEKTTKDCVVLSQKPKVVIKIDGQVLPMKDWVQELVEKTIKGMLSAMKGYREGKKIEIIVRSD

SEQ ID NO: 882 - protein, 780 aa, Thermococcus kodakaraensis KOD1
  misc_feature (414542)..(414542): n is a or c or g or t.
  misc_feature (786890)..(786890): n is a or c or g or t.
  misc_feature (786907)..(786907): n is a or c or g or t.
  misc_feature (786944)..(786946): n is a or c or g or t.
  misc_feature (839139)..(839139): n is a or c or g or t.
  misc_feature (1128488)..(1128488): n is a or c or g or t.
  misc_feature (1128499)..(1128499): n is a or c or g or t.
  misc_feature (1128505)..(1128506): n is a or c or g or t.
  misc_feature (1128517)..(1128518): n is a or c or g or t.
  misc_feature (1128539)..(1128540): n is a or c or g or t.
  misc_feature (1561400)..(1561400): n is a or c or g or t.
  misc_feature (1561477)..(1561477): n is a or c or g or t.
  misc_feature (1561545)..(1561545): n is a or c or g or t.
  misc_feature (1767941)..(1767941): n is a or c or g or t.
MSPTADQDWEVLIMGEEPPQFEKAKEVVIERVRTLPPMLDNVVKAAAILIGIYEILFIFNFNYTLYDMFQKMGIKIGILQATFQTKQGEAFVLAMILIITYLLYPIRRQEKYLQKVQWYDYILAILGAISALYLFAVYQRYAEFAEVYTTDVIFGILAIILVLEATRRVLGWVLPAVVVVFLIYGIQNIGFDWIRFTQQLYFDEGIFGIPFFVMTIYVFAFVFFGAFLLKIGISDYITEFMITLFGSRPGGPAKAAVISSGLMGTVSGSSVANVLTTGTFTIPLMKKAGYPPEIAGAVEPVASTGGQLMPPIMGAAAFIMAEFLGVPYNKLIIAAVIPALVYYAGVYLFIDLETKRLGLKGMPRESFSGLDYFIRKLYILLPIVVITVALVWGIPPHISAISSLGVAIWVAWISKDNIKGHEGLYVAVVLLATALMFTGKAMATPVAGISLLILLGLAAVGFISDKVEFNEKFYITALFLLFIALTKYIGMTKEQILLLSGVFGIIFSLIIGWYSKSEDGRAMYRATYESMIDAGKTSTSVMLAAASAGLIQGVLTMTGLVTSLGYRLVDLTAGNLWLLLMLTMVFSLILGMGVPTTANYIITSLVAAPAIFNAVQGLHPYSDPVPGFATPIALLAAHFFVFYFGILADVTPPVALASYAGSALAGGDFWKTAMNAVKYALAGYIGPYIYFTHPEMFIITVKHWTTMTALQVLYDLSATLLVMYLLAIALTGWFGKHLRKEIRGLAGILGIISATLNPVIVGISFVFVIALRLLGEKLSS

SEQ ID NO: 883 - protein, 49 aa, Thermococcus kodakaraensis KOD1
  misc_feature (414542)..(414542): n is a or c or g or t.
  misc_feature (786890)..(786890): n is a or c or g or t.
  misc_feature (786907)..(786907): n is a or c or g or t.
  misc_feature (786944)..(786946): n is a or c or g or t.
  misc_feature (839139)..(839139): n is a or c or g or t.
  misc_feature (1128488)..(1128488): n is a or c or g or t.
  misc_feature (1128499)..(1128499): n is a or c or g or t.
  misc_feature (1128505)..(1128506): n is a or c or g or t.
  misc_feature (1128517)..(1128518): n is a or c or g or t.
  misc_feature (1128539)..(1128540): n is a or c or g or t.
  misc_feature (1561400)..(1561400): n is a or c or g or t.
  misc_feature (1561477)..(1561477): n is a or c or g or t.
  misc_feature (1561545)..(1561545): n is a or c or g or t.
  misc_feature (1767941)..(1767941): n is a or c or g or t.
MKWELTLYGGEHHGKTLVVEAENVEEARRIALQEARRKEALTYELAKIE

SEQ ID NO: 884 - protein, 264 aa, Thermococcus kodakaraensis KOD1
  misc_feature (414542)..(414542): n is a or c or g or t.
  misc_feature (786890)..(786890): n is a or c or g or t.
  misc_feature (786907)..(786907): n is a or c or g or t.
  misc_feature (786944)..(786946): n is a or c or g or t.
  misc_feature (839139)..(839139): n is a or c or g or t.
  misc_feature (1128488)..(1128488): n is a or c or g or t.
  misc_feature (1128499)..(1128499): n is a or c or g or t.
  misc_feature (1128505)..(1128506): n is a or c or g or t.
  misc_feature (1128517)..(1128518): n is a or c or g or t.
  misc_feature (1128539)..(1128540): n is a or c or g or t.
  misc_feature (1561400)..(1561400): n is a or c or g or t.
  misc_feature (1561477)..(1561477): n is a or c or g or t.
  misc_feature (1561545)..(1561545): n is a or c or g or t.
  misc_feature (1767941)..(1767941): n is a or c or g or t.
VMSLERFVKIKYQTNEEKADKLVEGLKELGIECARIIEEKVDLQFDALRHLRENLNDDETFIKLVIANSIVSYQLSGKGEDWWWEFSKYFSQNPPEKSIVEACSKFLPSSRTNRRLVAGKIKRLEKLEPFLNSLTLQELRRYYFENMMGLRNDIAEALGSPKTAKTVVFAVKMFGYAGRIAFGEFVPYPMEIDIPEDVRIKAYTERITNEPPVSFWRRVAEETGIPPLHIDSILWPVLGGKREVMERLKKVCEKWELVLELGSL

SEQ ID NO: 885 - protein, 140 aa, Thermococcus kodakaraensis KOD1
  misc_feature (414542)..(414542): n is a or c or g or t.
  misc_feature (786890)..(786890): n is a or c or g or t.
  misc_feature (786907)..(786907): n is a or c or g or t.
  misc_feature (786944)..(786946): n is a or c or g or t.
  misc_feature (839139)..(839139): n is a or c or g or t.
  misc_feature (1128488)..(1128488): n is a or c or g or t.
  misc_feature (1128499)..(1128499): n is a or c or g or t.
  misc_feature (1128505)..(1128506): n is a or c or g or t.
  misc_feature (1128517)..(1128518): n is a or c or g or t.
  misc_feature (1128539)..(1128540): n is a or c or g or t.
  misc_feature (1561400)..(1561400): n is a or c or g or t.
  misc_feature (1561477)..(1561477): n is a or c or g or t.
  misc_feature (1561545)..(1561545): n is a or c or g or t.
  misc_feature (1767941)..(1767941): n is a or c or g or t.
MPVVAHNLTKVEVEKLSGSIPTGQIQVNLSPKIEDLRLGEVRTPTGKINGVEVVFSFEVTYQPEIARAVIKGLLLYLPPKKEMIDEILNLWEEEKKVNSVLFVEVTNFLTSELSPLLMIISKEMRLPYHIPLPRAQLRTQ

SEQ ID NO: 886 - protein, 331 aa, Thermococcus kodakaraensis KOD1
  misc_feature (414542)..(414542): n is a or c or g or t.
  misc_feature (786890)..(786890): n is a or c or g or t.
  misc_feature (786907)..(786907): n is a or c or g or t.
  misc_feature (786944)..(786946): n is a or c or g or t.
  misc_feature (839139)..(839139): n is a or c or g or t.
  misc_feature (1128488)..(1128488): n is a or c or g or t.
  misc_feature (1128499)..(1128499): n is a or c or g or t.
  misc_feature (1128505)..(1128506): n is a or c or g or t.
  misc_feature (1128517)..(1128518): n is a or c or g or t.
  misc_feature (1128539)..(1128540): n is a or c or g or t.
  misc_feature (1561400)..(1561400): n is a or c or g or t.
  misc_feature (1561477)..(1561477): n is a or c or g or t.
  misc_feature (1561545)..(1561545): n is a or c or g or t.
  misc_feature (1767941)..(1767941): n is a or c or g or t.
MLPPGKLRNDILREVVFPNLGVEDSKVVYGPREGFDSAVLEYDDEHYLVVATDPTLGVPEETFGFFTYHFASSDVAVFGARPRWLVVDLLFPEGTSREFLEATMKDLNAECRKYGSAIVGGHTGVYPSISEPTATTTAMGIVRKGELKLPLAKPGDKIVVTAKVGLEFAVSAAYFRADELSKVLTKKELMRLKRSFYFETAVPDALVAKPFVRGMHDATEGGLTALHEIADNSGVGFRVYSDRLHIDPLVKKVLDFYDLKPWSVSSTGTLIAITPTEKVNSLITELLKNGILAFELGEFTEEKDRVLVEGEEERPFPEFTEDPYVRLYGKG

SEQ ID NO: 887 - protein, 364 aa, Thermococcus kodakaraensis KOD1
  misc_feature (414542)..(414542): n is a or c or g or t.
  misc_feature (786890)..(786890): n is a or c or g or t.
  misc_feature (786907)..(786907): n is a or c or g or t.
  misc_feature (786944)..(786946): n is a or c or g or t.
  misc_feature (839139)..(839139): n is a or c or g or t.
  misc_feature (1128488)..(1128488): n is a or c or g or t.
  misc_feature (1128499)..(1128499): n is a or c or g or t.
  misc_feature (1128505)..(1128506): n is a or c or g or t.
  misc_feature (1128517)..(1128518): n is a or c or g or t.
  misc_feature (1128539)..(1128540): n is a or c or g or t.
  misc_feature (1561400)..(1561400): n is a or c or g or t.
  misc_feature (1561477)..(1561477): n is a or c or g or t.
  misc_feature (1561545)..(1561545): n is a or c or g or t.
  misc_feature (1767941)..(1767941): n is a or c or g or t.
MSRLIELAEKFYRDEYTDSVLYSRLAKAEKDERIKAEFQRLAQIESEHASFWYEFLKRRGVKPEKPKIGRFHFTSVFVLRRVLGAGAVTSLLEMGERDAVKKYYRFLTEYSSEMSEDERERLKSVILDELEHEKFFREEEKTFHTENIRDLVLGMNDGLVEILGAVTGLSAVYPNRPELIGISGLIVGVAGALSMGIGAFISVRSQRQVNEALREKMEVLFRVSPERAREEIMERLMEGGLPKEIAEKTAEELAQKGDAVISLLLGESDENEVRSALYTGLSYLLGVAFPVTPYFLASSSLTALPFSILLAGSVLGVVGTMVALLSGISIRKKALEMVSTGLGAAFLSYLFGRLMEAVFHVSAL

SEQ ID NO: 888 - protein, 254 aa, Thermococcus kodakaraensis KOD1
  misc_feature (414542)..(414542): n is a or c or g or t.
  misc_feature (786890)..(786890): n is a or c or g or t.
  misc_feature (786907)..(786907): n is a or c or g or t.
  misc_feature (786944)..(786946): n is a or c or g or t.
  misc_feature (839139)..(839139): n is a or c or g or t.
  misc_feature (1128488)..(1128488): n is a or c or g or t.
  misc_feature (1128499)..(1128499): n is a or c or g or t.
  misc_feature (1128505)..(1128506): n is a or c or g or t.
  misc_feature (1128517)..(1128518): n is a or c or g or t.
  misc_feature (1128539)..(1128540): n is a or c or g or t.
  misc_feature (1561400)..(1561400): n is a or c or g or t.
  misc_feature (1561477)..(1561477): n is a or c or g or t.
  misc_feature (1561545)..(1561545): n is a or c or g or t.
  misc_feature (1767941)..(1767941): n is a or c or g or t.
MLKYIGYLGVGIVIGILAAMFGLGGGFLIVPTLNFLGVEIHHAVGTSSAAVVFTSLSSAIAYHRQRRIHYKAGLLLASTAVIGAYIGAWATSYISAAQLKVIFGVVLFLVAIRLYRKKSREPHEVDLKEVKLNYKVVPIGGFIAGVASGLLGIGGGAINVPFLTYMGLPIHYAVATSSFAIVFTATSGAIKHYTLGNVEVEWLVLLVPGLIIGAQLGAKIAKRTKASQLTKAFAVVMAFLAIRMILKGLGYPVP

SEQ ID NO: 889 - protein, 358 aa, Thermococcus kodakaraensis KOD1
  misc_feature (414542)..(414542): n is a or c or g or t.
  misc_feature (786890)..(786890): n is a or c or g or t.
  misc_feature (786907)..(786907): n is a or c or g or t.
  misc_feature (786944)..(786946): n is a or c or g or t.
  misc_feature (839139)..(839139): n is a or c or g or t.
  misc_feature (1128488)..(1128488): n is a or c or g or t.
  misc_feature (1128499)..(1128499): n is a or c or g or t.
  misc_feature (1128505)..(1128506): n is a or c or g or t.
  misc_feature (1128517)..(1128518): n is a or c or g or t.
  misc_feature (1128539)..(1128540): n is a or c or g or t.
  misc_feature (1561400)..(1561400): n is a or c or g or t.
  misc_feature (1561477)..(1561477): n is a or c or g or t.
  misc_feature (1561545)..(1561545): n is a or c or g or t.
  misc_feature (1767941)..(1767941): n is a or c or g or t.
MPTIYPLRESINPFPAANFKTPLRTTTMLYVEILGNLPEMARDEVKAMLELGGGEIIGQDYLFLKVDAGEKAFPFLDRLGLAHEYGLLLVEADSVEELLQKAGEVEWPIKGAFKVDTETMANCRHDVLDLPRKLGAVIHAQGFRVNLSKPDTVVRVYCGERLYAGIRLRYFDPKDFEKRKAHHRPFFRPISLHPRVSRALVNLTKATREILDPFMGAGGILIEAGLLGLRVYGVDIRPEMVEGAETNLKHYGVRDYTLKLGDATRLEDLFPDKKFEAVATDPPYGTAATLAGRKRDELYRKALRSIYNVLEDGGRLAIAFPTDFNGKAEAEAVGFRTLGRYYQRVHKSLERYFYVFEK

SEQ ID NO: 890 - protein, 150 aa, Thermococcus kodakaraensis KOD1
  misc_feature (414542)..(414542): n is a or c or g or t.
  misc_feature (786890)..(786890): n is a or c or g or t.
  misc_feature (786907)..(786907): n is a or c or g or t.
  misc_feature (786944)..(786946): n is a or c or g or t.
  misc_feature (839139)..(839139): n is a or c or g or t.
  misc_feature (1128488)..(1128488): n is a or c or g or t.
  misc_feature (1128499)..(1128499): n is a or c or g or t.
  misc_feature (1128505)..(1128506): n is a or c or g or t.
  misc_feature (1128517)..(1128518): n is a or c or g or t.
  misc_feature (1128539)..(1128540): n is a or c or g or t.
  misc_feature (1561400)..(1561400): n is a or c or g or t.
  misc_feature (1561477)..(1561477): n is a or c or g or t.
  misc_feature (1561545)..(1561545): n is a or c or g or t.
  misc_feature (1767941)..(1767941): n is a or c or g or t.
VKTRPVKDVLPVYLKAILEKFRESPAEYWDEETALDVLKSRGLKVHSLEVERERQSVRAEFQAEGLIENNLGAISPEKVKYVEKLMRDFLWSIIDDLTASDLWAPIAINEDLDEIGEGFLMGPEEEETDEQVFSSLEFWWEEYWGDNGKP

SEQ ID NO: 891 - protein, 605 aa, Thermococcus kodakaraensis KOD1
  misc_feature (414542)..(414542): n is a or c or g or t.
  misc_feature (786890)..(786890): n is a or c or g or t.
  misc_feature (786907)..(786907): n is a or c or g or t.
  misc_feature (786944)..(786946): n is a or c or g or t.
  misc_feature (839139)..(839139): n is a or c or g or t.
  misc_feature (1128488)..(1128488): n is a or c or g or t.
  misc_feature (1128499)..(1128499): n is a or c or g or t.
  misc_feature (1128505)..(1128506): n is a or c or g or t.
  misc_feature (1128517)..(1128518): n is a or c or g or t.
  misc_feature (1128539)..(1128540): n is a or c or g or t.
  misc_feature (1561400)..(1561400): n is a or c or g or t.
  misc_feature (1561477)..(1561477): n is a or c or g or t.
  misc_feature (1561545)..(1561545): n is a or c or g or t.
  misc_feature (1767941)..(1767941): n is a or c or g or t.
VLRTYKQVRRMGRVEIIDTTFRDAHQSLIATRLRTEDMLPIAEKMDRIGFYSMEVWGGATFDVCIRYLREDPWERLRILREYLKKTKLQMLLRGQNLVGYRHYPDDVVEKFVELAHKNGIDIFRVFDALNDIRNMAVAIKKAKEVGAEVQGAIAYTTGKVFTLEYYMKKVEELLALDVDVITIKDMAGLLTPWKAYELVSEIKETYGVPVNVHTHSTTGMAVATYLKAVEAGADFIDTAISPLAFGTAQPGIQTIWHALPKAVGSHLDRELIHEVSRYLKKLLEEKYWGLLHKEALMVNPYVLKYQVPGGMFSNLLSQLKEMNALDKLDEVLEEIPRVREDLGWPPLVTPTSQIVGTQAVLNVLFGRYERVTQQVKDYVKGLYGRPPAEINPEIKKKILGDEEPITVRPADLLEPMLEKCRKELEERGYSPTEEDLLTYCLFPQVALEFFEARKEGRKAPEVPPTAQKFKLYVDGVEFEVGIEGVDLSALRYLPQMASAGAAISASQTISTPSAPSSIPAPIPAPAAPSPVTVAGEGVVTAPMPGKILRILVKEGEQVKTGQGLLILEAMKMENEIPAPKDGVVKKILVKEGDTVNTGDPLIEIG

SEQ ID NO: 892 - protein, 94 aa, Thermococcus kodakaraensis KOD1
  misc_feature (414542)..(414542): n is a or c or g or t.
  misc_feature (786890)..(786890): n is a or c or g or t.
  misc_feature (786907)..(786907): n is a or c or g or t.
  misc_feature (786944)..(786946): n is a or c or g or t.
  misc_feature (839139)..(839139): n is a or c or g or t.
  misc_feature (1128488)..(1128488): n is a or c or g or t.
  misc_feature (1128499)..(1128499): n is a or c or g or t.
  misc_feature (1128505)..(1128506): n is a or c or g or t.
  misc_feature (1128517)..(1128518): n is a or c or g or t.
  misc_feature (1128539)..(1128540): n is a or c or g or t.
  misc_feature (1561400)..(1561400): n is a or c or g or t.
  misc_feature (1561477)..(1561477): n is a or c or g or t.
  misc_feature (1561545)..(1561545): n is a or c or g or t.
  misc_feature (1767941)..(1767941): n is a or c or g or t.
VNAEEIYDRLRRVNEPITEMDIVSLGLVERVTVDEDGVKIYLRLAEGIRHPFQNALSWPVRWRIVRDVVKALDDVPKLEILEARNLTRYYPEED

SEQ ID NO: 893 - protein, 77 aa, Thermococcus kodakaraensis KOD1
  misc_feature (414542)..(414542): n is a or c or g or t.
  misc_feature (786890)..(786890): n is a or c or g or t.
  misc_feature (786907)..(786907): n is a or c or g or t.
  misc_feature (786944)..(786946): n is a or c or g or t.
  misc_feature (839139)..(839139): n is a or c or g or t.
  misc_feature (1128488)..(1128488): n is a or c or g or t.
  misc_feature (1128499)..(1128499): n is a or c or g or t.
  misc_feature (1128505)..(1128506): n is a or c or g or t.
  misc_feature (1128517)..(1128518): n is a or c or g or t.
  misc_feature (1128539)..(1128540): n is a or c or g or t.
  misc_feature (1561400)..(1561400): n is a or c or g or t.
  misc_feature (1561477)..(1561477): n is a or c or g or t.
  misc_feature (1561545)..(1561545): n is a or c or g or t.
  misc_feature (1767941)..(1767941): n is a or c or g or t.
MEQMGAVFLSFNPVAWLYVLLVYGSYKAIPVLVTEKCLRQRERKHIKTWKKLVLGALIEFLAFVSAGGLLWIFEIAL

SEQ ID NO: 894 - protein, 272 aa, Thermococcus kodakaraensis KOD1
  misc_feature (414542)..(414542): n is a or c or g or t.
  misc_feature (786890)..(786890): n is a or c or g or t.
  misc_feature (786907)..(786907): n is a or c or g or t.
  misc_feature (786944)..(786946): n is a or c or g or t.
  misc_feature (839139)..(839139): n is a or c or g or t.
  misc_feature (1128488)..(1128488): n is a or c or g or t.
  misc_feature (1128499)..(1128499): n is a or c or g or t.
  misc_feature (1128505)..(1128506): n is a or c or g or t.
  misc_feature (1128517)..(1128518): n is a or c or g or t.
  misc_feature (1128539)..(1128540): n is a or c or g or t.
  misc_feature (1561400)..(1561400): n is a or c or g or t.
  misc_feature (1561477)..(1561477): n is a or c or g or t.
  misc_feature (1561545)..(1561545): n is a or c or g or t.
  misc_feature (1767941)..(1767941): n is a or c or g or t.
MHSRVASMLVDTFPRFLKEWNGTVDSWLRYIRGYPELFGKVKWDYERYGMDWKGFTKLLLKRNMEELILAHEKLLEVLPRMETKIEELFGIKPKDYNVVLYIGIENGAGWVTEFLGKPPILFGLEAIAKLKWYSKLEGLVVHEFGHLVHWLLRGENIERLEDEQMFLLYTEGFAQRIEDIIIGRPWHLEEEGWFEWCEENEGLLKAEFLRRIQEKEPLNPFFGSWYTLFGKRFLGYYIGYKFICWLEKDYSLEEISKLKREEIKGKILKFLP

SEQ ID NO: 895 - protein, 71 aa, Thermococcus kodakaraensis KOD1
  misc_feature (414542)..(414542): n is a or c or g or t.
  misc_feature (786890)..(786890): n is a or c or g or t.
  misc_feature (786907)..(786907): n is a or c or g or t.
  misc_feature (786944)..(786946): n is a or c or g or t.
  misc_feature (839139)..(839139): n is a or c or g or t.
  misc_feature (1128488)..(1128488): n is a or c or g or t.
  misc_feature (1128499)..(1128499): n is a or c or g or t.
  misc_feature (1128505)..(1128506): n is a or c or g or t.
  misc_feature (1128517)..(1128518): n is a or c or g or t.
  misc_feature (1128539)..(1128540): n is a or c or g or t.
  misc_feature (1561400)..(1561400): n is a or c or g or t.
  misc_feature (1561477)..(1561477): n is a or c or g or t.
  misc_feature (1561545)..(1561545): n is a or c or g or t.
  misc_feature (1767941)..(1767941): n is a or c or g or t.
VRTEDGKKLGELDLDDLAEIVEFRYATPWNVTKDSLEKVALVLEDLAYLARSGRELPEKEVLIDMLKKRKY

SEQ ID NO: 896 - protein, 15 aa, Thermococcus kodakaraensis KOD1
  misc_feature (414542)..(414542): n is a or c or g or t.
  misc_feature (786890)..(786890): n is a or c or g or t.
  misc_feature (786907)..(786907): n is a or c or g or t.
  misc_feature (786944)..(786946): n is a or c or g or t.
  misc_feature (839139)..(839139): n is a or c or g or t.
  misc_feature (1128488)..(1128488): n is a or c or g or t.
  misc_feature (1128499)..(1128499): n is a or c or g or t.
  misc_feature (1128505)..(1128506): n is a or c or g or t.
  misc_feature (1128517)..(1128518): n is a or c or g or t.
  misc_feature (1128539)..(1128540): n is a or c or g or t.
  misc_feature (1561400)..(1561400): n is a or c or g or t.
  misc_feature (1561477)..(1561477): n is a or c or g or t.
  misc_feature (1561545)..(1561545): n is a or c or g or t.
  misc_feature (1767941)..(1767941): n is a or c or g or t.
MTESSLKWLPSTIYS

SEQ ID NO: 897 - protein, 98 aa, Thermococcus kodakaraensis KOD1
  misc_feature (414542)..(414542): n is a or c or g or t.
  misc_feature (786890)..(786890): n is a or c or g or t.
  misc_feature (786907)..(786907): n is a or c or g or t.
  misc_feature (786944)..(786946): n is a or c or g or t.
  misc_feature (839139)..(839139): n is a or c or g or t.
  misc_feature (1128488)..(1128488): n is a or c or g or t.
  misc_feature (1128499)..(1128499): n is a or c or g or t.
  misc_feature (1128505)..(1128506): n is a or c or g or t.
  misc_feature (1128517)..(1128518): n is a or c or g or t.
  misc_feature (1128539)..(1128540): n is a or c or g or t.
  misc_feature (1561400)..(1561400): n is a or c or g or t.
  misc_feature (1561477)..(1561477): n is a or c or g or t.
  misc_feature (1561545)..(1561545): n is a or c or g or t.
  misc_feature (1767941)..(1767941): n is a or c or g or t.
MLLISAAKFINPLAPHLTPLVGGEVVGMYYPPRKKVQPKKVEEEEEEDFEPLEAVEEAYENWDEEEFGEDWEEEEEWDEDWEDEEDWDEDWEEDEDDY

SEQ ID NO: 898 - protein, 293 aa, Thermococcus kodakaraensis KOD1
  misc_feature (414542)..(414542): n is a or c or g or t.
  misc_feature (786890)..(786890): n is a or c or g or t.
  misc_feature (786907)..(786907): n is a or c or g or t.
  misc_feature (786944)..(786946): n is a or c or g or t.
  misc_feature (839139)..(839139): n is a or c or g or t.
  misc_feature (1128488)..(1128488): n is a or c or g or t.
  misc_feature (1128499)..(1128499): n is a or c or g or t.
  misc_feature (1128505)..(1128506): n is a or c or g or t.
  misc_feature (1128517)..(1128518): n is a or c or g or t.
  misc_feature (1128539)..(1128540): n is a or c or g or t.
  misc_feature (1561400)..(1561400): n is a or c or g or t.
  misc_feature (1561477)..(1561477): n is a or c or g or t.
  misc_feature (1561545)..(1561545): n is a or c or g or t.
  misc_feature (1767941)..(1767941): n is a or c or g or t.
VMTVFWLKTRISEGEDSLESLKDEAKDHERVLILASGSMKRHGFLSEAEDYVREAGAEVMSISGLPAEPSVEVIEEFLPKVREFGPDLLIAMGGGSVIDTTKALKVFYDAPELVFEEIAFINRFSRPKPVPKLKTPLIAIPSTSGAGSEVSAASVLKKNGIKYNIVTPEIAPEVAILDPRLPRTMPREVARNSGLDVLVHGIEAYTTKVAGPFSDAMAIRAIKTVFEWLPKSVEGDPEARARMHYAATMAGIAFLNARLGLAHAMSHKAAWVGPHGLLNAIFIPYVMEFNAER

SEQ ID NO: 899 - protein, 34 aa, Thermococcus kodakaraensis KOD1
  misc_feature (414542)..(414542): n is a or c or g or t.
  misc_feature (786890)..(786890): n is a or c or g or t.
  misc_feature (786907)..(786907): n is a or c or g or t.
  misc_feature (786944)..(786946): n is a or c or g or t.
  misc_feature (839139)..(839139): n is a or c or g or t.
  misc_feature (1128488)..(1128488): n is a or c or g or t.
  misc_feature (1128499)..(1128499): n is a or c or g or t.
  misc_feature (1128505)..(1128506): n is a or c or g or t.
  misc_feature (1128517)..(1128518): n is a or c or g or t.
  misc_feature (1128539)..(1128540): n is a or c or g or t.
  misc_feature (1561400)..(1561400): n is a or c or g or t.
  misc_feature (1561477)..(1561477): n is a or c or g or t.
  misc_feature (1561545)..(1561545): n is a or c or g or t.
  misc_feature (1767941)..(1767941): n is a or c or g or t.
MAEKAYRDGLIAFNPVEPKPEEIRELYLKALNAL

SEQ ID NO: 900 - protein, 94 aa, Thermococcus kodakaraensis KOD1
  misc_feature (414542)..(414542): n is a or c or g or t.
  misc_feature (786890)..(786890): n is a or c or g or t.
  misc_feature (786907)..(786907): n is a or c or g or t.
  misc_feature (786944)..(786946): n is a or c or g or t.
  misc_feature (839139)..(839139): n is a or c or g or t.
  misc_feature (1128488)..(1128488): n is a or c or g or t.
  misc_feature (1128499)..(1128499): n is a or c or g or t.
  misc_feature (1128505)..(1128506): n is a or c or g or t.
  misc_feature (1128517)..(1128518): n is a or c or g or t.
  misc_feature (1128539)..(1128540): n is a or c or g or t.
  misc_feature (1561400)..(1561400): n is a or c or g or t.
  misc_feature (1561477)..(1561477): n is a or c or g or t.
  misc_feature (1561545)..(1561545): n is a or c or g or t.
  misc_feature (1767941)..(1767941): n is a or c or g or t.
VVPIWVSKAEHPKAVKPTDLHILESIIWRELQNGTKSVILDALEYLMIENGVERALRFVGKLRDMAILTGATFYVTVSEGIDEKTRAMLRRIVE

SEQ ID NO: 901 - protein, 1319 aa, Thermococcus kodakaraensis KOD1
  misc_feature (414542)..(414542): n is a or c or g or t.
  misc_feature (786890)..(786890): n is a or c or g or t.
  misc_feature (786907)..(786907): n is a or c or g or t.
  misc_feature (786944)..(786946): n is a or c or g or t.
  misc_feature (839139)..(839139): n is a or c or g or t.
  misc_feature (1128488)..(1128488): n is a or c or g or t.
  misc_feature (1128499)..(1128499): n is a or c or g or t.
  misc_feature (1128505)..(1128506): n is a or c or g or t.
  misc_feature (1128517)..(1128518): n is a or c or g or t.
  misc_feature (1128539)..(1128540): n is a or c or g or t.
  misc_feature (1561400)..(1561400): n is a or c or g or t.
  misc_feature (1561477)..(1561477): n is a or c or g or t.
  misc_feature (1561545)..(1561545): n is a or c or g or t.
  misc_feature (1767941)..(1767941): n is a or c or g or t.
MKRSALVLIVLLLLSIIPAWAIKPVTAVQETTSAVISEKIYASEDTWIDEDGYVDSKNYRLRVGVHYGSEERAYLKFDLSTLPENAIIVRATLTLHAYYHSGSRSHNITVYGVLDDSWSEDTLTWNNQPTDYTGVLNWTIVELPNGNVDSNVSWDVTDFVKSQFEEDKVVSFYLHSNLSDLNVNDYIYFNSKESSHGNHPCLEIVYEVSEPPQIPVVPIQEIQSNTTDGDASAYVGQTVQTEGVVTTVTSRGFFIQNGTGPWSGIYVYTGSTPDVSIGDLVQVTGKVNEHKTKNDNKGLTEIDVNSMEDIVKLGTAEVPDPVLLPTGNVSQERWESVLVRVENAIVTNTSLGYGEWEADDGSGPVRIDDMIYKYDLPKVGDVFRYIVGVVYYSYGDFKIEPRDADDMALAVPEILNLNVNPKYVDESMINVTVRNNYDHDVSVTLNLTISDGTAVSRQLTLGPQNTSTVSYEWNPAKPGKYTIEVKLYDDSGRLLDSKNTTVEVSFGFGIASYSVPEVVLVEEPQILNFTIASNYSTAKKAAFTVTMNGTVIYQNDSLEVPAGGEIKVAIPWSAPRYGTYEMHAVLKMTNSLGENVTVKELTKTIFAQYNVTPVATEEIIPTEDAYSYYYNGTEFSWKDYHPYNEKRELAIGNSSKYSKQRAYFKFEIPELSGDTEIISAEFEVYVPYIGDLDVPMDVGVYKTTTDWNESKTPSEPPIPDTLLAHGELSKGWVSWNITEFVRNNTGKTVALLLKLTDESIDNYAWIYSKENQDLKPHLKITYRIPLNIEEVGNTTVAVVGNATVEKNESFFVVEVGGKNYTFNVTAGNLIVDTENIKPDTPSLVAYWKAKISGVETKTGEYRVKQNLKVERHVIQTNVTVHLAMEDPSVAVLLVPWMGDTVRDVVVTKGSQNITLEENDTTDELGYYYITSDAVVVVLKKDPTDVTVVFESSSTVTKTLASEVFYRMALFYTYYLRNHNEELEDAYAQFQNLTSELEARGVDLKNVPVDEINSRMQGYRESFARLPEITDIVSNQGGLGIITAFRVSRQAFVLYKSLMDELAYWNKVLSNALTAAENNQSVVIIPRNVSVLIDLSHDQYYGSKVGINGLVSRITKEFGWNVEMNHEPITYDKLKNYNVVIILNPKIDLSSEEIAALRKYVEEGGGLIIAGDWYKYVNPSLNELLSGYGITLEKTELMDDDHNSGKPYYPYVGAYNRNTPITKFIPDGWMTYYHGDTLTVEGNAVWVIKAFETSYAVDADGNVVNEKGSQPVVAAAVEVGKGRIIVYGSSRAFSDSYYGKYIASNWPFIKGALLWLVGEI

SEQ ID NO: 902 - protein, 186 aa, Thermococcus kodakaraensis KOD1
  misc_feature (414542)..(414542): n is a or c or g or t.
  misc_feature (786890)..(786890): n is a or c or g or t.
  misc_feature (786907)..(786907): n is a or c or g or t.
  misc_feature (786944)..(786946): n is a or c or g or t.
  misc_feature (839139)..(839139): n is a or c or g or t.
  misc_feature (1128488)..(1128488): n is a or c or g or t.
  misc_feature (1128499)..(1128499): n is a or c or g or t.
  misc_feature (1128505)..(1128506): n is a or c or g or t.
  misc_feature (1128517)..(1128518): n is a or c or g or t.
  misc_feature (1128539)..(1128540): n is a or c or g or t.
  misc_feature (1561400)..(1561400): n is a or c or g or t.
  misc_feature (1561477)..(1561477): n is a or c or g or t.
  misc_feature (1561545)..(1561545): n is a or c or g or t.
  misc_feature (1767941)..(1767941): n is a or c or g or t.
VKPMSEHNRRLVEKAGIDVEKLLDMLLRAAAAEFTTYYYYTVMRNHATGLEGETIKEIVEDARLEDRNHFEALVPRIYELGGELPRDIVNFSKMAWCCDAYLPEEPTIENVLKVLLEAERCAVGVYTEICNYTFDKDPRTYDLALAILHEEIEHEAWFEELLTGKPSGHFRRSKPGESPYVSKFLR

SEQ ID NO: 903 - protein, 76 aa, Thermococcus kodakaraensis KOD1
  misc_feature (414542)..(414542): n is a or c or g or t.
  misc_feature (786890)..(786890): n is a or c or g or t.
  misc_feature (786907)..(786907): n is a or c or g or t.
  misc_feature (786944)..(786946): n is a or c or g or t.
  misc_feature (839139)..(839139): n is a or c or g or t.
  misc_feature (1128488)..(1128488): n is a or c or g or t.
  misc_feature (1128499)..(1128499): n is a or c or g or t.
  misc_feature (1128505)..(1128506): n is a or c or g or t.
  misc_feature (1128517)..(1128518): n is a or c or g or t.
  misc_feature (1128539)..(1128540): n is a or c or g or t.
  misc_feature (1561400)..(1561400): n is a or c or g or t.
  misc_feature (1561477)..(1561477): n is a or c or g or t.
  misc_feature (1561545)..(1561545): n is a or c or g or t.
  misc_feature (1767941)..(1767941): n is a or c or g or t.
VHVSLTVVEMSESLSKVMVEIMKIEKKLEEIEKKLEELIEDNERYGIMKLSEESLWEFLESEPDIYSENDVKVKLR

SEQ ID NO: 904 - protein, 44 aa, Thermococcus kodakaraensis KOD1
  misc_feature (414542)..(414542): n is a or c or g or t.
  misc_feature (786890)..(786890): n is a or c or g or t.
  misc_feature (786907)..(786907): n is a or c or g or t.
  misc_feature (786944)..(786946): n is a or c or g or t.
  misc_feature (839139)..(839139): n is a or c or g or t.
  misc_feature (1128488)..(1128488): n is a or c or g or t.
  misc_feature (1128499)..(1128499): n is a or c or g or t.
  misc_feature (1128505)..(1128506): n is a or c or g or t.
  misc_feature (1128517)..(1128518): n is a or c or g or t.
  misc_feature (1128539)..(1128540): n is a or c or g or t.
  misc_feature (1561400)..(1561400): n is a or c or g or t.
  misc_feature (1561477)..(1561477): n is a or c or g or t.
  misc_feature (1561545)..(1561545): n is a or c or g or t.
  misc_feature (1767941)..(1767941): n is a or c or g or t.
VIKMDENIKELKRMAEEVRKLREELERLSKTLEKIEKAQKEEEE

SEQ ID NO: 905 - protein, 108 aa, Thermococcus kodakaraensis KOD1
  misc_feature (414542)..(414542): n is a or c or g or t.
  misc_feature (786890)..(786890): n is a or c or g or t.
  misc_feature (786907)..(786907): n is a or c or g or t.
  misc_feature (786944)..(786946): n is a or c or g or t.
  misc_feature (839139)..(839139): n is a or c or g or t.
  misc_feature (1128488)..(1128488): n is a or c or g or t.
  misc_feature (1128499)..(1128499): n is a or c or g or t.
  misc_feature (1128505)..(1128506): n is a or c or g or t.
  misc_feature (1128517)..(1128518): n is a or c or g or t.
  misc_feature (1128539)..(1128540): n is a or c or g or t.
  misc_feature (1561400)..(1561400): n is a or c or g or t.
  misc_feature (1561477)..(1561477): n is a or c or g or t.
  misc_feature (1561545)..(1561545): n is a or c or g or t.
  misc_feature (1767941)..(1767941): n is a or c or g or t.
VFWRRSKMDKKAQALNEFLRLLKERFGSSIEEVFLFGSYARGDYDEESDIDVLIVGEIDFDEVIELVTDVLLRYGELISPVLLKPDEFKKRNDSFIKTVKAEGIPLEI

SEQ ID NO: 906 - protein, 122 aa, Thermococcus kodakaraensis KOD1
  misc_feature (414542)..(414542): n is a or c or g or t.
  misc_feature (786890)..(786890): n is a or c or g or t.
  misc_feature (786907)..(786907): n is a or c or g or t.
  misc_feature (786944)..(786946): n is a or c or g or t.
  misc_feature (839139)..(839139): n is a or c or g or t.
  misc_feature (1128488)..(1128488): n is a or c or g or t.
  misc_feature (1128499)..(1128499): n is a or c or g or t.
  misc_feature (1128505)..(1128506): n is a or c or g or t.
  misc_feature (1128517)..(1128518): n is a or c or g or t.
  misc_feature (1128539)..(1128540): n is a or c or g or t.
  misc_feature (1561400)..(1561400): n is a or c or g or t.
  misc_feature (1561477)..(1561477): n is a or c or g or t.
  misc_feature (1561545)..(1561545): n is a or c or g or t.
  misc_feature (1767941)..(1767941): n is a or c or g or t.
MHGALGLGLLAIGIAGLIALLIALVIAGFVLYLGTELAGIKKASLGKSIVAVVGGGILAGILFIIPVLGWILGIVAYIWVIKVVFDTDWLRATLAFLMAIIIEVIVLWLFKLLLGISLLAAL

SEQ ID NO: 907 - protein, 305 aa, Thermococcus kodakaraensis KOD1
  misc_feature (414542)..(414542): n is a or c or g or t.
  misc_feature (786890)..(786890): n is a or c or g or t.
  misc_feature (786907)..(786907): n is a or c or g or t.
  misc_feature (786944)..(786946): n is a or c or g or t.
  misc_feature (839139)..(839139): n is a or c or g or t.
  misc_feature (1128488)..(1128488): n is a or c or g or t.
  misc_feature (1128499)..(1128499): n is a or c or g or t.
  misc_feature (1128505)..(1128506): n is a or c or g or t.
  misc_feature (1128517)..(1128518): n is a or c or g or t.
  misc_feature (1128539)..(1128540): n is a or c or g or t.
  misc_feature (1561400)..(1561400): n is a or c or g or t.
  misc_feature (1561477)..(1561477): n is a or c or g or t.
  misc_feature (1561545)..(1561545): n is a or c or g or t.
  misc_feature (1767941)..(1767941): n is a or c or g or t.
MAMISVGGVGVLFEGELDDGFEDGFRTTFARRYLPDVLRGDARPNVIIERFKGEKFRVFSSLYDVNSKDYYKLESAVPQAYKNEAPVFFLLQATARAGARKGRIFITDSVSVINENGKAVLFVGYPHTGKSTISALALSEGLPLLSTENTVVDVRDGRIFVIGGTDVLVYDPKIEEIYGIKVEYQDTTRSGYRIVDISSSERRIALRRGVEIEKIIVLHAAFGGGDASFSPVRGRKIKKTLWYFSTSLLKGMDYYEPAPLYMPMSDEINSNLNRLLDLAVESYSGAMFEAFGNHRDVFRRTLLFY

SEQ ID NO: 908 - protein, 65 aa, Thermococcus kodakaraensis KOD1
  misc_feature (414542)..(414542): n is a or c or g or t.
  misc_feature (786890)..(786890): n is a or c or g or t.
  misc_feature (786907)..(786907): n is a or c or g or t.
  misc_feature (786944)..(786946): n is a or c or g or t.
  misc_feature (839139)..(839139): n is a or c or g or t.
  misc_feature (1128488)..(1128488): n is a or c or g or t.
  misc_feature (1128499)..(1128499): n is a or c or g or t.
  misc_feature (1128505)..(1128506): n is a or c or g or t.
  misc_feature (1128517)..(1128518): n is a or c or g or t.
  misc_feature (1128539)..(1128540): n is a or c or g or t.
  misc_feature (1561400)..(1561400): n is a or c or g or t.
  misc_feature (1561477)..(1561477): n is a or c or g or t.
  misc_feature (1561545)..(1561545): n is a or c or g or t.
  misc_feature (1767941)..(1767941): n is a or c or g or t.
MALPKNLIPMPRSRFLRVKCIDCGNEQIVFSHPATPVRCLVCGATLVEPTGGKGIIKAKVLEVLE

SEQ ID NO: 909 - protein, 59 aa, Thermococcus kodakaraensis KOD1
  misc_feature (414542)..(414542): n is a or c or g or t.
  misc_feature (786890)..(786890): n is a or c or g or t.
  misc_feature (786907)..(786907): n is a or c or g or t.
  misc_feature (786944)..(786946): n is a or c or g or t.
  misc_feature (839139)..(839139): n is a or c or g or t.
  misc_feature (1128488)..(1128488): n is a or c or g or t.
  misc_feature (1128499)..(1128499): n is a or c or g or t.
  misc_feature (1128505)..(1128506): n is a or c or g or t.
  misc_feature (1128517)..(1128518): n is a or c or g or t.
  misc_feature (1128539)..(1128540): n is a or c or g or t.
  misc_feature (1561400)..(1561400): n is a or c or g or t.
  misc_feature (1561477)..(1561477): n is a or c or g or t.
  misc_feature (1561545)..(1561545): n is a or c or g or t.
  misc_feature (1767941)..(1767941): n is a or c or g or t.
MHFRIRKCPNCGRYTLKEVCPVCGSETKVAHPPRFSPEDPYGEYRRRLKRELLGIGRRS

SEQ ID NO: 910 - protein, 82 aa, Thermococcus kodakaraensis KOD1
  misc_feature (414542)..(414542): n is a or c or g or t.
  misc_feature (786890)..(786890): n is a or c or g or t.
  misc_feature (786907)..(786907): n is a or c or g or t.
  misc_feature (786944)..(786946): n is a or c or g or t.
  misc_feature (839139)..(839139): n is a or c or g or t.
  misc_feature (1128488)..(1128488): n is a or c or g or t.
  misc_feature (1128499)..(1128499): n is a or c or g or t.
  misc_feature (1128505)..(1128506): n is a or c or g or t.
  misc_feature (1128517)..(1128518): n is a or c or g or t.
  misc_feature (1128539)..(1128540): n is a or c or g or t.
  misc_feature (1561400)..(1561400): n is a or c or g or t.
  misc_feature (1561477)..(1561477): n is a or c or g or t.
  misc_feature (1561545)..(1561545): n is a or c or g or t.
  misc_feature (1767941)..(1767941): n is a or c or g or t.
MKAVIKGLMIIAVVLAIVLPLASSNPDGLEATMEKVGLEEKPIYEAPLDYGETWGQSFAMGLLGIALTFGVAYALSRALKGV

SEQ ID NO: 911 - protein, 267 aa, Thermococcus kodakaraensis KOD1
  misc_feature (414542)..(414542): n is a or c or g or t.
  misc_feature (786890)..(786890): n is a or c or g or t.
  misc_feature (786907)..(786907): n is a or c or g or t.
  misc_feature (786944)..(786946): n is a or c or g or t.
  misc_feature (839139)..(839139): n is a or c or g or t.
  misc_feature (1128488)..(1128488): n is a or c or g or t.
  misc_feature (1128499)..(1128499): n is a or c or g or t.
  misc_feature (1128505)..(1128506): n is a or c or g or t.
  misc_feature (1128517)..(1128518): n is a or c or g or t.
  misc_feature (1128539)..(1128540): n is a or c or g or t.
  misc_feature (1561400)..(1561400): n is a or c or g or t.
  misc_feature (1561477)..(1561477): n is a or c or g or t.
  misc_feature (1561545)..(1561545): n is a or c or g or t.
  misc_feature (1767941)..(1767941): n is a or c or g or t.
VIEIKGLHFSYGGREVLRGVNLRIKKGEAFGLLGPNGAGKSTLILHLNGLLKPKKGEVIINGINPVKKPGKARKIVGLVFQDPNDQLFSPTVFEDVAFGPYNLGLRGKELRKRVEEALGRVGMLDYINRETKALSFGEKKRIAIATVLAMEPEVIVFDEPFANLDFKGKKAVREIILGLKREGKTVILASHEAEYLFLCDRIALMDGGKIVKVGSPEEVLGNPELLRGHNLDVPPLVELFLRLGLKVPRSVEEGVELLKMWKVSDLD

SEQ ID NO: 912 - protein, 153 aa, Thermococcus kodakaraensis KOD1
  misc_feature (414542)..(414542): n is a or c or g or t.
  misc_feature (786890)..(786890): n is a or c or g or t.
  misc_feature (786907)..(786907): n is a or c or g or t.
  misc_feature (786944)..(786946): n is a or c or g or t.
  misc_feature (839139)..(839139): n is a or c or g or t.
  misc_feature (1128488)..(1128488): n is a or c or g or t.
  misc_feature (1128499)..(1128499): n is a or c or g or t.
  misc_feature (1128505)..(1128506): n is a or c or g or t.
  misc_feature (1128517)..(1128518): n is a or c or g or t.
  misc_feature (1128539)..(1128540): n is a or c or g or t.
  misc_feature (1561400)..(1561400): n is a or c or g or t.
  misc_feature (1561477)..(1561477): n is a or c or g or t.
  misc_feature (1561545)..(1561545): n is a or c or g or t.
  misc_feature (1767941)..(1767941): n is a or c or g or t.
MGKKKFEGVMGMAEEKKTRTLEQIQDEIRSYLGEIEYLRSQVGVIDATITDLRTVDATLAYLKEKGKGKEIYIPLGSGVAIRGKIENPDDVIMDVGAGILVGATVDEARENIEKRIKALMDLRLALLRKIEEDTRKVNELLKELQEMQPEKRE

SEQ ID NO: 913 - protein, 249 aa, Thermococcus kodakaraensis KOD1
  misc_feature (414542)..(414542): n is a or c or g or t.
  misc_feature (786890)..(786890): n is a or c or g or t.
  misc_feature (786907)..(786907): n is a or c or g or t.
  misc_feature (786944)..(786946): n is a or c or g or t.
  misc_feature (839139)..(839139): n is a or c or g or t.
  misc_feature (1128488)..(1128488): n is a or c or g or t.
  misc_feature (1128499)..(1128499): n is a or c or g or t.
  misc_feature (1128505)..(1128506): n is a or c or g or t.
  misc_feature (1128517)..(1128518): n is a or c or g or t.
  misc_feature (1128539)..(1128540): n is a or c or g or t.
  misc_feature (1561400)..(1561400): n is a or c or g or t.
  misc_feature (1561477)..(1561477): n is a or c or g or t.
  misc_feature (1561545)..(1561545): n is a or c or g or t.
  misc_feature (1767941)..(1767941): n is a or c or g or t.
MFLRKMPYSQHTEESSMRGPHVAFILLVVIWALIAVEVSQPSEKIHCFSKVPVNVSGIKPPIVSGPGFPPEAGFKGITLDEVVNGSPRHVLVGFFNFKPLNWTEKKPKCYFKRLEGFSENWIGFVLPGASTESITLSSKVYLALYVYPKETSVVISKIEYAENPEDSKIVEAFRLEYPKNPEEYVAEYLDSLEKAGYTKVRELKKGAIFERDDDTLLALEIEDDANFYLILVKGSHEDVLRVAEILSEG

SEQ ID NO: 914 - protein, 62 aa, Thermococcus kodakaraensis KOD1
  misc_feature (414542)..(414542): n is a or c or g or t.
  misc_feature (786890)..(786890): n is a or c or g or t.
  misc_feature (786907)..(786907): n is a or c or g or t.
  misc_feature (786944)..(786946): n is a or c or g or t.
  misc_feature (839139)..(839139): n is a or c or g or t.
  misc_feature (1128488)..(1128488): n is a or c or g or t.
  misc_feature (1128499)..(1128499): n is a or c or g or t.
  misc_feature (1128505)..(1128506): n is a or c or g or t.
  misc_feature (1128517)..(1128518): n is a or c or g or t.
  misc_feature (1128539)..(1128540): n is a or c or g or t.
  misc_feature (1561400)..(1561400): n is a or c or g or t.
  misc_feature (1561477)..(1561477): n is a or c or g or t.
  misc_feature (1561545)..(1561545): n is a or c or g or t.
  misc_feature (1767941)..(1767941): n is a or c or g or t.
VVLMPIFSDETTKWLWGILIVSILSGIVLGEGKLEKVLLAVQGFFPALMVLMIISTGLHVTC

SEQ ID NO: 915 - protein, 159 aa, Thermococcus kodakaraensis KOD1
  misc_feature (414542)..(414542): n is a or c or g or t.
  misc_feature (786890)..(786890): n is a or c or g or t.
  misc_feature (786907)..(786907): n is a or c or g or t.
  misc_feature (786944)..(786946): n is a or c or g or t.
  misc_feature (839139)..(839139): n is a or c or g or t.
  misc_feature (1128488)..(1128488): n is a or c or g or t.
  misc_feature (1128499)..(1128499): n is a or c or g or t.
  misc_feature (1128505)..(1128506): n is a or c or g or t.
  misc_feature (1128517)..(1128518): n is a or c or g or t.
  misc_feature (1128539)..(1128540): n is a or c or g or t.
  misc_feature (1561400)..(1561400): n is a or c or g or t.
  misc_feature (1561477)..(1561477): n is a or c or g or t.
  misc_feature (1561545)..(1561545): n is a or c or g or t.
  misc_feature (1767941)..(1767941): n is a or c or g or t.
VKEMEKPKFRGHLKLLVLKLLEEGPLHGYGVMAELEKRYGMPQPSPGAIYPILASLKRSGLIEVAGEGKREKKLYRITEKGREYLKEHEYEVNEAIETAERFREFARLGGRELAEVLKETFNSINELGEEQRRALAKEFAEFTKRVRLILLGEIKEGTE

SEQ ID NO: 916 - protein, 256 aa, Thermococcus kodakaraensis KOD1
  misc_feature (414542)..(414542): n is a or c or g or t.
  misc_feature (786890)..(786890): n is a or c or g or t.
  misc_feature (786907)..(786907): n is a or c or g or t.
  misc_feature (786944)..(786946): n is a or c or g or t.
  misc_feature (839139)..(839139): n is a or c or g or t.
  misc_feature (1128488)..(1128488): n is a or c or g or t.
  misc_feature (1128499)..(1128499): n is a or c or g or t.
  misc_feature (1128505)..(1128506): n is a or c or g or t.
  misc_feature (1128517)..(1128518): n is a or c or g or t.
  misc_feature (1128539)..(1128540): n is a or c or g or t.
  misc_feature (1561400)..(1561400): n is a or c or g or t.
  misc_feature (1561477)..(1561477): n is a or c or g or t.
  misc_feature (1561545)..(1561545): n is a or c or g or t.
  misc_feature (1767941)..(1767941): n is a or c or g or t.
MEALTTMAYRQLKRFSRARSRVIGMIINPLIWLVFFGLGWSKVFDNPMTKMIFGGVDYLTFLAPGIFAMTVFNMSFIAGVSVIWDKQFGFLKEVLVAPASRRGSILGRIIGDSLVTLAQGTIILTLTYPLAESLKLSGFLPALGVGFLLSMAFSGFGVSLALKMESMEGFQMVMMVLMLPLTFLSGAIYPIDTMPGWMKALAYINPLTYAVDGARHFLVGANVAKFSLAVDLGVLTVLAALLVGLAMVEFERATIG

SEQ ID NO: 917 - protein, 183 aa, Thermococcus kodakaraensis KOD1
  misc_feature (414542)..(414542): n is a or c or g or t.
  misc_feature (786890)..(786890): n is a or c or g or t.
  misc_feature (786907)..(786907): n is a or c or g or t.
  misc_feature (786944)..(786946): n is a or c or g or t.
  misc_feature (839139)..(839139): n is a or c or g or t.
  misc_feature (1128488)..(1128488): n is a or c or g or t.
  misc_feature (1128499)..(1128499): n is a or c or g or t.
  misc_feature (1128505)..(1128506): n is a or c or g or t.
  misc_feature (1128517)..(1128518): n is a or c or g or t.
  misc_feature (1128539)..(1128540): n is a or c or g or t.
  misc_feature (1561400)..(1561400): n is a or c or g or t.
  misc_feature (1561477)..(1561477): n is a or c or g or t.
  misc_feature (1561545)..(1561545): n is a or c or g or t.
  misc_feature (1767941)..(1767941): n is a or c or g or t.
VIEVELKGYASDEIFQRVRDEFEFIRKEYHEDTYYQHPCRDFSETDEALRIRIRRFNGHFEAFMTYKGPKIDEHSKTRKEIEVPLSDPDKHAEILESLGFVEVLTVSKVREKYYVEKGIIIALDEVAGLGKFIQIEAMTDRTEDVPQLIDKLRAILTELGVERFERRSYLELLLEKEGANGEA

SEQ ID NO: 918 - protein, 19 aa, Thermococcus kodakaraensis KOD1
  misc_feature (414542)..(414542): n is a or c or g or t.
  misc_feature (786890)..(786890): n is a or c or g or t.
  misc_feature (786907)..(786907): n is a or c or g or t.
  misc_feature (786944)..(786946): n is a or c or g or t.
  misc_feature (839139)..(839139): n is a or c or g or t.
  misc_feature (1128488)..(1128488): n is a or c or g or t.
  misc_feature (1128499)..(1128499): n is a or c or g or t.
  misc_feature (1128505)..(1128506): n is a or c or g or t.
  misc_feature (1128517)..(1128518): n is a or c or g or t.
  misc_feature (1128539)..(1128540): n is a or c or g or t.
  misc_feature (1561400)..(1561400): n is a or c or g or t.
  misc_feature (1561477)..(1561477): n is a or c or g or t.
  misc_feature (1561545)..(1561545): n is a or c or g or t.
  misc_feature (1767941)..(1767941): n is a or c or g or t.
MDDEIRTYLVGFSLVRFKS

SEQ ID NO: 919 - protein, 103 aa, Thermococcus kodakaraensis KOD1
  misc_feature (414542)..(414542): n is a or c or g or t.
  misc_feature (786890)..(786890): n is a or c or g or t.
  misc_feature (786907)..(786907): n is a or c or g or t.
  misc_feature (786944)..(786946): n is a or c or g or t.
  misc_feature (839139)..(839139): n is a or c or g or t.
  misc_feature (1128488)..(1128488): n is a or c or g or t.
  misc_feature (1128499)..(1128499): n is a or c or g or t.
  misc_feature (1128505)..(1128506): n is a or c or g or t.
  misc_feature (1128517)..(1128518): n is a or c or g or t.
  misc_feature (1128539)..(1128540): n is a or c or g or t.
  misc_feature (1561400)..(1561400): n is a or c or g or t.
  misc_feature (1561477)..(1561477): n is a or c or g or t.
  misc_feature (1561545)..(1561545): n is a or c or g or t.
  misc_feature (1767941)..(1767941): n is a or c or g or t.
VLSMAVSVKNSEGIKLLIEEVAKAVGVSPKELIEYYEWKANREKLKKMKPTRMTKKEAKNFILSQKGKRKISEEEAIKLYYEAEEEIKKWEKIERKLKKLGLE

SEQ ID NO: 920 - protein, 101 aa, Thermococcus kodakaraensis KOD1
  misc_feature (414542)..(414542): n is a or c or g or t.
  misc_feature (786890)..(786890): n is a or c or g or t.
  misc_feature (786907)..(786907): n is a or c or g or t.
  misc_feature (786944)..(786946): n is a or c or g or t.
  misc_feature (839139)..(839139): n is a or c or g or t.
  misc_feature (1128488)..(1128488): n is a or c or g or t.
  misc_feature (1128499)..(1128499): n is a or c or g or t.
  misc_feature (1128505)..(1128506): n is a or c or g or t.
  misc_feature (1128517)..(1128518): n is a or c or g or t.
  misc_feature (1128539)..(1128540): n is a or c or g or t.
  misc_feature (1561400)..(1561400): n is a or c or g or t.
  misc_feature (1561477)..(1561477): n is a or c or g or t.
  misc_feature (1561545)..(1561545): n is a or c or g or t.
  misc_feature (1767941)..(1767941): n is a or c or g or t.
MRRLYYALPFLLIATGYVLWNVRITPGIIALFNWLTFFLELRYGGESKEGEELVTMSIAVSSLLGLGKGTLASIGEFLALFTFILELTALMIKVRTPSRAR

SEQ ID NO: 921 - protein, 36 aa, Thermococcus kodakaraensis KOD1
  misc_feature (414542)..(414542): n is a or c or g or t.
  misc_feature (786890)..(786890): n is a or c or g or t.
  misc_feature (786907)..(786907): n is a or c or g or t.
  misc_feature (786944)..(786946): n is a or c or g or t.
  misc_feature (839139)..(839139): n is a or c or g or t.
  misc_feature (1128488)..(1128488): n is a or c or g or t.
  misc_feature (1128499)..(1128499): n is a or c or g or t.
  misc_feature (1128505)..(1128506): n is a or c or g or t.
  misc_feature (1128517)..(1128518): n is a or c or g or t.
  misc_feature (1128539)..(1128540): n is a or c or g or t.
  misc_feature (1561400)..(1561400): n is a or c or g or t.
  misc_feature (1561477)..(1561477): n is a or c or g or t.
  misc_feature (1561545)..(1561545): n is a or c or g or t.
  misc_feature (1767941)..(1767941): n is a or c or g or t.
VEGFALLAHVNDAGNYTFIVKGRNGEELATGGLVVG

SEQ ID NO: 922 - protein, 198 aa, Thermococcus kodakaraensis KOD1
  misc_feature (414542)..(414542): n is a or c or g or t.
  misc_feature (786890)..(786890): n is a or c or g or t.
  misc_feature (786907)..(786907): n is a or c or g or t.
  misc_feature (786944)..(786946): n is a or c or g or t.
  misc_feature (839139)..(839139): n is a or c or g or t.
  misc_feature (1128488)..(1128488): n is a or c or g or t.
  misc_feature (1128499)..(1128499): n is a or c or g or t.
  misc_feature (1128505)..(1128506): n is a or c or g or t.
  misc_feature (1128517)..(1128518): n is a or c or g or t.
  misc_feature (1128539)..(1128540): n is a or c or g or t.
  misc_feature (1561400)..(1561400): n is a or c or g or t.
  misc_feature (1561477)..(1561477): n is a or c or g or t.
  misc_feature (1561545)..(1561545): n is a or c or g or t.
  misc_feature (1767941)..(1767941): n is a or c or g or t.
MVVNVKKTGILLMLLVLVGFASACLSSDSNTSSQTSTESPKYVDVNGTRIYLDQIHFYMYGMKTCPHCRHMKEWIPEEFGADSLTYYELVNDETNSELFGQLAQLTGITGVPAIAITYNGTIQAIFEGEFNVSATPEIVATAMNANGVILFIGGEWYLLARDNPRSETLIDALQTIFVEHESVDVQSVLTKLKSNSTG

SEQ ID NO: 923 - protein, 421 aa, Thermococcus kodakaraensis KOD1
  misc_feature (414542)..(414542): n is a or c or g or t.
  misc_feature (786890)..(786890): n is a or c or g or t.
  misc_feature (786907)..(786907): n is a or c or g or t.
  misc_feature (786944)..(786946): n is a or c or g or t.
  misc_feature (839139)..(839139): n is a or c or g or t.
  misc_feature (1128488)..(1128488): n is a or c or g or t.
  misc_feature (1128499)..(1128499): n is a or c or g or t.
  misc_feature (1128505)..(1128506): n is a or c or g or t.
  misc_feature (1128517)..(1128518): n is a or c or g or t.
  misc_feature (1128539)..(1128540): n is a or c or g or t.
  misc_feature (1561400)..(1561400): n is a or c or g or t.
  misc_feature (1561477)..(1561477): n is a or c or g or t.
  misc_feature (1561545)..(1561545): n is a or c or g or t.
  misc_feature (1767941)..(1767941): n is a or c or g or t.
VDMIEVSLPHVTFEDVGDSIRLVWRETLYADFDKKELIRVIKRKYRVKPELIIKDGRLFIDTDYPGIEKYIAIYIQNNLGALLRNRYTKRKVLYIHEGLDVPLLGYNAFGLIDRGTNLIQVRGVSGCNLSCVFCSVDEGPYSRTRKLDYVVDIDYLMKWFDEVARIKGKGLEAHLDGQGEPLIYPFRVELVQALREHPNVSVISMQSNGTLLNDKLVEELAEAGLDRVNLSIHSLDPDKAKMLMGRKDYDLQHVLDMAEALVNAGIDVLIAPVIIFGVNDNEAEAFIEFARKIGAGKRWPALGFQNYVPYKFGRNPVIAKVKPFKEFYAWLRALEEKTGMKPLVLKPEHFGMEKREFIPLAFRPGEVVKAEVVLPGRIEGEMIAKARNRLIEVINTRAEVGDRIRVRIVRTRHGIYIGTPV

SEQ ID NO: 924 - protein, 184 aa, Thermococcus kodakaraensis KOD1
  misc_feature (414542)..(414542): n is a or c or g or t.
  misc_feature (786890)..(786890): n is a or c or g or t.
  misc_feature (786907)..(786907): n is a or c or g or t.
  misc_feature (786944)..(786946): n is a or c or g or t.
  misc_feature (839139)..(839139): n is a or c or g or t.
  misc_feature (1128488)..(1128488): n is a or c or g or t.
  misc_feature (1128499)..(1128499): n is a or c or g or t.
  misc_feature (1128505)..(1128506): n is a or c or g or t.
  misc_feature (1128517)..(1128518): n is a or c or g or t.
  misc_feature (1128539)..(1128540): n is a or c or g or t.
  misc_feature (1561400)..(1561400): n is a or c or g or t.
  misc_feature (1561477)..(1561477): n is a or c or g or t.
  misc_feature (1561545)..(1561545): n is a or c or g or t.
  misc_feature (1767941)..(1767941): n is a or c or g or t.
MKRAIISIVMLILLIMVYTNVMSALGSISNVLNGITDPLQDPDKLVNGINVGKNNMPQLNPAGNQIEYLAENTPLPGSGVYTVDQMNESLLREVLDPTDWYVGNTSLSSDYAYRVYNDTLKVVKNSTETSKSIIEKFLGVFKIGTDNNETQNGLGQLLEDALEKVQNITESTEDYINSVFGDKQ

SEQ ID NO: 925 - protein, 379 aa, Thermococcus kodakaraensis KOD1
  misc_feature (414542)..(414542): n is a or c or g or t.
  misc_feature (786890)..(786890): n is a or c or g or t.
  misc_feature (786907)..(786907): n is a or c or g or t.
  misc_feature (786944)..(786946): n is a or c or g or t.
  misc_feature (839139)..(839139): n is a or c or g or t.
  misc_feature (1128488)..(1128488): n is a or c or g or t.
  misc_feature (1128499)..(1128499): n is a or c or g or t.
  misc_feature (1128505)..(1128506): n is a or c or g or t.
  misc_feature (1128517)..(1128518): n is a or c or g or t.
  misc_feature (1128539)..(1128540): n is a or c or g or t.
  misc_feature (1561400)..(1561400): n is a or c or g or t.
  misc_feature (1561477)..(1561477): n is a or c or g or t.
  misc_feature (1561545)..(1561545): n is a or c or g or t.
  misc_feature (1767941)..(1767941): n is a or c or g or t.
MDRCVQLLDGGRMKVWVDITNAPHAHFFKGLIRELEKSGYEIIITTREFDGLTGILDMLGFDYYVVGKHGGATLEGKLLASSERVYKLSKLIIEEKPDLAIYKHSAEAPRVAFGLQVPSIGFIDNETAIGQNKLIAPFTKLLLYPRAIDAYELIKCGADPNGMRPVNGFSELAHLYGFKPERKVLKELGVKRNGYIVMRTEPIKANYFNGDIKSILEDVIPLLPDIPIVLFPRTEEQRKRFERFDNVIMPEKPVDSLSLLYYARLMIGAGGTMNREAIALGTPTISTYPGKLLAVTKWLVELGVKFHSTDPLEVATVAERMIEMNGSYRNYIRSVVSGLENPMEVILKEIETYETEGTFLVSSEAGNVGSYVSLDKRSD

SEQ ID NO: 926 - protein, 292 aa, Thermococcus kodakaraensis KOD1
  misc_feature (414542)..(414542): n is a or c or g or t.
  misc_feature (786890)..(786890): n is a or c or g or t.
  misc_feature (786907)..(786907): n is a or c or g or t.
  misc_feature (786944)..(786946): n is a or c or g or t.
  misc_feature (839139)..(839139): n is a or c or g or t.
  misc_feature (1128488)..(1128488): n is a or c or g or t.
  misc_feature (1128499)..(1128499): n is a or c or g or t.
  misc_feature (1128505)..(1128506): n is a or c or g or t.
  misc_feature (1128517)..(1128518): n is a or c or g or t.
  misc_feature (1128539)..(1128540): n is a or c or g or t.
  misc_feature (1561400)..(1561400): n is a or c or g or t.
  misc_feature (1561477)..(1561477): n is a or c or g or t.
  misc_feature (1561545)..(1561545): n is a or c or g or t.
  misc_feature (1767941)..(1767941): n is a or c or g or t.
MRGVIVPIVTPFKEDYSIDVPALEEHLDYLQKVGVHGIFINATTGEFTSLSKEERRFLAEKGRELVTSAFYLVGTASSNTLEVIELTKHAQDIGADYAVIAPPYYCPLTEEALFRHYSMIAEKTDIPIILYNIPACANSLSVPLVKRLTIEYPSIAGIKATLDSVNYIRDIILDVKGERKDFRVFTGLDQHFLNTLILGGDGGIMACANFAPELHLRLYKAFNEKRFEEAFEYSRKLAKLSKVYDIASSFGSAIKLAMRVRGFSIKPVLRPPYTMDGKEVEEKVRALLLEVL

SEQ ID NO: 927 - protein, 74 aa, Thermococcus kodakaraensis KOD1
  misc_feature (414542)..(414542): n is a or c or g or t.
  misc_feature (786890)..(786890): n is a or c or g or t.
  misc_feature (786907)..(786907): n is a or c or g or t.
  misc_feature (786944)..(786946): n is a or c or g or t.
  misc_feature (839139)..(839139): n is a or c or g or t.
  misc_feature (1128488)..(1128488): n is a or c or g or t.
  misc_feature (1128499)..(1128499): n is a or c or g or t.
  misc_feature (1128505)..(1128506): n is a or c or g or t.
  misc_feature (1128517)..(1128518): n is a or c or g or t.
  misc_feature (1128539)..(1128540): n is a or c or g or t.
  misc_feature (1561400)..(1561400): n is a or c or g or t.
  misc_feature (1561477)..(1561477): n is a or c or g or t.
  misc_feature (1561545)..(1561545): n is a or c or g or t.
  misc_feature (1767941)..(1767941): n is a or c or g or t.
MERTTDARIEYILSELERLKVHIQRLESMLVPLVKDEVPEEELREIEMEARKFKEESEEWIDAEDLDEILEDEE

SEQ ID NO: 928 - protein, 183 aa, Thermococcus kodakaraensis KOD1
  misc_feature (414542)..(414542): n is a or c or g or t.
  misc_feature (786890)..(786890): n is a or c or g or t.
  misc_feature (786907)..(786907): n is a or c or g or t.
  misc_feature (786944)..(786946): n is a or c or g or t.
  misc_feature (839139)..(839139): n is a or c or g or t.
  misc_feature (1128488)..(1128488): n is a or c or g or t.
  misc_feature (1128499)..(1128499): n is a or c or g or t.
  misc_feature (1128505)..(1128506): n is a or c or g or t.
  misc_feature (1128517)..(1128518): n is a or c or g or t.
  misc_feature (1128539)..(1128540): n is a or c or g or t.
  misc_feature (1561400)..(1561400): n is a or c or g or t.
  misc_feature (1561477)..(1561477): n is a or c or g or t.
  misc_feature (1561545)..(1561545): n is a or c or g or t.
  misc_feature (1767941)..(1767941): n is a or c or g or t.
MRLLNFQHESASIEDCTSTVVELSNKALQSTHGFISSAKISLSFGAFMNLGVTVLIDDEKDMLKGIIAEHSTGKNRADALNKALEILNSKLPKNAEVVDFEVGTYVTPVTRRAYGVAVAVYNAPTEQKPFEEFTMEERRRLIARVLKEFNYNPKVLNISELARMFGVSRDSIYYDIQQILKEK

SEQ ID NO: 929 - protein, 635 aa, Thermococcus kodakaraensis KOD1
  misc_feature (414542)..(414542): n is a or c or g or t.
  misc_feature (786890)..(786890): n is a or c or g or t.
  misc_feature (786907)..(786907): n is a or c or g or t.
  misc_feature (786944)..(786946): n is a or c or g or t.
  misc_feature (839139)..(839139): n is a or c or g or t.
  misc_feature (1128488)..(1128488): n is a or c or g or t.
  misc_feature (1128499)..(1128499): n is a or c or g or t.
  misc_feature (1128505)..(1128506): n is a or c or g or t.
  misc_feature (1128517)..(1128518): n is a or c or g or t.
  misc_feature (1128539)..(1128540): n is a or c or g or t.
  misc_feature (1561400)..(1561400): n is a or c or g or t.
  misc_feature (1561477)..(1561477): n is a or c or g or t.
  misc_feature (1561545)..(1561545): n is a or c or g or t.
  misc_feature (1767941)..(1767941): n is a or c or g or t.
MDEESTKERLIPREYGESLDLGIDFKTTEEIPVPEKLIDQVIGQEHAVEVIKTAANQRRHVLLIGEPGTGKSMLGQAMAELLPTENLEDILVFPNPEDENMPKIKTVPACQGRRIVENYRRKAKEQEGIKNYLLMFVIFTVILAIIMEPTATTLLMGMFVVLLSMMVLSNMRFRNTVLVPKLLVDNCGRKKAPFVDATGAHAGALLGDVRHDPFQSGGLGTPAHERVEPGMIHRAHKGVLFIDEIATLSLKMQQSLLTAMQEKKFPITGQSEMSSGAMVRTEPVPCDFILVAAGNLDTIDKMHPALRSRIRGYGYEVYMRTTMPDTIENRRKLVQFVAQEVKRDGKIPHFTREAVEEIVREAQKRAGRKGHLTLRLRDLGGIVRAAGDIAIKKGKKYVEREDVLEAMRMAKPLEKQLADWYIENKKEYQVIKTEGGEIGRVNGLAVIGEQSGIVLPIEAVVAPAASKEEGKIIVTGKLGEIAKEAVQNVSAIIKRYKGEDISRYDIHVQFLQTYEGVEGDSASISVATAVISALENIPIRQDVAMTGSLSVRGEVLPIGGATPKIEAAIEAGIKKVIIPKANEKDVFLSPDKAEKIEIYPVETIDQVLEIALQDGPEKDELLRRIREALPLYGSS

SEQ ID NO: 930 - protein, 252 aa, Thermococcus kodakaraensis KOD1
  misc_feature (414542)..(414542): n is a or c or g or t.
  misc_feature (786890)..(786890): n is a or c or g or t.
  misc_feature (786907)..(786907): n is a or c or g or t.
  misc_feature (786944)..(786946): n is a or c or g or t.
  misc_feature (839139)..(839139): n is a or c or g or t.
  misc_feature (1128488)..(1128488): n is a or c or g or t.
  misc_feature (1128499)..(1128499): n is a or c or g or t.
  misc_feature (1128505)..(1128506): n is a or c or g or t.
  misc_feature (1128517)..(1128518): n is a or c or g or t.
  misc_feature (1128539)..(1128540): n is a or c or g or t.
  misc_feature (1561400)..(1561400): n is a or c or g or t.
  misc_feature (1561477)..(1561477): n is a or c or g or t.
  misc_feature (1561545)..(1561545): n is a or c or g or t.
  misc_feature (1767941)..(1767941): n is a or c or g or t.
VVYVHELYTVLAEYYDTIYKSRAERVKEEIDFVEEIFREDAKREVKRVLDLACGTGIPTLELAERGYEVLGLDLHEEMLRVARRKAEARGLNVKFIRGNALDISFEEEFDAVTMFFSSIMYFDDSAIRELFNSVRRTLRPGGVFIADFPCWFYGGNDGPIVWDERRGDERLVITDWREVEPAVQKLRFKRLVQIIMPNGETKAFFVDDELNIYTPREMRLLAEQYFSEVKIYGNLRRDIAPSDRRYWLVAVK

SEQ ID NO: 931 - protein, 891 aa, Thermococcus kodakaraensis KOD1
  misc_feature (414542)..(414542): n is a or c or g or t.
  misc_feature (786890)..(786890): n is a or c or g or t.
  misc_feature (786907)..(786907): n is a or c or g or t.
  misc_feature (786944)..(786946): n is a or c or g or t.
  misc_feature (839139)..(839139): n is a or c or g or t.
  misc_feature (1128488)..(1128488): n is a or c or g or t.
  misc_feature (1128499)..(1128499): n is a or c or g or t.
  misc_feature (1128505)..(1128506): n is a or c or g or t.
  misc_feature (1128517)..(1128518): n is a or c or g or t.
  misc_feature (1128539)..(1128540): n is a or c or g or t.
  misc_feature (1561400)..(1561400): n is a or c or g or t.
  misc_feature (1561477)..(1561477): n is a or c or g or t.
  misc_feature (1561545)..(1561545): n is a or c or g or t.
  misc_feature (1767941)..(1767941): n is a or c or g or t.
VMPMLPKNYDPNEIEPKWQKFWLDEKIYKYELDEKKPSYAIDTPPPFTSGTLHLGHVLSHTWIDIIARYKRMTGYNVLFPQGFDNHGLPTELKVEKEFGISKDQPEKFLQKCIEWTWQAIEAMRNQFIRIGYSADWDLEYHTMDDWYKAAVQKSLIEFYKKGMLYQAEHPVYWCPRCRTSLAKAEVGYVEEDGFLYYIKLPLADGSGHVPIATTRPELMPACVAVFVHPEDERYKHVVGKKVKLPIFEREVPVLADEDVDPSFGTGAVYNCTYGDEQDVVWQKRYNLPVIIAINEDGTMNENAGPYAGLKTEEARKKIAEDLEKMGLLYKKEKIRHRVLRHTERSSCMAPIELLPKKQWFIKVKDFTDEIVKVAEQINWYPPDMFLRLKDWAESMDWDWVISRQRVFGTPIPFWVCDNGEIILPNEEDLPVDPRFEKPPRKCSDGSEPKPVTDVLDCWVDSSITPLIITKWHEAIKGDEEGKKWFEHNFPTALRPQGTDIIRTWAFYTIFRTWVLTGEKPWHDILINGMVAGPDGRKMSKSYGNVVAPDEVIPKYGADALRLWTALAPPGEDHPFKWETVDYNYRFLQKVWNIYRFAERHLENFDPASAPEELEPLDRWILSRLHRLIKFATEEMEKYRFNLLTRELITFVWHEVADDYIEMIKYRLYGDDEESKLKAKAALYELLYNVMLLLAPFVPHITEELYQNLFRERIGAKSVHLLEWPKYSEARIDEEAEKLGELAREIVGAMRRYKNSHGLSLNAKLKHVAIYTTDSYEVLKTIEKDIAGTMNIEKLEIIKGEPELEERIIEIKPNFKTVGPRYGKLVPKITAYLKENAEEVAKALKESGKIEFEVDGQKVELTKDDIVLRKAVFSEGEEVETAVVGDAVILFF

SEQ ID NO: 932 - protein, 112 aa, Thermococcus kodakaraensis KOD1
  misc_feature (414542)..(414542): n is a or c or g or t.
  misc_feature (786890)..(786890): n is a or c or g or t.
  misc_feature (786907)..(786907): n is a or c or g or t.
  misc_feature (786944)..(786946): n is a or c or g or t.
  misc_feature (839139)..(839139): n is a or c or g or t.
  misc_feature (1128488)..(1128488): n is a or c or g or t.
  misc_feature (1128499)..(1128499): n is a or c or g or t.
  misc_feature (1128505)..(1128506): n is a or c or g or t.
  misc_feature (1128517)..(1128518): n is a or c or g or t.
  misc_feature (1128539)..(1128540): n is a or c or g or t.
  misc_feature (1561400)..(1561400): n is a or c or g or t.
  misc_feature (1561477)..(1561477): n is a or c or g or t.
  misc_feature (1561545)..(1561545): n is a or c or g or t.
  misc_feature (1767941)..(1767941): n is a or c or g or t.
MAEDIEEIRKRKLMELQKKYLEQQKAQEEALKREMELEAQLEAIMRKILTPEARERLGRVKLVKPELARQVELLLVQLYQAGQIRERIDDAKLKRILAEIDARTRRDFKIKW

SEQ ID NO: 933 - protein, 118 aa, Thermococcus kodakaraensis KOD1
  misc_feature (414542)..(414542): n is a or c or g or t.
  misc_feature (786890)..(786890): n is a or c or g or t.
  misc_feature (786907)..(786907): n is a or c or g or t.
  misc_feature (786944)..(786946): n is a or c or g or t.
  misc_feature (839139)..(839139): n is a or c or g or t.
  misc_feature (1128488)..(1128488): n is a or c or g or t.
  misc_feature (1128499)..(1128499): n is a or c or g or t.
  misc_feature (1128505)..(1128506): n is a or c or g or t.
  misc_feature (1128517)..(1128518): n is a or c or g or t.
  misc_feature (1128539)..(1128540): n is a or c or g or t.
  misc_feature (1561400)..(1561400): n is a or c or g or t.
  misc_feature (1561477)..(1561477): n is a or c or g or t.
  misc_feature (1561545)..(1561545): n is a or c or g or t.
  misc_feature (1767941)..(1767941): n is a or c or g or t.
MMAFKNGRTLFIGGAVLKEFPRSRELAECTLKAPNPSPGMKLAILIVGFLPATLLFLVPRGVLAIAAYGIVVLMTFLLLGKVAVSRTNKRLPEECREVLKEYSDFIRKKKGKLDIVID

SEQ ID NO: 934 - protein, 317 aa, Thermococcus kodakaraensis KOD1
  misc_feature (414542)..(414542): n is a or c or g or t.
  misc_feature (786890)..(786890): n is a or c or g or t.
  misc_feature (786907)..(786907): n is a or c or g or t.
  misc_feature (786944)..(786946): n is a or c or g or t.
  misc_feature (839139)..(839139): n is a or c or g or t.
  misc_feature (1128488)..(1128488): n is a or c or g or t.
  misc_feature (1128499)..(1128499): n is a or c or g or t.
  misc_feature (1128505)..(1128506): n is a or c or g or t.
  misc_feature (1128517)..(1128518): n is a or c or g or t.
  misc_feature (1128539)..(1128540): n is a or c or g or t.
  misc_feature (1561400)..(1561400): n is a or c or g or t.
  misc_feature (1561477)..(1561477): n is a or c or g or t.
  misc_feature (1561545)..(1561545): n is a or c or g or t.
  misc_feature (1767941)..(1767941): n is a or c or g or t.
MAGFAAFVIFVLGLFLLLLLLLGVKIIRPYEKGLVERLGKFNRILDPGVHFIIPFMEHVKKVDMREHVIDVPPQEVICKDNVVVTVDAVVYYQIIDPIKAVYNVSNFLMAIVKLAQTNLRAIIGEMELDETLSGRDIINARLREELDKITDRWGVKITRVEIQRIDPPKDIQEAMAKQMTAEREKRAMILLAEGKKESAIREAEGQKQAAILKAEGEKQRQILIAEGQAEAIRKVLEALRMADEKYLTLQYIEKLPDLAKYGNLIVPYDTEALIGLLRILQKVKDMPLPQPPKNEKEEPQGSGENSEELEKPKDMTE

SEQ ID NO: 935 - protein, 139 aa, Thermococcus kodakaraensis KOD1
  misc_feature (414542)..(414542): n is a or c or g or t.
  misc_feature (786890)..(786890): n is a or c or g or t.
  misc_feature (786907)..(786907): n is a or c or g or t.
  misc_feature (786944)..(786946): n is a or c or g or t.
  misc_feature (839139)..(839139): n is a or c or g or t.
  misc_feature (1128488)..(1128488): n is a or c or g or t.
  misc_feature (1128499)..(1128499): n is a or c or g or t.
  misc_feature (1128505)..(1128506): n is a or c or g or t.
  misc_feature (1128517)..(1128518): n is a or c or g or t.
  misc_feature (1128539)..(1128540): n is a or c or g or t.
  misc_feature (1561400)..(1561400): n is a or c or g or t.
  misc_feature (1561477)..(1561477): n is a or c or g or t.
  misc_feature (1561545)..(1561545): n is a or c or g or t.
  misc_feature (1767941)..(1767941): n is a or c or g or t.
MDPFPIFLLILGLLIILLDMMVTAFITPIGVTFAVLGILLGFGWNFTESFVVALIFGVLAYILVGRYIRKDVVDIGEKEKKYTFELVGKRGRVVKVAEDHYLVELEGDNWIALSDDKLEVGDTVEVVKVDGVKLIVKKV

SEQ ID NO: 936 - protein, 90 aa, Thermococcus kodakaraensis KOD1
  misc_feature (414542)..(414542): n is a or c or g or t.
  misc_feature (786890)..(786890): n is a or c or g or t.
  misc_feature (786907)..(786907): n is a or c or g or t.
  misc_feature (786944)..(786946): n is a or c or g or t.
  misc_feature (839139)..(839139): n is a or c or g or t.
  misc_feature (1128488)..(1128488): n is a or c or g or t.
  misc_feature (1128499)..(1128499): n is a or c or g or t.
  misc_feature (1128505)..(1128506): n is a or c or g or t.
  misc_feature (1128517)..(1128518): n is a or c or g or t.
  misc_feature (1128539)..(1128540): n is a or c or g or t.
  misc_feature (1561400)..(1561400): n is a or c or g or t.
  misc_feature (1561477)..(1561477): n is a or c or g or t.
  misc_feature (1561545)..(1561545): n is a or c or g or t.
  misc_feature (1767941)..(1767941): n is a or c or g or t.
MPIKPGEEVIFVVPINKIKKRVPRWKRAPRAARFVREWIARHAKADEVIIGTDVNEKIWERGAEKPPGKLRVKVVVEESEGKRIARVSLA

SEQ ID NO: 937 - protein, 229 aa, Thermococcus kodakaraensis KOD1
  misc_feature (414542)..(414542): n is a or c or g or t.
  misc_feature (786890)..(786890): n is a or c or g or t.
  misc_feature (786907)..(786907): n is a or c or g or t.
  misc_feature (786944)..(786946): n is a or c or g or t.
  misc_feature (839139)..(839139): n is a or c or g or t.
  misc_feature (1128488)..(1128488): n is a or c or g or t.
  misc_feature (1128499)..(1128499): n is a or c or g or t.
  misc_feature (1128505)..(1128506): n is a or c or g or t.
  misc_feature (1128517)..(1128518): n is a or c or g or t.
  misc_feature (1128539)..(1128540): n is a or c or g or t.
  misc_feature (1561400)..(1561400): n is a or c or g or t.
  misc_feature (1561477)..(1561477): n is a or c or g or t.
  misc_feature (1561545)..(1561545): n is a or c or g or t.
  misc_feature (1767941)..(1767941): n is a or c or g or t.
MHIERLDFENSPYLGVYGRATDRVLLLREGLGEKKLEVLREVLKVPIIETSIMKSRIVGIFAAGNSNAIIVPWYIWDAELERIKTALNEFGIDMDVVPFKSRLTALGNLILTNDKAALVSKEFTREEANAIGEILGVDEVERGMIASYRSVGSVGVVTNKGGLVHPEATDEELEWLSDLFGVDIYVGTANMGVPFVGSCMLANSYGVVVGHLTTGPEIVKIEEALGFLG

SEQ ID NO: 938 - protein, 111 aa, Thermococcus kodakaraensis KOD1
  misc_feature (414542)..(414542): n is a or c or g or t.
  misc_feature (786890)..(786890): n is a or c or g or t.
  misc_feature (786907)..(786907): n is a or c or g or t.
  misc_feature (786944)..(786946): n is a or c or g or t.
  misc_feature (839139)..(839139): n is a or c or g or t.
  misc_feature (1128488)..(1128488): n is a or c or g or t.
  misc_feature (1128499)..(1128499): n is a or c or g or t.
  misc_feature (1128505)..(1128506): n is a or c or g or t.
  misc_feature (1128517)..(1128518): n is a or c or g or t.
  misc_feature (1128539)..(1128540): n is a or c or g or t.
  misc_feature (1561400)..(1561400): n is a or c or g or t.
  misc_feature (1561477)..(1561477): n is a or c or g or t.
  misc_feature (1561545)..(1561545): n is a or c or g or t.
  misc_feature (1767941)..(1767941): n is a or c or g or t.
VKGMKFVVWPSEIDSRLPRKYGRLVKKEVALEAPTPEEIRDAAEILGMKVIEFEPEKLNPRLSGIDEELRTKGMLRIESPYPKGKSLRMICEKIRELRAKKRKAHGKRKKR

SEQ ID NO: 939 - protein, 22 aa, Thermococcus kodakaraensis KOD1
  misc_feature (414542)..(414542): n is a or c or g or t.
  misc_feature (786890)..(786890): n is a or c or g or t.
  misc_feature (786907)..(786907): n is a or c or g or t.
  misc_feature (786944)..(786946): n is a or c or g or t.
  misc_feature (839139)..(839139): n is a or c or g or t.
  misc_feature (1128488)..(1128488): n is a or c or g or t.
  misc_feature (1128499)..(1128499): n is a or c or g or t.
  misc_feature (1128505)..(1128506): n is a or c or g or t.
  misc_feature (1128517)..(1128518): n is a or c or g or t.
  misc_feature (1128539)..(1128540): n is a or c or g or t.
  misc_feature (1561400)..(1561400): n is a or c or g or t.
  misc_feature (1561477)..(1561477): n is a or c or g or t.
  misc_feature (1561545)..(1561545): n is a or c or g or t.
  misc_feature (1767941)..(1767941): n is a or c or g or t.
MLPSMKPKRKNTQSIPYHLRKG

SEQ ID NO: 940 - protein, 25 aa, Thermococcus kodakaraensis KOD1
  misc_feature (414542)..(414542): n is a or c or g or t.
  misc_feature (786890)..(786890): n is a or c or g or t.
  misc_feature (786907)..(786907): n is a or c or g or t.
  misc_feature (786944)..(786946): n is a or c or g or t.
  misc_feature (839139)..(839139): n is a or c or g or t.
  misc_feature (1128488)..(1128488): n is a or c or g or t.
  misc_feature (1128499)..(1128499): n is a or c or g or t.
  misc_feature (1128505)..(1128506): n is a or c or g or t.
  misc_feature (1128517)..(1128518): n is a or c or g or t.
  misc_feature (1128539)..(1128540): n is a or c or g or t.
  misc_feature (1561400)..(1561400): n is a or c or g or t.
  misc_feature (1561477)..(1561477): n is a or c or g or t.
  misc_feature (1561545)..(1561545): n is a or c or g or t.
  misc_feature (1767941)..(1767941): n is a or c or g or t.
MAMESEDLWLEEHVWDLRMYHALKG

SEQ ID NO: 941 - protein, 143 aa, Thermococcus kodakaraensis KOD1
  misc_feature (414542)..(414542): n is a or c or g or t.
  misc_feature (786890)..(786890): n is a or c or g or t.
  misc_feature (786907)..(786907): n is a or c or g or t.
  misc_feature (786944)..(786946): n is a or c or g or t.
  misc_feature (839139)..(839139): n is a or c or g or t.
  misc_feature (1128488)..(1128488): n is a or c or g or t.
  misc_feature (1128499)..(1128499): n is a or c or g or t.
  misc_feature (1128505)..(1128506): n is a or c or g or t.
  misc_feature (1128517)..(1128518): n is a or c or g or t.
  misc_feature (1128539)..(1128540): n is a or c or g or t.
  misc_feature (1561400)..(1561400): n is a or c or g or t.
  misc_feature (1561477)..(1561477): n is a or c or g or t.
  misc_feature (1561545)..(1561545): n is a or c or g or t.
  misc_feature (1767941)..(1767941): n is a or c or g or t.
MSLHFRVENDTLYVGISAETHGWVAIGFGGGPGMRNTDIVIAYVLPNGTGEISDSYSTGFSGPHNPDTFLGGHTDILSYGGREDENGTVVEFSRPLNTGDGYDYVIPTEESFRIIWAYGPTDDFQSMHIKAGHIYVTLEEDGK

SEQ ID NO: 942 - protein, 73 aa, Thermococcus kodakaraensis KOD1
  misc_feature (414542)..(414542): n is a or c or g or t.
  misc_feature (786890)..(786890): n is a or c or g or t.
  misc_feature (786907)..(786907): n is a or c or g or t.
  misc_feature (786944)..(786946): n is a or c or g or t.
  misc_feature (839139)..(839139): n is a or c or g or t.
  misc_feature (1128488)..(1128488): n is a or c or g or t.
  misc_feature (1128499)..(1128499): n is a or c or g or t.
  misc_feature (1128505)..(1128506): n is a or c or g or t.
  misc_feature (1128517)..(1128518): n is a or c or g or t.
  misc_feature (1128539)..(1128540): n is a or c or g or t.
  misc_feature (1561400)..(1561400): n is a or c or g or t.
  misc_feature (1561477)..(1561477): n is a or c or g or t.
  misc_feature (1561545)..(1561545): n is a or c or g or t.
  misc_feature (1767941)..(1767941): n is a or c or g or t.
VKGKEVLDEALFEARPYVEYWDRLKELVEKLWEEATDEKNFIELLNEEMERAKEPFKTDLKIFLQKFTALISG

SEQ ID NO: 943 - protein, 301 aa, Thermococcus kodakaraensis KOD1
  misc_feature (414542)..(414542): n is a or c or g or t.
  misc_feature (786890)..(786890): n is a or c or g or t.
  misc_feature (786907)..(786907): n is a or c or g or t.
  misc_feature (786944)..(786946): n is a or c or g or t.
  misc_feature (839139)..(839139): n is a or c or g or t.
  misc_feature (1128488)..(1128488): n is a or c or g or t.
  misc_feature (1128499)..(1128499): n is a or c or g or t.
  misc_feature (1128505)..(1128506): n is a or c or g or t.
  misc_feature (1128517)..(1128518): n is a or c or g or t.
  misc_feature (1128539)..(1128540): n is a or c or g or t.
  misc_feature (1561400)..(1561400): n is a or c or g or t.
  misc_feature (1561477)..(1561477): n is a or c or g or t.
  misc_feature (1561545)..(1561545): n is a or c or g or t.
  misc_feature (1767941)..(1767941): n is a or c or g or t.
MFKYQTNCNNSVFQKVFKLIFKVYYETTYGGNNMRKILTTFLLAIIVVMSGCIGENAGLTKEKVLTAIQNIETARYNESFSMSMNIFDPNTNKTVNVTMSGSIAGVFNKSAGIEAGNMNLTTRMMGMDINMNWPYFTNGSDVYFNIDGKWYFVPSNNDLHNRARASLNVDYIEKLLREKNVTFKKLGDVYAFRVNVTFWEFVNATNQTTYLNEAWGPLSDNITVNTNAGWVEVHFRDDGTPTFIETYIDLTIIIPDEFLQEPVTIHETIHDSTVFSDINKPTNITIPEGIESAGDFEEVFG

SEQ ID NO: 944 - protein, 38 aa, Thermococcus kodakaraensis KOD1
  misc_feature (414542)..(414542): n is a or c or g or t.
  misc_feature (786890)..(786890): n is a or c or g or t.
  misc_feature (786907)..(786907): n is a or c or g or t.
  misc_feature (786944)..(786946): n is a or c or g or t.
  misc_feature (839139)..(839139): n is a or c or g or t.
  misc_feature (1128488)..(1128488): n is a or c or g or t.
  misc_feature (1128499)..(1128499): n is a or c or g or t.
  misc_feature (1128505)..(1128506): n is a or c or g or t.
  misc_feature (1128517)..(1128518): n is a or c or g or t.
  misc_feature (1128539)..(1128540): n is a or c or g or t.
  misc_feature (1561400)..(1561400): n is a or c or g or t.
  misc_feature (1561477)..(1561477): n is a or c or g or t.
  misc_feature (1561545)..(1561545): n is a or c or g or t.
  misc_feature (1767941)..(1767941): n is a or c or g or t.
MRRFIELWYYPPNDIKDRLSRDASLKILERIVEKISRL

SEQ ID NO: 945 - protein, 292 aa, Thermococcus kodakaraensis KOD1
  misc_feature (414542)..(414542): n is a or c or g or t.
  misc_feature (786890)..(786890): n is a or c or g or t.
  misc_feature (786907)..(786907): n is a or c or g or t.
  misc_feature (786944)..(786946): n is a or c or g or t.
  misc_feature (839139)..(839139): n is a or c or g or t.
  misc_feature (1128488)..(1128488): n is a or c or g or t.
  misc_feature (1128499)..(1128499): n is a or c or g or t.
  misc_feature (1128505)..(1128506): n is a or c or g or t.
  misc_feature (1128517)..(1128518): n is a or c or g or t.
  misc_feature (1128539)..(1128540): n is a or c or g or t.
  misc_feature (1561400)..(1561400): n is a or c or g or t.
  misc_feature (1561477)..(1561477): n is a or c or g or t.
  misc_feature (1561545)..(1561545): n is a or c or g or t.
  misc_feature (1767941)..(1767941): n is a or c or g or t.
MGLLLSIFVLAVIVFLAFVAFVGYKMVKPPRLVEDWTPKDLGFDYEDVEFTTEDGVKLSGWWVDNGSNKTVIPLHGYTASRWYSLYMKPTVEFLLKEGYNVLVFDFRAHGKSGGNYTTVGDKELLDVKAAVEWLKKTHPERAGKIGLIGFSMGAMVTIRSLAEIEDVCCGVADSPPMYLDKTGARGLKYFANLPEWLYVFVKPFTKLFSGGKEIHPIEYADRVKKPLLIIAGEKDPLVKVEEVREFYERNRKINPDIELWVTDAPHVRTLKFHPEEWKARVREFFNRAFNNP

SEQ ID NO: 946 - protein, 230 aa, Thermococcus kodakaraensis KOD1
  misc_feature (414542)..(414542): n is a or c or g or t.
  misc_feature (786890)..(786890): n is a or c or g or t.
  misc_feature (786907)..(786907): n is a or c or g or t.
  misc_feature (786944)..(786946): n is a or c or g or t.
  misc_feature (839139)..(839139): n is a or c or g or t.
  misc_feature (1128488)..(1128488): n is a or c or g or t.
  misc_feature (1128499)..(1128499): n is a or c or g or t.
  misc_feature (1128505)..(1128506): n is a or c or g or t.
  misc_feature (1128517)..(1128518): n is a or c or g or t.
  misc_feature (1128539)..(1128540): n is a or c or g or t.
  misc_feature (1561400)..(1561400): n is a or c or g or t.
  misc_feature (1561477)..(1561477): n is a or c or g or t.
  misc_feature (1561545)..(1561545): n is a or c or g or t.
  misc_feature (1767941)..(1767941): n is a or c or g or t.
VSESHANTSSTFPSSCRLVILVHDVSPVYLKELKEITEIIDEYGMANNTYFFVIPNHAGKHPIDKDPDFVNFLKESQAKGYHIELHGYMHEYREFDCDAGTARKKLELGLEELRALNFSPSYFVPPNYAISEDALKVVLSHNLSVITKDTLYTPQGTSYKIMNREYTWYLSNSSAKFSLTLKRAKHDYTRCRGTFYLSIHPKAVNYGAGLKFLREFLSFAVERNSPNHER

SEQ ID NO: 947 - protein, 29 aa, Thermococcus kodakaraensis KOD1
  misc_feature (414542)..(414542): n is a or c or g or t.
  misc_feature (786890)..(786890): n is a or c or g or t.
  misc_feature (786907)..(786907): n is a or c or g or t.
  misc_feature (786944)..(786946): n is a or c or g or t.
  misc_feature (839139)..(839139): n is a or c or g or t.
  misc_feature (1128488)..(1128488): n is a or c or g or t.
  misc_feature (1128499)..(1128499): n is a or c or g or t.
  misc_feature (1128505)..(1128506): n is a or c or g or t.
  misc_feature (1128517)..(1128518): n is a or c or g or t.
  misc_feature (1128539)..(1128540): n is a or c or g or t.
  misc_feature (1561400)..(1561400): n is a or c or g or t.
  misc_feature (1561477)..(1561477): n is a or c or g or t.
  misc_feature (1561545)..(1561545): n is a or c or g or t.
  misc_feature (1767941)..(1767941): n is a or c or g or t.
MSATNNLIMTSIQERETKPYQRAYPGEVV

SEQ ID NO: 948 - protein, 201 aa, Thermococcus kodakaraensis KOD1
  misc_feature (414542)..(414542): n is a or c or g or t.
  misc_feature (786890)..(786890): n is a or c or g or t.
  misc_feature (786907)..(786907): n is a or c or g or t.
  misc_feature (786944)..(786946): n is a or c or g or t.
  misc_feature (839139)..(839139): n is a or c or g or t.
  misc_feature (1128488)..(1128488): n is a or c or g or t.
  misc_feature (1128499)..(1128499): n is a or c or g or t.
  misc_feature (1128505)..(1128506): n is a or c or g or t.
  misc_feature (1128517)..(1128518): n is a or c or g or t.
  misc_feature (1128539)..(1128540): n is a or c or g or t.
  misc_feature (1561400)..(1561400): n is a or c or g or t.
  misc_feature (1561477)..(1561477): n is a or c or g or t.
  misc_feature (1561545)..(1561545): n is a or c or g or t.
  misc_feature (1767941)..(1767941): n is a or c or g or t.
VVGMKFVLDTSIFVNPEVRKNFGDNPTEAMKTFLSYAEKLFGKVEFYMPPGIYREVMHFVDSEELRPAIELYIIKKPPNVHELKIPAFVVYELIEDIRRRIDKGLRVAEKAVRESVLDTDNVDNIIQKLRRNYRRALREGIVDSKEDFELILLAMELDATIVSADVGILTWAQKMGIKWVDSSVFREVLEGLVEKLEGKNL

SEQ ID NO: 949 - protein, 519 aa, Thermococcus kodakaraensis KOD1
  misc_feature (414542)..(414542): n is a or c or g or t.
  misc_feature (786890)..(786890): n is a or c or g or t.
  misc_feature (786907)..(786907): n is a or c or g or t.
  misc_feature (786944)..(786946): n is a or c or g or t.
  misc_feature (839139)..(839139): n is a or c or g or t.
  misc_feature (1128488)..(1128488): n is a or c or g or t.
  misc_feature (1128499)..(1128499): n is a or c or g or t.
  misc_feature (1128505)..(1128506): n is a or c or g or t.
  misc_feature (1128517)..(1128518): n is a or c or g or t.
  misc_feature (1128539)..(1128540): n is a or c or g or t.
  misc_feature (1561400)..(1561400): n is a or c or g or t.
  misc_feature (1561477)..(1561477): n is a or c or g or t.
  misc_feature (1561545)..(1561545): n is a or c or g or t.
  misc_feature (1767941)..(1767941): n is a or c or g or t.
MEAQRDQWATKLGLILAMAGNAVGLGNFVRFPTQVAQNGGGAFMVPYFIALFFLGIPVMWVEWVAGRYGGKYGHGTLGPTYYLMARESLKPRSAFWFGVISGMLAFSLTVLLNSYYLHLIGWSAAYTYFSAAGSYFGQPTGEFFSNYLSNHGQVMLFWGITVILLAIAVGQGVSKGIERWVKVMMPLLYVFAILMIIYIFTLGSPVDPNWSTIDGFRFIWTPNWSYLGDHLWQVMLAATGQIFFTLSLGMSIIQNYASYLGPKDDVALSGIATVSLNEFAEVVLGGSIAIPLATAYAPKIVPPDVLQQGKTAALEWIGQKFGLGFSYTSLPNVFVSMGDIGRLFGALWFLLLWFAGFTSAIAMYNYLVAMLEEDMHIKRSVGTWVIFLVYLIAGLPVIYIDGYMDQVDAWVSFQLTLLAFFDIIIAVYLFKPDNFWRELHEGAWIKVPEFYKWVTLYIAPLLLLIPMIGYFKPLVQTTLEWPARLAIILMWILGAIESYYAIKKKYKEELDKNEVIIKV

SEQ ID NO: 950 - protein, 244 aa, Thermococcus kodakaraensis KOD1
  misc_feature (414542)..(414542): n is a or c or g or t.
  misc_feature (786890)..(786890): n is a or c or g or t.
  misc_feature (786907)..(786907): n is a or c or g or t.
  misc_feature (786944)..(786946): n is a or c or g or t.
  misc_feature (839139)..(839139): n is a or c or g or t.
  misc_feature (1128488)..(1128488): n is a or c or g or t.
  misc_feature (1128499)..(1128499): n is a or c or g or t.
  misc_feature (1128505)..(1128506): n is a or c or g or t.
  misc_feature (1128517)..(1128518): n is a or c or g or t.
  misc_feature (1128539)..(1128540): n is a or c or g or t.
  misc_feature (1561400)..(1561400): n is a or c or g or t.
  misc_feature (1561477)..(1561477): n is a or c or g or t.
  misc_feature (1561545)..(1561545): n is a or c or g or t.
  misc_feature (1767941)..(1767941): n is a or c or g or t.
VKSRDILLETAEVLESTLDKIDRLKVLSEKEKEAVKTKLKNAAANFKKLAEEAEKDNEELAEFFLKKAKELKLASVDKKIEEMGKKEYLKLVNRIELYSRSAEYDFKPEKLAELKRVYRKYIFGMTSFFILTGIYLNQFLAVTALILAIPIILSMLSLQRRGYLGLLLAYSAIPIPLIVGAMAASYGIRALNDPAKIAEIAGHLNKSTTFAQGYLVVLTLLAAVELYLLISAAVELYRHRHAFL

SEQ ID NO: 951 - protein, 87 aa, Thermococcus kodakaraensis KOD1
  misc_feature (414542)..(414542): n is a or c or g or t.
  misc_feature (786890)..(786890): n is a or c or g or t.
  misc_feature (786907)..(786907): n is a or c or g or t.
  misc_feature (786944)..(786946): n is a or c or g or t.
  misc_feature (839139)..(839139): n is a or c or g or t.
  misc_feature (1128488)..(1128488): n is a or c or g or t.
  misc_feature (1128499)..(1128499): n is a or c or g or t.
  misc_feature (1128505)..(1128506): n is a or c or g or t.
  misc_feature (1128517)..(1128518): n is a or c or g or t.
  misc_feature (1128539)..(1128540): n is a or c or g or t.
  misc_feature (1561400)..(1561400): n is a or c or g or t.
  misc_feature (1561477)..(1561477): n is a or c or g or t.
  misc_feature (1561545)..(1561545): n is a or c or g or t.
  misc_feature (1767941)..(1767941): n is a or c or g or t.
VSPMESLKKEAGSGILMGIVGVLLLGAIIKTLAMPVSAALKLGGVIFDIGVAGLAWVFLDEAIESSESDIYRAILAIAAAILVAFAW

SEQ ID NO: 952 - protein, 650 aa, Thermococcus kodakaraensis KOD1
  misc_feature (414542)..(414542): n is a or c or g or t.
  misc_feature (786890)..(786890): n is a or c or g or t.
  misc_feature (786907)..(786907): n is a or c or g or t.
  misc_feature (786944)..(786946): n is a or c or g or t.
  misc_feature (839139)..(839139): n is a or c or g or t.
  misc_feature (1128488)..(1128488): n is a or c or g or t.
  misc_feature (1128499)..(1128499): n is a or c or g or t.
  misc_feature (1128505)..(1128506): n is a or c or g or t.
  misc_feature (1128517)..(1128518): n is a or c or g or t.
  misc_feature (1128539)..(1128540): n is a or c or g or t.
  misc_feature (1561400)..(1561400): n is a or c or g or t.
  misc_feature (1561477)..(1561477): n is a or c or g or t.
  misc_feature (1561545)..(1561545): n is a or c or g or t.
  misc_feature (1767941)..(1767941): n is a or c or g or t.
MKEEMSSVDIRYIVRELQWLVGSRVDKVYHDGDEVRFKLRTKEGRADLILEAGKRFHLTSYIKEAPKQPSSFTMLLRKHLGGGFIDAIEQHQFDRIVKIRIGNYTLIGELFRRGNIILVDSENKIVAALRYEEYKDRAIKPKAEYKFPPARENPLEVSFERFLDLMREEPELELVRALARKLNMGGMYAEEISLRAGFEKTTPVKELSDEDLKRVYDEMIRTFNDEPKPNIVFKDGVMHDVVPIELKIYEGFEKRYFPTFSEALDEYFGKITLEKAKIEQTKKLEEKKRGLMATLRKQEEMLKGFEKAMRENQEIGDLIYANYTLIERLLEEFRKATETLGWDEFRRRIDEGKKTGNKVALMVKGIDPKEKAVTIELDGKKVKLYLEKSLGENAEIYYEKAKKFRHKYEGALKAYEDTKRKLEEIEKLIEEEQKKELNVKKLERRKRKWFEKFRWFVSSEGFLVLAGKDASTNEVLVKKHMEDNDLYCHADVYGAPHVVIKDGQKAGEKTIFEACQFAVSMSRAWSQGLYSADAYWAYPNQVTKQAPSGEYLGKGAFMVYGKRNWMHGLPLKLAVGVINYDGEEYVVCAPVEAIKAHTDKYIVIRPGSMKKGELVKKLRGILKKWGYEVREEDLNAILPPGGGEIVEVVG

SEQ ID NO: 953 - protein, 148 aa, Thermococcus kodakaraensis KOD1
  misc_feature (414542)..(414542): n is a or c or g or t.
  misc_feature (786890)..(786890): n is a or c or g or t.
  misc_feature (786907)..(786907): n is a or c or g or t.
  misc_feature (786944)..(786946): n is a or c or g or t.
  misc_feature (839139)..(839139): n is a or c or g or t.
  misc_feature (1128488)..(1128488): n is a or c or g or t.
  misc_feature (1128499)..(1128499): n is a or c or g or t.
  misc_feature (1128505)..(1128506): n is a or c or g or t.
  misc_feature (1128517)..(1128518): n is a or c or g or t.
  misc_feature (1128539)..(1128540): n is a or c or g or t.
  misc_feature (1561400)..(1561400): n is a or c or g or t.
  misc_feature (1561477)..(1561477): n is a or c or g or t.
  misc_feature (1561545)..(1561545): n is a or c or g or t.
  misc_feature (1767941)..(1767941): n is a or c or g or t.
MGVEELYQIAKGEFAEDLIFELDGNPITVSIKGLLLARVKSSTYNFSFFEVTETESVLAVQMKDFVVYIAFETDEELSDEEFAEIGKALLEYLTPKIALLTTKAEKFYGGKADILLDDGMSSDLREFMYSLLLKHRKGESPYEQTEVA

SEQ ID NO: 954 - protein, 401 aa, Thermococcus kodakaraensis KOD1
  misc_feature (414542)..(414542): n is a or c or g or t.
  misc_feature (786890)..(786890): n is a or c or g or t.
  misc_feature (786907)..(786907): n is a or c or g or t.
  misc_feature (786944)..(786946): n is a or c or g or t.
  misc_feature (839139)..(839139): n is a or c or g or t.
  misc_feature (1128488)..(1128488): n is a or c or g or t.
  misc_feature (1128499)..(1128499): n is a or c or g or t.
  misc_feature (1128505)..(1128506): n is a or c or g or t.
  misc_feature (1128517)..(1128518): n is a or c or g or t.
  misc_feature (1128539)..(1128540): n is a or c or g or t.
  misc_feature (1561400)..(1561400): n is a or c or g or t.
  misc_feature (1561477)..(1561477): n is a or c or g or t.
  misc_feature (1561545)..(1561545): n is a or c or g or t.
  misc_feature (1767941)..(1767941): n is a or c or g or t.
MKAVLPDSKIPKRWYNILPDLPEPLAPPLDPETDEPMEPEKLLRIFAEELVKQEMSTDRYIEIPKEVREIYSKIGRPTPLFRATNLERALGTPARIYFKYEGATVTGSHKINTALAQAYYAKRQGIERLVTETGAGQWGTALSLAGALLGLNVRVYMARASYQQKPYRKTIMRLYGAEIYPSPSDRTEIGRKFLAEDPNHPGGLGIAISEAIEDVLRDEKARYALGSVLNHVLMHQTVIGLEAQEQMKEFEEPDVIIGCVGGGSNFAGLAYPFVRDVLKGEAEYEFIAVEPKAAPSMTRGVYKYDYGDSGGYTPKMKMHTLGHTYYVPPIHAGGLRYHGLAPTLSVLINHGIVKPVAYHQNEVFQAAHLFAKTEGIVPAPESAHAIKGAIDRALEAKAGRT

SEQ ID NO: 955 - protein, 359 aa, Thermococcus kodakaraensis KOD1
  misc_feature (414542)..(414542): n is a or c or g or t.
  misc_feature (786890)..(786890): n is a or c or g or t.
  misc_feature (786907)..(786907): n is a or c or g or t.
  misc_feature (786944)..(786946): n is a or c or g or t.
  misc_feature (839139)..(839139): n is a or c or g or t.
  misc_feature (1128488)..(1128488): n is a or c or g or t.
  misc_feature (1128499)..(1128499): n is a or c or g or t.
  misc_feature (1128505)..(1128506): n is a or c or g or t.
  misc_feature (1128517)..(1128518): n is a or c or g or t.
  misc_feature (1128539)..(1128540): n is a or c or g or t.
  misc_feature (1561400)..(1561400): n is a or c or g or t.
  misc_feature (1561477)..(1561477): n is a or c or g or t.
  misc_feature (1561545)..(1561545): n is a or c or g or t.
  misc_feature (1767941)..(1767941): n is a or c or g or t.
VVSMRIEKLAALMEEKGFSGALVSPGANFYYLTGLHIHEAGERLTVLAVNPDGEYHILAPSLYQNVIKDFPVTFWRDGENPYSKLGTIMKELGIGGKVLVENTMRADWLIGIFHSDNRFDPYPLNVLMRELRMRKDKEELKLMQKAAEVADRVFEEILSWDIVGMTEKELALKIELRIRELSDGISFQPIVASGENGANPHHEPGNRKIRKGDMVILDYGARWKGYCSDITRTVAIGKPDEKLLEIYRIVKEAQEDAFQSVREGIKAKEVDRAARETISKAGYGEYFTHRTGHGLGLDVHEEPYIGPDGEVVLKNGMTFTIEPGIYLPGLGGVRIEDDVAVINGRGKRLTRADRELVIL

SEQ ID NO: 956 - protein, 455 aa, Thermococcus kodakaraensis KOD1
  misc_feature (414542)..(414542): n is a or c or g or t.
  misc_feature (786890)..(786890): n is a or c or g or t.
  misc_feature (786907)..(786907): n is a or c or g or t.
  misc_feature (786944)..(786946): n is a or c or g or t.
  misc_feature (839139)..(839139): n is a or c or g or t.
  misc_feature (1128488)..(1128488): n is a or c or g or t.
  misc_feature (1128499)..(1128499): n is a or c or g or t.
  misc_feature (1128505)..(1128506): n is a or c or g or t.
  misc_feature (1128517)..(1128518): n is a or c or g or t.
  misc_feature (1128539)..(1128540): n is a or c or g or t.
  misc_feature (1561400)..(1561400): n is a or c or g or t.
  misc_feature (1561477)..(1561477): n is a or c or g or t.
  misc_feature (1561545)..(1561545): n is a or c or g or t.
  misc_feature (1767941)..(1767941): n is a or c or g or t.
MILKFIDREEELRALEELYAQDKAHLVLIYGRRRVGKTELVKQFINGKKAFYFLAKKEPMELELDRLVRAFNRKFNVFIEAENLEEFFERVKEFGKIAFVIDEFPYWVEEDKGIPSTFQYIWDEVLKDSKVFLVLLGSSISTMESLMSYKNPLYGRRTGQIKLRPLEFFHLKEAFPRYSWEELVKVYGTIDGIPAYFQYFDDSLSVEKNIENNFYNRVSVLYEDAERLLKDELREPTTYLNILKAINDGKAKLTEIANETRVAVTNLPKYLKVLETLDLVKKEYPINQRKRGRGVYRVKDFYHRFWLRFVYPYRDDIEIGAISFEDFQSDFNRYLGEVFESVAGQFLIRMNRLGKLPFRFTKLGRWWHKGEEIDLVALNSITGEAGFFEAKWKNLSEREARGILKDLERKAELTGIPGNYFGLIGKRIEGKESLREKGYLVFDLEDFNEVGEEGR

SEQ ID NO: 957 - protein, 73 aa, Thermococcus kodakaraensis KOD1
  misc_feature (414542)..(414542): n is a or c or g or t.
  misc_feature (786890)..(786890): n is a or c or g or t.
  misc_feature (786907)..(786907): n is a or c or g or t.
  misc_feature (786944)..(786946): n is a or c or g or t.
  misc_feature (839139)..(839139): n is a or c or g or t.
  misc_feature (1128488)..(1128488): n is a or c or g or t.
  misc_feature (1128499)..(1128499): n is a or c or g or t.
  misc_feature (1128505)..(1128506): n is a or c or g or t.
  misc_feature (1128517)..(1128518): n is a or c or g or t.
  misc_feature (1128539)..(1128540): n is a or c or g or t.
  misc_feature (1561400)..(1561400): n is a or c or g or t.
  misc_feature (1561477)..(1561477): n is a or c or g or t.
  misc_feature (1561545)..(1561545): n is a or c or g or t.
  misc_feature (1767941)..(1767941): n is a or c or g or t.
VPSSHTGASDGIFESTRSIKKSPAIPAVLKMYRSAQKGERVSHETKKAAMEIKIGATITYLAFLTVKGVLKLM

SEQ ID NO: 958 - protein, 356 aa, Thermococcus kodakaraensis KOD1
  misc_feature (414542)..(414542): n is a or c or g or t.
  misc_feature (786890)..(786890): n is a or c or g or t.
  misc_feature (786907)..(786907): n is a or c or g or t.
  misc_feature (786944)..(786946): n is a or c or g or t.
  misc_feature (839139)..(839139): n is a or c or g or t.
  misc_feature (1128488)..(1128488): n is a or c or g or t.
  misc_feature (1128499)..(1128499): n is a or c or g or t.
  misc_feature (1128505)..(1128506): n is a or c or g or t.
  misc_feature (1128517)..(1128518): n is a or c or g or t.
  misc_feature (1128539)..(1128540): n is a or c or g or t.
  misc_feature (1561400)..(1561400): n is a or c or g or t.
  misc_feature (1561477)..(1561477): n is a or c or g or t.
  misc_feature (1561545)..(1561545): n is a or c or g or t.
  misc_feature (1767941)..(1767941): n is a or c or g or t.
MDERLFIIKTLLRDGRREEALKEARKIKDSYWRSYALRWVAESYAHEPEKALEVASEIEEHSIKDETLASLSYLFSREGEFKKALEAARLIKDQFVRKKAFRSVSNLLAIAVARGGTEIRLSDLKLDERDIEELKPLPHGIVYKDGKLMPGATLHRIKGEVQTGVVERFEKRPKWRPPEPEFEEKGQTNEYVLSYINRLLNEGKLEEAEKLAKGLPEPVRSAYLERVGIEYLNRGNAEKAEEIFSQLEVANTLGHALIHHYGYEVDRALEYIKKVFDPLPRMLIAYELAKKHGAKEKAILEVLSWRGTPSKIARVLKFLAFEMLEESKKSKDDEMRKTSKELFELGRKIETGEHAL

SEQ ID NO: 959 - protein, 79 aa, Thermococcus kodakaraensis KOD1
  misc_feature (414542)..(414542): n is a or c or g or t.
  misc_feature (786890)..(786890): n is a or c or g or t.
  misc_feature (786907)..(786907): n is a or c or g or t.
  misc_feature (786944)..(786946): n is a or c or g or t.
  misc_feature (839139)..(839139): n is a or c or g or t.
  misc_feature (1128488)..(1128488): n is a or c or g or t.
  misc_feature (1128499)..(1128499): n is a or c or g or t.
  misc_feature (1128505)..(1128506): n is a or c or g or t.
  misc_feature (1128517)..(1128518): n is a or c or g or t.
  misc_feature (1128539)..(1128540): n is a or c or g or t.
  misc_feature (1561400)..(1561400): n is a or c or g or t.
  misc_feature (1561477)..(1561477): n is a or c or g or t.
  misc_feature (1561545)..(1561545): n is a or c or g or t.
  misc_feature (1767941)..(1767941): n is a or c or g or t.
MIEAIVLIVVKPGNEEKVYQEIIKDPRVKEAYRVYGEYDIIIRIEVPSIEELDRFHDEVLRKIKDIELTETLIASSYRR

SEQ ID NO: 960 - protein, 256 aa, Thermococcus kodakaraensis KOD1
  misc_feature (414542)..(414542): n is a or c or g or t.
  misc_feature (786890)..(786890): n is a or c or g or t.
  misc_feature (786907)..(786907): n is a or c or g or t.
  misc_feature (786944)..(786946): n is a or c or g or t.
  misc_feature (839139)..(839139): n is a or c or g or t.
  misc_feature (1128488)..(1128488): n is a or c or g or t.
  misc_feature (1128499)..(1128499): n is a or c or g or t.
  misc_feature (1128505)..(1128506): n is a or c or g or t.
  misc_feature (1128517)..(1128518): n is a or c or g or t.
  misc_feature (1128539)..(1128540): n is a or c or g or t.
  misc_feature (1561400)..(1561400): n is a or c or g or t.
  misc_feature (1561477)..(1561477): n is a or c or g or t.
  misc_feature (1561545)..(1561545): n is a or c or g or t.
  misc_feature (1767941)..(1767941): n is a or c or g or t.
VVAMVYVAVLANINGNLPALAKALEKIEALKEEGYEIEKYYVLGNIVGLFPYPKEVLDALDDLIRNNTVKVIRGEFDQVIAESDPHAEGPDYIDKVEYPDYIKKALKYTWEALGHEGREFIRDLPIYLVDKIGKNDIFGVYGSPLNPFGGVVLPDQPTSYYEAIMRPVKDYEILFVASPKYPVNAMTRYGRVICPGSIGYPPGKNHKATFALVDVDTLHTKFIEVDYDDEKKLIEEKIKKEGLPEELIKILYHGKV

SEQ ID NO: 961 - protein, 302 aa, Thermococcus kodakaraensis KOD1
  misc_feature (414542)..(414542): n is a or c or g or t.
  misc_feature (786890)..(786890): n is a or c or g or t.
  misc_feature (786907)..(786907): n is a or c or g or t.
  misc_feature (786944)..(786946): n is a or c or g or t.
  misc_feature (839139)..(839139): n is a or c or g or t.
  misc_feature (1128488)..(1128488): n is a or c or g or t.
  misc_feature (1128499)..(1128499): n is a or c or g or t.
  misc_feature (1128505)..(1128506): n is a or c or g or t.
  misc_feature (1128517)..(1128518): n is a or c or g or t.
  misc_feature (1128539)..(1128540): n is a or c or g or t.
  misc_feature (1561400)..(1561400): n is a or c or g or t.
  misc_feature (1561477)..(1561477): n is a or c or g or t.
  misc_feature (1561545)..(1561545): n is a or c or g or t.
  misc_feature (1767941)..(1767941): n is a or c or g or t.
VMLMNAVQMVSRRIEPVVRVQTEAIRYLTSELTSRGFRWLLPVMLSSITDPLWPDPAASKMRAPEIEAYGSKLKLMHSMILHKQFAVAMGLEKIFVLSPNIRLEERESDDGRHAYEFTQLDFEISHASMDDVMRLVEELIVGLFRELRGPVWETFERELPRVKRPFKRFTLEEVIEEFGSEEKASREMGEPFWITDIPREFYDREVDGVWRNYDLYLPEGYGEVSSGGEREWEYEKIQRKIREAGLSEEAFRPYLEVAKAGMLKPSAGAGIGIERLVRYIVGAKHIAEVQPFPRVPGIPAVI

SEQ ID NO: 962 - protein, 426 aa, Thermococcus kodakaraensis KOD1
  misc_feature (414542)..(414542): n is a or c or g or t.
  misc_feature (786890)..(786890): n is a or c or g or t.
  misc_feature (786907)..(786907): n is a or c or g or t.
  misc_feature (786944)..(786946): n is a or c or g or t.
  misc_feature (839139)..(839139): n is a or c or g or t.
  misc_feature (1128488)..(1128488): n is a or c or g or t.
  misc_feature (1128499)..(1128499): n is a or c or g or t.
  misc_feature (1128505)..(1128506): n is a or c or g or t.
  misc_feature (1128517)..(1128518): n is a or c or g or t.
  misc_feature (1128539)..(1128540): n is a or c or g or t.
  misc_feature (1561400)..(1561400): n is a or c or g or t.
  misc_feature (1561477)..(1561477): n is a or c or g or t.
  misc_feature (1561545)..(1561545): n is a or c or g or t.
  misc_feature (1767941)..(1767941): n is a or c or g or t.
MKPALKFQSALYLYILITIGLTLIVPPAYALEAVLIFLFLIVFSGTIFYSLLIAASRRDYPFKVEAHKGNPFFEPLVYVLIPAHNEEKVIEITARTVLNQDYHNFKLFLINDNSTDSTKEIMERIASENPKRVVVIDVPPERGRSKPRALNYTLELIEQSRDHPDYVFILDADYLLPSNALRTLVGIMENAPEYVLGVQGNVRPRNWDRNFVTKFITLERLVGFNVAIEGDMKLNENGKYGGTVALLRFSHLLRLGMFREDSVTEDTDLWARAMISGYRFWYYHGVIGWEEAVETLKDYIKQRSRWAQGHFQVMLDYYWNVLRSCSGITEGFIEHFYLISYLVPVFWFLSVVLNGYIILSGNVPLMLAKPGLFLAVSITAFLVFWASVAYSNWVEMKRHNYHVPWSFVAAYPCTSWFSSLRGLCTP

SEQ ID NO: 963 - protein, 203 aa, Thermococcus kodakaraensis KOD1
  misc_feature (414542)..(414542): n is a or c or g or t.
  misc_feature (786890)..(786890): n is a or c or g or t.
  misc_feature (786907)..(786907): n is a or c or g or t.
  misc_feature (786944)..(786946): n is a or c or g or t.
  misc_feature (839139)..(839139): n is a or c or g or t.
  misc_feature (1128488)..(1128488): n is a or c or g or t.
  misc_feature (1128499)..(1128499): n is a or c or g or t.
  misc_feature (1128505)..(1128506): n is a or c or g or t.
  misc_feature (1128517)..(1128518): n is a or c or g or t.
  misc_feature (1128539)..(1128540): n is a or c or g or t.
  misc_feature (1561400)..(1561400): n is a or c or g or t.
  misc_feature (1561477)..(1561477): n is a or c or g or t.
  misc_feature (1561545)..(1561545): n is a or c or g or t.
  misc_feature (1767941)..(1767941): n is a or c or g or t.
MSELGTILSSALLMLIMIDPSDKILLVTFLREDFHIEDIKALIIRANLIGFILLASFAVAGQIILQEIFHIDINALKVAGGFVLFKIGLEALEGGGMFTLKREKDILALAAVPVAMPLIAGPAAITAVITMTAEYGYFVSLTATAIAILIVAISMFIALYMMKSVNKSFLSITIRIIGLFIMAIGAQMMVEGVIGIYLLMTGA

SEQ ID NO: 964 - protein, 439 aa, Thermococcus kodakaraensis KOD1
  misc_feature (414542)..(414542): n is a or c or g or t.
  misc_feature (786890)..(786890): n is a or c or g or t.
  misc_feature (786907)..(786907): n is a or c or g or t.
  misc_feature (786944)..(786946): n is a or c or g or t.
  misc_feature (839139)..(839139): n is a or c or g or t.
  misc_feature (1128488)..(1128488): n is a or c or g or t.
  misc_feature (1128499)..(1128499): n is a or c or g or t.
  misc_feature (1128505)..(1128506): n is a or c or g or t.
  misc_feature (1128517)..(1128518): n is a or c or g or t.
  misc_feature (1128539)..(1128540): n is a or c or g or t.
  misc_feature (1561400)..(1561400): n is a or c or g or t.
  misc_feature (1561477)..(1561477): n is a or c or g or t.
  misc_feature (1561545)..(1561545): n is a or c or g or t.
  misc_feature (1767941)..(1767941): n is a or c or g or t.
VLKMARLDKVKGTRDLLPEEMAKRRWVFERIREVFEGFNFQEVLTPTFEYTELFKLRSGEEVVKQLYAFQDKGGRDISLRPDMTSSVARLYVNRFQNAPKPIKWYYIANMFRYEEPQSGRYREFWQAGVELIGSDRVEADAEVIALFTQSYLAVGLEDFTVNIGDRILLDEFAKMLGVEDDIGLMRLIDKKDKMSREEFVGALREFGLNDDGVEKVLSLIEIKGLPDEVLPKAEELFTSEEAKAEIKRLYELVDLLDAYGVSKWVRIDLGIARGFDYYTSVVFEAIAPNDLGIGSIGGGGRYDNLIEVFGGKPTPATGFAIGIERLIPILEWKGLLPEIKLRPDVYVIPIGDDREVKKTAIEITQGLREATVRADIELTGRKLRKALDYAGKLGVPYVVLVGKKDLEAGKVTLRDMKSGEQKSIEKERAVEEILNILGV

SEQ ID NO: 965 - protein, 121 aa, Thermococcus kodakaraensis KOD1
  misc_feature (414542)..(414542): n is a or c or g or t.
  misc_feature (786890)..(786890): n is a or c or g or t.
  misc_feature (786907)..(786907): n is a or c or g or t.
  misc_feature (786944)..(786946): n is a or c or g or t.
  misc_feature (839139)..(839139): n is a or c or g or t.
  misc_feature (1128488)..(1128488): n is a or c or g or t.
  misc_feature (1128499)..(1128499): n is a or c or g or t.
  misc_feature (1128505)..(1128506): n is a or c or g or t.
  misc_feature (1128517)..(1128518): n is a or c or g or t.
  misc_feature (1128539)..(1128540): n is a or c or g or t.
  misc_feature (1561400)..(1561400): n is a or c or g or t.
  misc_feature (1561477)..(1561477): n is a or c or g or t.
  misc_feature (1561545)..(1561545): n is a or c or g or t.
  misc_feature (1767941)..(1767941): n is a or c or g or t.
VPKIKVKTLTRQIVELSEKLGLQAVPEYRTPDGTRIDVAILNGDEKILAIELEASFKWFPQRLLYDVVKAQRAGFPELWVVTSMPQKPGWIEGYAEEIGIKLKLIKEKEVLQLFSSLRYLM

SEQ ID NO: 966 - protein, 169 aa, Thermococcus kodakaraensis KOD1
  misc_feature (414542)..(414542): n is a or c or g or t.
  misc_feature (786890)..(786890): n is a or c or g or t.
  misc_feature (786907)..(786907): n is a or c or g or t.
  misc_feature (786944)..(786946): n is a or c or g or t.
  misc_feature (839139)..(839139): n is a or c or g or t.
  misc_feature (1128488)..(1128488): n is a or c or g or t.
  misc_feature (1128499)..(1128499): n is a or c or g or t.
  misc_feature (1128505)..(1128506): n is a or c or g or t.
  misc_feature (1128517)..(1128518): n is a or c or g or t.
  misc_feature (1128539)..(1128540): n is a or c or g or t.
  misc_feature (1561400)..(1561400): n is a or c or g or t.
  misc_feature (1561477)..(1561477): n is a or c or g or t.
  misc_feature (1561545)..(1561545): n is a or c or g or t.
  misc_feature (1767941)..(1767941): n is a or c or g or t.
MTQEELRYRRASSWEYDLILREAEKYGELRHHFFAVVEGKFRDVYAVNERVWREIESLDLKPYAYGTFVGTIKVDKNLVEKFYPNIEFFYFVDVQKNYAVLSPKAGFLFTTGKDVPKRGVRKYDWQGTKKLVIYDENGIILGIGRINPGSRNKFILNVTDIGEFLRRKR

SEQ ID NO: 967 - protein, 90 aa, Thermococcus kodakaraensis KOD1
  misc_feature (414542)..(414542): n is a or c or g or t.
  misc_feature (786890)..(786890): n is a or c or g or t.
  misc_feature (786907)..(786907): n is a or c or g or t.
  misc_feature (786944)..(786946): n is a or c or g or t.
  misc_feature (839139)..(839139): n is a or c or g or t.
  misc_feature (1128488)..(1128488): n is a or c or g or t.
  misc_feature (1128499)..(1128499): n is a or c or g or t.
  misc_feature (1128505)..(1128506): n is a or c or g or t.
  misc_feature (1128517)..(1128518): n is a or c or g or t.
  misc_feature (1128539)..(1128540): n is a or c or g or t.
  misc_feature (1561400)..(1561400): n is a or c or g or t.
  misc_feature (1561477)..(1561477): n is a or c or g or t.
  misc_feature (1561545)..(1561545): n is a or c or g or t.
  misc_feature (1767941)..(1767941): n is a or c or g or t.
MYDHDTDTPQWGQDEWVWAGVSGWLIICNGRITVDTPTVKHVAYWSSVTVDRSRVQEYTGAKISFTRIPYERHNGETGGALALIPHFYKR

SEQ ID NO: 968 - protein, 186 aa, Thermococcus kodakaraensis KOD1
  misc_feature (414542)..(414542): n is a or c or g or t.
  misc_feature (786890)..(786890): n is a or c or g or t.
  misc_feature (786907)..(786907): n is a or c or g or t.
  misc_feature (786944)..(786946): n is a or c or g or t.
  misc_feature (839139)..(839139): n is a or c or g or t.
  misc_feature (1128488)..(1128488): n is a or c or g or t.
  misc_feature (1128499)..(1128499): n is a or c or g or t.
  misc_feature (1128505)..(1128506): n is a or c or g or t.
  misc_feature (1128517)..(1128518): n is a or c or g or t.
  misc_feature (1128539)..(1128540): n is a or c or g or t.
  misc_feature (1561400)..(1561400): n is a or c or g or t.
  misc_feature (1561477)..(1561477): n is a or c or g or t.
  misc_feature (1561545)..(1561545): n is a or c or g or t.
  misc_feature (1767941)..(1767941): n is a or c or g or t.
MGPNGGGKSTFLNLCAGTYRPTAGTIRVFGGDPWANEKVRVKLGVSFDPPALPKHRTGREWLEFLAGIRGSPLSDIVEAFSLMGFLNRRISTYSAGMAKRLSIASAFVGTPELILLDEPLANLDFDAIPEIASLLRRFASEGISMVIVSHVWKPFVGFADRAVVMAGGRVKFHGEIEEVVSALNLV

SEQ ID NO: 969 - protein, 185 aa, Thermococcus kodakaraensis KOD1
  misc_feature (414542)..(414542): n is a or c or g or t.
  misc_feature (786890)..(786890): n is a or c or g or t.
  misc_feature (786907)..(786907): n is a or c or g or t.
  misc_feature (786944)..(786946): n is a or c or g or t.
  misc_feature (839139)..(839139): n is a or c or g or t.
  misc_feature (1128488)..(1128488): n is a or c or g or t.
  misc_feature (1128499)..(1128499): n is a or c or g or t.
  misc_feature (1128505)..(1128506): n is a or c or g or t.
  misc_feature (1128517)..(1128518): n is a or c or g or t.
  misc_feature (1128539)..(1128540): n is a or c or g or t.
  misc_feature (1561400)..(1561400): n is a or c or g or t.
  misc_feature (1561477)..(1561477): n is a or c or g or t.
  misc_feature (1561545)..(1561545): n is a or c or g or t.
  misc_feature (1767941)..(1767941): n is a or c or g or t.
VMEMVEVPLNPIGREEIHRLESILLFATLFRPEVIELIKDPAERLTWVDSLAVAAGAIAREKAGMTVSEIAEELGRTEQTIRKHLKGETKAGQLVRETYELIKQGKLDELVKNVEVLAKGGQLVAMEEYEKLKKEKEELEAKVRELEERVKTLEEENHQLKAKLENVRKVLNDALERVKEIEKLL

SEQ ID NO: 970 - protein, 506 aa, Thermococcus kodakaraensis KOD1
  misc_feature (414542)..(414542): n is a or c or g or t.
  misc_feature (786890)..(786890): n is a or c or g or t.
  misc_feature (786907)..(786907): n is a or c or g or t.
  misc_feature (786944)..(786946): n is a or c or g or t.
  misc_feature (839139)..(839139): n is a or c or g or t.
  misc_feature (1128488)..(1128488): n is a or c or g or t.
  misc_feature (1128499)..(1128499): n is a or c or g or t.
  misc_feature (1128505)..(1128506): n is a or c or g or t.
  misc_feature (1128517)..(1128518): n is a or c or g or t.
  misc_feature (1128539)..(1128540): n is a or c or g or t.
  misc_feature (1561400)..(1561400): n is a or c or g or t.
  misc_feature (1561477)..(1561477): n is a or c or g or t.
  misc_feature (1561545)..(1561545): n is a or c or g or t.
  misc_feature (1767941)..(1767941): n is a or c or g or t.
MNRKLKKILLNWKVLLLIIFLIGSIGSLYTRGLTFGIDISGGVALIAQTEEPVDSKTMELVVDSLQKRLNTFGLRDISVEGQGNSIVVVKVANVSSTEEANQLKQVIESQGVFFMEFNGVVFGTGKDITYVGPYEIKSDNSWAVPFRISKSAAEKFAELAKGKAGWPVDMFLDPPINSLLVVPQDVFMTMNGTAFNAGAPDAPPLAARIEKALNITTIMYTNQSATELKEMANGRAIVLAGVPRELYDGLKDMNVSVKYIPSEPSADTTSFVKEILGLYGPYSLGEGLANGVPQTDVQITGRASNRVEAEREAKTVYTVLKSGSLPVKLKVISMEFISPKLGQDFKKQALYAGLAALVAVLLIVYFHYRNWKIAIPVASTSLFEVIIILGIAALIKWNLDLPSIAGIIAAIGTGVDQQVVITDELLGGERSTRITRRAGALKRIGRAFFIIFASAATTIAAMSFLLVYFVGTLKGFAVTTIIGVLIGIFVTRPAYAEVAKYLIGEE

SEQ ID NO: 971 - protein, 367 aa, Thermococcus kodakaraensis KOD1
  misc_feature (414542)..(414542): n is a or c or g or t.
  misc_feature (786890)..(786890): n is a or c or g or t.
  misc_feature (786907)..(786907): n is a or c or g or t.
  misc_feature (786944)..(786946): n is a or c or g or t.
  misc_feature (839139)..(839139): n is a or c or g or t.
  misc_feature (1128488)..(1128488): n is a or c or g or t.
  misc_feature (1128499)..(1128499): n is a or c or g or t.
  misc_feature (1128505)..(1128506): n is a or c or g or t.
  misc_feature (1128517)..(1128518): n is a or c or g or t.
  misc_feature (1128539)..(1128540): n is a or c or g or t.
  misc_feature (1561400)..(1561400): n is a or c or g or t.
  misc_feature (1561477)..(1561477): n is a or c or g or t.
  misc_feature (1561545)..(1561545): n is a or c or g or t.
  misc_feature (1767941)..(1767941): n is a or c or g or t.
VRMMNVIEGILNTTLGVVFTWVGWKTYKILWKYTPYSYPNARVRAMEAKLLTEQRFNELAESRTLQNFVASLEDTDYKETLSNVSSYSVEEIERALDASLAKTYELMFKILPKRSRDFFRLMMEEWDVRNIANVVKAKLANEPASDYIIELGPMLPKVKAMAEAKTLEEILVILEGTPYEGPYQELIAGNIDVSTFETELYRMYYKKLLNYARSRKDDEKTLLTEFIKLKIDKLNLMTTLRGKLAGLSAKEIRSMLIPGGSLDVEPLLHIDSIEMTLAQLDSTEYGEFIRKVREEAEKDISVIERAFDEHLIKKVTEFDRFHPLSIAAPLAYVLKKEREVRKLRAMVKLIGDGLEPEVIKEFVGEVA

SEQ ID NO: 972 - protein, 466 aa, Thermococcus kodakaraensis KOD1
  misc_feature (414542)..(414542): n is a or c or g or t.
  misc_feature (786890)..(786890): n is a or c or g or t.
  misc_feature (786907)..(786907): n is a or c or g or t.
  misc_feature (786944)..(786946): n is a or c or g or t.
  misc_feature (839139)..(839139): n is a or c or g or t.
  misc_feature (1128488)..(1128488): n is a or c or g or t.
  misc_feature (1128499)..(1128499): n is a or c or g or t.
  misc_feature (1128505)..(1128506): n is a or c or g or t.
  misc_feature (1128517)..(1128518): n is a or c or g or t.
  misc_feature (1128539)..(1128540): n is a or c or g or t.
  misc_feature (1561400)..(1561400): n is a or c or g or t.
  misc_feature (1561477)..(1561477): n is a or c or g or t.
  misc_feature (1561545)..(1561545): n is a or c or g or t.
  misc_feature (1767941)..(1767941): n is a or c or g or t.
VMIMPGMEYSTVSKIYGPLMIVQGVKGVAYGEVVEIETESGEKRKGQVLEAREDMAIVQVFEGTRDLDIKTTRVRFTGETLKVPVSMDMLGRIFNGIGKPIDGGPEIIPEDRRDVHGAPLNPVARAYPRDFIQTGISAIDGMNTLVRGQKLPIFSGSGLPHNMLAAQIARQAKVLGEEEQFAVVFAAMGITYEEANFFKKSFEETGAIERAVLFLNLADDPAIERIITPRMALTVAEYLAFDYDMQVLVILTDMTNYAEALREISAAREEVPGRRGYPGYMYTDLATIYERAGRVRGKKGSITQMPILTMPDDDITHPIPDLTGYITEGQIVLSRELHRKGIYPPIDVLPSLSRLMKDGIGKGRTREDHPQLSQQLYAAYAEGRSLRDLVAVVGEEALSETDRKYLKFADRFEREFVAQRYDEDRSIFETLDLGWELLAELPESELKRVRKEYILKYHPKYRKRGE

SEQ ID NO: 973 - protein, 409 aa, Thermococcus kodakaraensis KOD1
  misc_feature (414542)..(414542): n is a or c or g or t.
  misc_feature (786890)..(786890): n is a or c or g or t.
  misc_feature (786907)..(786907): n is a or c or g or t.
  misc_feature (786944)..(786946): n is a or c or g or t.
  misc_feature (839139)..(839139): n is a or c or g or t.
  misc_feature (1128488)..(1128488): n is a or c or g or t.
  misc_feature (1128499)..(1128499): n is a or c or g or t.
  misc_feature (1128505)..(1128506): n is a or c or g or t.
  misc_feature (1128517)..(1128518): n is a or c or g or t.
  misc_feature (1128539)..(1128540): n is a or c or g or t.
  misc_feature (1561400)..(1561400): n is a or c or g or t.
  misc_feature (1561477)..(1561477): n is a or c or g or t.
  misc_feature (1561545)..(1561545): n is a or c or g or t.
  misc_feature (1767941)..(1767941): n is a or c or g or t.
VVQMTEKLFYKDPYLREARAKIEKIEAVEDGKIRVLLDRTIFYPEGGGQPSDRGIIEGDGFRVLVEKVSGKEEIWHEGKLEGRLPEAREEVRLVLDWEWRYENMKNHTGQHVLSAIIKGLYGAETTGFQIFENYNKIEIDYPGELTWEMIQEIERKTNEVIWGDLPVEVEEYQYLPEDVVKILRKHVSKVHDRIRIIKIGTVDATPCGGTHVKSTREIGFLKILRFYRKSRKLWRIEFVAGNRALRTLNGILSDYWNALDEMPNKNPPLVERIQELKETMDKLEAEKDELKEELWEWKGKYLLEKSEKIGDIRVVTLIEGKPMKEVQGFAVKFVEKNPRTVLLVVGENYVLFARNEDVNVSMRELFERVASQLGGKGGGTDNLARGKVDAEPRVILQTARDVLKELLEG

SEQ ID NO: 974 - protein, 1157 aa, Thermococcus kodakaraensis KOD1
  misc_feature (414542)..(414542): n is a or c or g or t.
  misc_feature (786890)..(786890): n is a or c or g or t.
  misc_feature (786907)..(786907): n is a or c or g or t.
  misc_feature (786944)..(786946): n is a or c or g or t.
  misc_feature (839139)..(839139): n is a or c or g or t.
  misc_feature (1128488)..(1128488): n is a or c or g or t.
  misc_feature (1128499)..(1128499): n is a or c or g or t.
  misc_feature (1128505)..(1128506): n is a or c or g or t.
  misc_feature (1128517)..(1128518): n is a or c or g or t.
  misc_feature (1128539)..(1128540): n is a or c or g or t.
  misc_feature (1561400)..(1561400): n is a or c or g or t.
  misc_feature (1561477)..(1561477): n is a or c or g or t.
  misc_feature (1561545)..(1561545): n is a or c or g or t.
  misc_feature (1767941)..(1767941): n is a or c or g or t.
MDREEMIARFAKFLREYVDDEGNEVYINRLKDLLTVTPKRSLAIDWAHLNSFDPELADELLNNPEEAIASAEDAIQIVLREPPLLVEREFKVHARFYNLPKTLLVKELGSEHINKLIQVEGIITRVSEVKPFVEKAVFVCRDCGNEMVRLQRPYENLVKPAKCDACGSRNIELDVDKSRFLNFQSFRLQDRPESLKGGQMPRFVDAILLDDLVDAALPGDRVLVTGVLRVILEQREKRPIFKKILEVNHIEQLSKEIEELEISPEDEQKIRELAKRKDIVDAIVDSIAPAIWGHRIVKKGIALALFGGVQRTLPDGTKLRGESHVLLVGDPGVAKSQLLRYVANLAPRAIYTSGKSSSAAGLCVAPDSIIKTNLGQFKIGELVEKAIPEKVQDYKSVNAEKLGLYIKTLDGDMRVLRLWKLRAPEKLIRIEGDGLSITVTPETKLLTPNGWVEARNVDGEVVTENGPVKVSKQEIESPHDYVYDLTVEGSHSFIANGFVVHNTAAAVRDEFTGSWVLEAGVLVLADGGFALIDEFDKMSDRDRSAIHEALEQQSYHHDFELLLADGRKVKIGELVDKLIEKNRDRVILGKDTEILPVEDIELLAYDLEKREIVKVKADRVSRHKAPERFIKLRFSNGREITVTPEHPVMVWENGEITEKPAEKITPGDIALGVLRYPIQVDGKFKERYRDMREAEDYQDYLYSRGVVSKIKRTGIYFTVEKARRALPRELVKPLINAGKILRVTQTPKERASFNQKLVRENIIEGYLQRIIERMDELERLSREDPAKALELLPKTQLYYKYGITYGKLKKLAEARNSWAEGIIQSAVAERISLAKRELEEFFKWWNANVNFLKVKCVEEIKNDRWEWVYDVTVEPHHLFVSHGLVLHNTISISKAGITATLNSRTTVIAAANPKFGRFNRHKSLPEQLDLPPTLLSRFDLIFLLLDEPDEKVDASIAEHILKVRRGEAEAVTPKIPYDLLKKYIAYARKNVHPVLSREAMEEIKRYYVKMRKGLRRGDEDGVQPIPITARQLEALIRLSEAHARMRLSETVTREDARAAIEIIEAMMKTIAVDEEGNLDVSILEVGKSSKKINKIEKLVDIIKSLESEGEFGAPEEKVIEAAKQAGIGTKADIEKLLNELKSDGRVYEPRAGFYRVI

SEQ ID NO: 975 - protein, 142 aa, Thermococcus kodakaraensis KOD1
  misc_feature (414542)..(414542): n is a or c or g or t.
  misc_feature (786890)..(786890): n is a or c or g or t.
  misc_feature (786907)..(786907): n is a or c or g or t.
  misc_feature (786944)..(786946): n is a or c or g or t.
  misc_feature (839139)..(839139): n is a or c or g or t.
  misc_feature (1128488)..(1128488): n is a or c or g or t.
  misc_feature (1128499)..(1128499): n is a or c or g or t.
  misc_feature (1128505)..(1128506): n is a or c or g or t.
  misc_feature (1128517)..(1128518): n is a or c or g or t.
  misc_feature (1128539)..(1128540): n is a or c or g or t.
  misc_feature (1561400)..(1561400): n is a or c or g or t.
  misc_feature (1561477)..(1561477): n is a or c or g or t.
  misc_feature (1561545)..(1561545): n is a or c or g or t.
  misc_feature (1767941)..(1767941): n is a or c or g or t.
MSEKVDFYDFEKLLDKAYEELPENVKHHHSRFEVPPAQVTIAGNRTIIENFVDIAEAMNRDPNHLLKFILREVATAGTLEGRRAILQGRFTPYLIANKMKKYLKEFVICPVCGSPDTKIIKKGRFHFLKCEACGAETPIQHL

SEQ ID NO: 976 - protein, 128 aa, Thermococcus kodakaraensis KOD1
  misc_feature (414542)..(414542): n is a or c or g or t.
  misc_feature (786890)..(786890): n is a or c or g or t.
  misc_feature (786907)..(786907): n is a or c or g or t.
  misc_feature (786944)..(786946): n is a or c or g or t.
  misc_feature (839139)..(839139): n is a or c or g or t.
  misc_feature (1128488)..(1128488): n is a or c or g or t.
  misc_feature (1128499)..(1128499): n is a or c or g or t.
  misc_feature (1128505)..(1128506): n is a or c or g or t.
  misc_feature (1128517)..(1128518): n is a or c or g or t.
  misc_feature (1128539)..(1128540): n is a or c or g or t.
  misc_feature (1561400)..(1561400): n is a or c or g or t.
  misc_feature (1561477)..(1561477): n is a or c or g or t.
  misc_feature (1561545)..(1561545): n is a or c or g or t.
  misc_feature (1767941)..(1767941): n is a or c or g or t.
MDVKAVMEGLNITVIGVVVVFTILGILALVLYFVGWLERRLVEREKPATAPTPAPTPAPVEARQEEKPKIPPRDLAVITAAILAYTAEKASQLRPLPFRRKVSDSWRLYGLQTQMEDVEDFNYEIGKW

SEQ ID NO: 977 - protein, 85 aa, Thermococcus kodakaraensis KOD1
  misc_feature (414542)..(414542): n is a or c or g or t.
  misc_feature (786890)..(786890): n is a or c or g or t.
  misc_feature (786907)..(786907): n is a or c or g or t.
  misc_feature (786944)..(786946): n is a or c or g or t.
  misc_feature (839139)..(839139): n is a or c or g or t.
  misc_feature (1128488)..(1128488): n is a or c or g or t.
  misc_feature (1128499)..(1128499): n is a or c or g or t.
  misc_feature (1128505)..(1128506): n is a or c or g or t.
  misc_feature (1128517)..(1128518): n is a or c or g or t.
  misc_feature (1128539)..(1128540): n is a or c or g or t.
  misc_feature (1561400)..(1561400): n is a or c or g or t.
  misc_feature (1561477)..(1561477): n is a or c or g or t.
  misc_feature (1561545)..(1561545): n is a or c or g or t.
  misc_feature (1767941)..(1767941): n is a or c or g or t.
MDFALFMERYGYKILLVIMLSIVFGIIGIFVGAVFVTLKSYGLYVGGMILIVTAIYAFTVRRKYLQSYGDAMGKYFYDPKQGKRP

SEQ ID NO: 978 - protein, 164 aa, Thermococcus kodakaraensis KOD1
  misc_feature (414542)..(414542): n is a or c or g or t.
  misc_feature (786890)..(786890): n is a or c or g or t.
  misc_feature (786907)..(786907): n is a or c or g or t.
  misc_feature (786944)..(786946): n is a or c or g or t.
  misc_feature (839139)..(839139): n is a or c or g or t.
  misc_feature (1128488)..(1128488): n is a or c or g or t.
  misc_feature (1128499)..(1128499): n is a or c or g or t.
  misc_feature (1128505)..(1128506): n is a or c or g or t.
  misc_feature (1128517)..(1128518): n is a or c or g or t.
  misc_feature (1128539)..(1128540): n is a or c or g or t.
  misc_feature (1561400)..(1561400): n is a or c or g or t.
  misc_feature (1561477)..(1561477): n is a or c or g or t.
  misc_feature (1561545)..(1561545): n is a or c or g or t.
  misc_feature (1767941)..(1767941): n is a or c or g or t.
MASSSGCISIKLITSPDLINLVVGMEIRTHKLASERLLGKPVKVGPPEAEVILETTEEMAVDEYGLVHGGFTFGLADYAAMLAVNEPTVVLGKAEVRFLKPVKVGERLLARTRILENSGGGVGDGTSPQRKKVVKGEVFNEKGEKVFEGTFHCYVLEKHVLEKG

SEQ ID NO: 979 - protein, 422 aa, Thermococcus kodakaraensis KOD1
  misc_feature (414542)..(414542): n is a or c or g or t.
  misc_feature (786890)..(786890): n is a or c or g or t.
  misc_feature (786907)..(786907): n is a or c or g or t.
  misc_feature (786944)..(786946): n is a or c or g or t.
  misc_feature (839139)..(839139): n is a or c or g or t.
  misc_feature (1128488)..(1128488): n is a or c or g or t.
  misc_feature (1128499)..(1128499): n is a or c or g or t.
  misc_feature (1128505)..(1128506): n is a or c or g or t.
  misc_feature (1128517)..(1128518): n is a or c or g or t.
  misc_feature (1128539)..(1128540): n is a or c or g or t.
  misc_feature (1561400)..(1561400): n is a or c or g or t.
  misc_feature (1561477)..(1561477): n is a or c or g or t.
  misc_feature (1561545)..(1561545): n is a or c or g or t.
  misc_feature (1767941)..(1767941): n is a or c or g or t.
MKKSIALVLSIVLLAALFAVPASAGEQNTIRVIVSVDKAKFNPHEVLGIGGHIVYQFKLIPAVVVDVPANAVGKLKKMPGVEKVEFDHQAVLLGKPSWLGGGSTQPAQTIPWGIERVKAPSVWSITDGSVSVIQVAVLDTGVDYDHPDLAANIAWCVSTLRGKVSTKLRDCADQNGHGTHVIGTIAALNNDIGVVGVAPGVQIYSVRVLDARGSGSYSDIAIGIEQAILGPDGVADKDGDGIIAGDPDDDAAEVISMSLGGPADDSYLYDMIIQAYNAGIVIVAASGNEGAPSPSYPAAYPEVIAVGAIDSNDNIASFSNRQPEVSAPGVDILSTYPDDSYETLMGTSMATPHVSGVVALIQAAYYQKYGKILPVGTFDDISKNTVRGILHITADDLGPTGWDADYGYGVVRAALAVQAALG

SEQ ID NO: 980 - protein, 155 aa, Thermococcus kodakaraensis KOD1
  misc_feature (414542)..(414542): n is a or c or g or t.
  misc_feature (786890)..(786890): n is a or c or g or t.
  misc_feature (786907)..(786907): n is a or c or g or t.
  misc_feature (786944)..(786946): n is a or c or g or t.
  misc_feature (839139)..(839139): n is a or c or g or t.
  misc_feature (1128488)..(1128488): n is a or c or g or t.
  misc_feature (1128499)..(1128499): n is a or c or g or t.
  misc_feature (1128505)..(1128506): n is a or c or g or t.
  misc_feature (1128517)..(1128518): n is a or c or g or t.
  misc_feature (1128539)..(1128540): n is a or c or g or t.
  misc_feature (1561400)..(1561400): n is a or c or g or t.
  misc_feature (1561477)..(1561477): n is a or c or g or t.
  misc_feature (1561545)..(1561545): n is a or c or g or t.
  misc_feature (1767941)..(1767941): n is a or c or g or t.
MLGLFRKKKEKTGPFVYLSEPTLLYNTKTEKAIVGIIREKLNTDNILVPSKYGMRDTSKYIPKASYFVAIAPLGKFTSLVGREVRIALENGVKVYTLLIAREGDELVYLWVEGVPEDVEWLSPEETMEFTKSFLNSEFMDILKHGLVFGSRKREW

SEQ ID NO: 981 - protein, 180 aa, Thermococcus kodakaraensis KOD1
  misc_feature (414542)..(414542): n is a or c or g or t.
  misc_feature (786890)..(786890): n is a or c or g or t.
  misc_feature (786907)..(786907): n is a or c or g or t.
  misc_feature (786944)..(786946): n is a or c or g or t.
  misc_feature (839139)..(839139): n is a or c or g or t.
  misc_feature (1128488)..(1128488): n is a or c or g or t.
  misc_feature (1128499)..(1128499): n is a or c or g or t.
  misc_feature (1128505)..(1128506): n is a or c or g or t.
  misc_feature (1128517)..(1128518): n is a or c or g or t.
  misc_feature (1128539)..(1128540): n is a or c or g or t.
  misc_feature (1561400)..(1561400): n is a or c or g or t.
  misc_feature (1561477)..(1561477): n is a or c or g or t.
  misc_feature (1561545)..(1561545): n is a or c or g or t.
  misc_feature (1767941)..(1767941): n is a or c or g or t.
VVLMVTKEEVEKVVKSIVDEKFIRSIDVDEKGNVTVTLAKDTPDIDNVLIKLHSEIGKLEGVGLITVNREREIKEADENVQLTEEMVLEKLKEVIDPEIGLDVVNLGLIYDLKVNPDNTVYVKMTMTTPGCPLTMWLLRAVEDKILEIPGVKDAEIELTFDPPWTPDRISPEYKKKLGLF

SEQ ID NO: 982 - protein, 119 aa, Thermococcus kodakaraensis KOD1
  misc_feature (414542)..(414542): n is a or c or g or t.
  misc_feature (786890)..(786890): n is a or c or g or t.
  misc_feature (786907)..(786907): n is a or c or g or t.
  misc_feature (786944)..(786946): n is a or c or g or t.
  misc_feature (839139)..(839139): n is a or c or g or t.
  misc_feature (1128488)..(1128488): n is a or c or g or t.
  misc_feature (1128499)..(1128499): n is a or c or g or t.
  misc_feature (1128505)..(1128506): n is a or c or g or t.
  misc_feature (1128517)..(1128518): n is a or c or g or t.
  misc_feature (1128539)..(1128540): n is a or c or g or t.
  misc_feature (1561400)..(1561400): n is a or c or g or t.
  misc_feature (1561477)..(1561477): n is a or c or g or t.
  misc_feature (1561545)..(1561545): n is a or c or g or t.
  misc_feature (1767941)..(1767941): n is a or c or g or t.
VKIQEALMRREEVIFAYLHGSFIEDRPFRDIDVAVYVKEKLDIFYEMTLEDELTELTGFPVDVRVLNEAPITFRFKVIGGELLFSKDEKARCRFEEETMAEYHDYSYYLELYGREALGI

SEQ ID NO: 983 - protein, 331 aa, Thermococcus kodakaraensis KOD1
  misc_feature (414542)..(414542): n is a or c or g or t.
  misc_feature (786890)..(786890): n is a or c or g or t.
  misc_feature (786907)..(786907): n is a or c or g or t.
  misc_feature (786944)..(786946): n is a or c or g or t.
  misc_feature (839139)..(839139): n is a or c or g or t.
  misc_feature (1128488)..(1128488): n is a or c or g or t.
  misc_feature (1128499)..(1128499): n is a or c or g or t.
  misc_feature (1128505)..(1128506): n is a or c or g or t.
  misc_feature (1128517)..(1128518): n is a or c or g or t.
  misc_feature (1128539)..(1128540): n is a or c or g or t.
  misc_feature (1561400)..(1561400): n is a or c or g or t.
  misc_feature (1561477)..(1561477): n is a or c or g or t.
  misc_feature (1561545)..(1561545): n is a or c or g or t.
  misc_feature (1767941)..(1767941): n is a or c or g or t.
MKAVIMAGGYATRLWPITKDVPKALLPVGDRTILDHILEKVAETGLETYISTNRFFESRFRPFAEKWGVKLIVEDTLHEEEKLGTIGALKKIIEEIGLDDYLIIAGDNLFSFSLQDFLKRYDEKPLIAVYDVGNPELAKRYGVVLLEGDRVVDFEEKPAVPKSTLISTGVYALPRDVMALIDEYLANGHRDAPGYFLSWLLKKGIEIRAYRFSEFWYDIGSADSYLEALKTLLKESHIEEIQISPYSKIIPPVVIKRGTKILGRSIIGPYAYIGEDCVIENSDVSDSIVFRGTILKNATIWRSIIDEKCEIRNLELKKSLVGGHAKIQRGD

SEQ ID NO: 984 - protein, 229 aa, Thermococcus kodakaraensis KOD1
  misc_feature (414542)..(414542): n is a or c or g or t.
  misc_feature (786890)..(786890): n is a or c or g or t.
  misc_feature (786907)..(786907): n is a or c or g or t.
  misc_feature (786944)..(786946): n is a or c or g or t.
  misc_feature (839139)..(839139): n is a or c or g or t.
  misc_feature (1128488)..(1128488): n is a or c or g or t.
  misc_feature (1128499)..(1128499): n is a or c or g or t.
  misc_feature (1128505)..(1128506): n is a or c or g or t.
  misc_feature (1128517)..(1128518): n is a or c or g or t.
  misc_feature (1128539)..(1128540): n is a or c or g or t.
  misc_feature (1561400)..(1561400): n is a or c or g or t.
  misc_feature (1561477)..(1561477): n is a or c or g or t.
  misc_feature (1561545)..(1561545): n is a or c or g or t.
  misc_feature (1767941)..(1767941): n is a or c or g or t.
MTTLILLAGGIGKRANLGLPKQYYRIEEKMIIEYTLENVSKVGGIDRLILVSNPQFMDTALELAESFPKIETVTIGGKTRNESMYNGFKEVPPGETKVIVHDAVRPFTPRWVFEKIIDLLDEMDVVTTVNPITGNLIELDNGKVKRIHDRSRYAMGEAPTGYRYDALKKTLETALSRGILNEIPHDILLAMEAGFNVHVLHCNCFNLKITFREDVEIARTLIKVLEEQR

SEQ ID NO: 985 - protein, 285 aa, Thermococcus kodakaraensis KOD1
  misc_feature (414542)..(414542): n is a or c or g or t.
  misc_feature (786890)..(786890): n is a or c or g or t.
  misc_feature (786907)..(786907): n is a or c or g or t.
  misc_feature (786944)..(786946): n is a or c or g or t.
  misc_feature (839139)..(839139): n is a or c or g or t.
  misc_feature (1128488)..(1128488): n is a or c or g or t.
  misc_feature (1128499)..(1128499): n is a or c or g or t.
  misc_feature (1128505)..(1128506): n is a or c or g or t.
  misc_feature (1128517)..(1128518): n is a or c or g or t.
  misc_feature (1128539)..(1128540): n is a or c or g or t.
  misc_feature (1561400)..(1561400): n is a or c or g or t.
  misc_feature (1561477)..(1561477): n is a or c or g or t.
  misc_feature (1561545)..(1561545): n is a or c or g or t.
  misc_feature (1767941)..(1767941): n is a or c or g or t.
MTDKILSADSKSLVIVRKKQFKANIGVALLFEDPKKFKENYINYFESLKGNLNTKNPRYVFKSKDIKSLFGHDKSNEIIEDFVSLINESKVTVSFVFSIFNTKRLREVKYYSKDNTVKTEKPMKFIDKLTSYFSYITAWKSIRELGLNGIKVYLDNFDEQEYTYAWDDITVSNRPVIFPKGDQVNLFISTADIIVEYVYRKIMEQNIRLGVREMYELNEKHLGLDNFKVSYSGNRDVKYLAPYSHRKIPIRDYLARPMLYVLTEGLIGKGRKNSYREFPVLPISS

SEQ ID NO: 986 - protein, 1756 aa, Thermococcus kodakaraensis KOD1
  misc_feature (414542)..(414542): n is a or c or g or t.
  misc_feature (786890)..(786890): n is a or c or g or t.
  misc_feature (786907)..(786907): n is a or c or g or t.
  misc_feature (786944)..(786946): n is a or c or g or t.
  misc_feature (839139)..(839139): n is a or c or g or t.
  misc_feature (1128488)..(1128488): n is a or c or g or t.
  misc_feature (1128499)..(1128499): n is a or c or g or t.
  misc_feature (1128505)..(1128506): n is a or c or g or t.
  misc_feature (1128517)..(1128518): n is a or c or g or t.
  misc_feature (1128539)..(1128540): n is a or c or g or t.
  misc_feature (1561400)..(1561400): n is a or c or g or t.
  misc_feature (1561477)..(1561477): n is a or c or g or t.
  misc_feature (1561545)..(1561545): n is a or c or g or t.
  misc_feature (1767941)..(1767941): n is a or c or g or t.
VFINYDRGVYMPVEKVMKRDGRIVPFDKERIRWAIQRAMLEVGVRDEKLLNRVVRRVVRRVNELYDGQIPNIENIQDIVELELMRAGLFDVAKAYILYRKKKAEIREEKKKILNKDKLDEIDKRFSLNALRVLASRYLIKNEKGEIIESPRELFERVAILAVIPDILYDERVFDKNGGHEQDVSAIERYRENLDEYDGKFSIGRFRLNKWHFERLLNLYRELAEKGQMKLPIDEVLKMLENGAFDNYEDEIEEYFRLMTGQYFMPNTPALINSGRPLGMLSACFVVPIEDDMESIMKAAHDVAMIQKAGGGCIDGNAKIIFENDGEEHIMTMAEMYERYKDLGEFYDPEYNRWGINVEEVPVYVKSFDPSTKEITKGKVKVIWKYELGEDVPKYEIKTNKGTRVLTSPWHPFFVITQDLKIVEKRADELREGDMLVGGMPSDDDYEFLLDYWLAGFIAGDGSIDKYRSHVKGHEYVYDRLRIYDYTTETLGIINDHLEKTFGKRYSLQRDRNIHYIDIKAKGITSHYIELLRGITNGIPQPILKEGRNAVLSFITGLFDAEGHVNSKPGVELGMVNRKLIEDITYYLNSLGIKARMRKKPRKDGVDYVMHVEEYSSLLRFYELIGKNLQNSEKRIKLEELLSKHNGGSFGLTLSFEDFKAWSSKYGVEFKTNGSQTLAIIKNEKVSLGQWHRRGRVSKAVLVKMLRKLYDTTKSEDVKRMLHLIEGLEVVKEINVTNEPKTFYDLTVERYQNYLAGENGMVFVHNTGLNFSKLRPEGDLVGTTTGAASGPVSFMHLIDAVSDVIKQGGVRRGANMGILEVWHPDIEKFIHAKEKNTGTNVLSNFNISVGLWEDFWEALKEGKRYPLINPRTGEKVKEIDPKSLFEELAYMAWAKADPGVVFFDVINRRNVLEPAKGEKIRATNPCVVGDTRVLTPEGYIKAEELFSLAKERGKKEAVAVEGIAEEGEPYAYSVEVLLPGEEEVKYETVHGKALAIADPVAVPAYVWKVGKKKVARVRTKQGYEITATLDHRLMTSEGWKEVGELKPGDEILLPRFEIEEDFGSESIGEDLAFVLGWFIGDGYLNVNDKRAWFYFNAEKEEDIAWKIREILAKHFGIKAEPHRYGNQIKLGVRGEAYRWLESIMGSNEKRVPEIIYRLKPREIAAFLRGLFSADGYVDNDNAVRLTSKDRGLLRDVQDLLLLFGILSKIYERPYSSEFKYTTKDGEERTYRAEGYYELVIANYSRKLFAEKIGFEGYKMEKLSLQKTKIDEPVVTVESVEVLGEEIVYDFTVPEHHSYISNGFMSHNCGEEPLYEYESCNLASINLAKFVKYDDEGKPYFDWDEYAYVIQKVAKYLDNAIDVNKFPLPEIDRNTKLTRRIGVGMMGLADALFKLGIPYNSKEGFDFMRKATEYLTFYAYKRSVEAAKERGPFPLYEKTRYKDGELPVEGFYHREIWNLPWDELVEEIKKYGVRNGMVTTCPPTGSVSMIADTSSGIEPIFALVYKKSVTVGEFYYVDPVFEAELKKRGLWSDEILKKISDNYGSVQGLEEIPEDMQRVFVTAMDIHWLDHILAQANIQLWLTDSASKTINMPNDATVEDVKAAYLLAYKLGCKGVTVYRDGSLSVQVYSVEGEKKKRVPAKPSDYAVEKLKTIVEAEPWLSRFINVEAILNGTNGKEKSAQAGGLTFSVSHVSAVKPAHEHSHHAKRPDIPEEKIRELLGVAYCPVCYEKDGELVELRMESGCATCPRCGWSKCVIS

SEQ ID NO: 987 - protein, 458 aa, Thermococcus kodakaraensis KOD1
  misc_feature (414542)..(414542): n is a or c or g or t.
  misc_feature (786890)..(786890): n is a or c or g or t.
  misc_feature (786907)..(786907): n is a or c or g or t.
  misc_feature (786944)..(786946): n is a or c or g or t.
  misc_feature (839139)..(839139): n is a or c or g or t.
  misc_feature (1128488)..(1128488): n is a or c or g or t.
  misc_feature (1128499)..(1128499): n is a or c or g or t.
  misc_feature (1128505)..(1128506): n is a or c or g or t.
  misc_feature (1128517)..(1128518): n is a or c or g or t.
  misc_feature (1128539)..(1128540): n is a or c or g or t.
  misc_feature (1561400)..(1561400): n is a or c or g or t.
  misc_feature (1561477)..(1561477): n is a or c or g or t.
  misc_feature (1561545)..(1561545): n is a or c or g or t.
  misc_feature (1767941)..(1767941): n is a or c or g or t.
VSMEMEEVIAEVLQKIVPTEEERAFVKELIGELEGIAREKAQELGLEVKPYFVGSLAKDTYLAGDHDVDLFLAFPLDTPLEEVRERGLELGKEIGKTLGEYEIAYAEHPYVRAKYRDVKVDLVPCYDVRDWKDVRTAVDRSILHTKWVNENLNGKNNEVRLLKRFLKGIKAYGSEIYVRGFSGYLSEILVIKYGSFVEVLEKADFILRQKVVDPAGWLKREPEIAMKTVRREVEEDKPLVVIDPVDPRRNVAANLSWEKYGRFYFKADEFLQRPSLEFFFPTGKTGGDYLAELRRKGTHLITLLFDVPEMVDDLLFPQLERSARGFEKALSREGFEVLGWNTGRYGAEKAFVMLELDRVERPRVKIHPGPEFFTERGRDFYRKNERVWLVGKRLYAEKRVKENIIDVVRELLEKNQVALGKNLRETVKGAEILVDYVPRPLENEAYLFLSREKEGLKH

SEQ ID NO: 988 - protein, 125 aa, Thermococcus kodakaraensis KOD1
  misc_feature (414542)..(414542): n is a or c or g or t.
  misc_feature (786890)..(786890): n is a or c or g or t.
  misc_feature (786907)..(786907): n is a or c or g or t.
  misc_feature (786944)..(786946): n is a or c or g or t.
  misc_feature (839139)..(839139): n is a or c or g or t.
  misc_feature (1128488)..(1128488): n is a or c or g or t.
  misc_feature (1128499)..(1128499): n is a or c or g or t.
  misc_feature (1128505)..(1128506): n is a or c or g or t.
  misc_feature (1128517)..(1128518): n is a or c or g or t.
  misc_feature (1128539)..(1128540): n is a or c or g or t.
  misc_feature (1561400)..(1561400): n is a or c or g or t.
  misc_feature (1561477)..(1561477): n is a or c or g or t.
  misc_feature (1561545)..(1561545): n is a or c or g or t.
  misc_feature (1767941)..(1767941): n is a or c or g or t.
MVHEYVKERIKEFTKEEKEKRYKYLGKEVIDVGDPGLDSIPEFYGIANAIWRDWKNGEISTKTALGRLALLKLLTYKTKNKKIADIPEEDLEEVRKFIDYVIQVIKNESRRKGEPEEERQIEENA

SEQ ID NO: 989 - protein, 40 aa, Thermococcus kodakaraensis KOD1
  misc_feature (414542)..(414542): n is a or c or g or t.
  misc_feature (786890)..(786890): n is a or c or g or t.
  misc_feature (786907)..(786907): n is a or c or g or t.
  misc_feature (786944)..(786946): n is a or c or g or t.
  misc_feature (839139)..(839139): n is a or c or g or t.
  misc_feature (1128488)..(1128488): n is a or c or g or t.
  misc_feature (1128499)..(1128499): n is a or c or g or t.
  misc_feature (1128505)..(1128506): n is a or c or g or t.
  misc_feature (1128517)..(1128518): n is a or c or g or t.
  misc_feature (1128539)..(1128540): n is a or c or g or t.
  misc_feature (1561400)..(1561400): n is a or c or g or t.
  misc_feature (1561477)..(1561477): n is a or c or g or t.
  misc_feature (1561545)..(1561545): n is a or c or g or t.
  misc_feature (1767941)..(1767941): n is a or c or g or t.
VLSNVIPKIKNISSIPRLLFFNFIEHHLTEWSLIMMYDAI

SEQ ID NO: 990 - protein, 484 aa, Thermococcus kodakaraensis KOD1
  misc_feature (414542)..(414542): n is a or c or g or t.
  misc_feature (786890)..(786890): n is a or c or g or t.
  misc_feature (786907)..(786907): n is a or c or g or t.
  misc_feature (786944)..(786946): n is a or c or g or t.
  misc_feature (839139)..(839139): n is a or c or g or t.
  misc_feature (1128488)..(1128488): n is a or c or g or t.
  misc_feature (1128499)..(1128499): n is a or c or g or t.
  misc_feature (1128505)..(1128506): n is a or c or g or t.
  misc_feature (1128517)..(1128518): n is a or c or g or t.
  misc_feature (1128539)..(1128540): n is a or c or g or t.
  misc_feature (1561400)..(1561400): n is a or c or g or t.
  misc_feature (1561477)..(1561477): n is a or c or g or t.
  misc_feature (1561545)..(1561545): n is a or c or g or t.
  misc_feature (1767941)..(1767941): n is a or c or g or t.
MREFAWGVVQSAFQFEMGDPLRRFIDTRTDWWHWVRDPLNIKNDLVSGHLPEDGINNYGLYEIDHQLAKDMGLNAYQITVEWSRIFPCPTYGVEVDFERDSYGLIKRVKITKETLHELEEIANAKEVEHYREVLKNLKELGFSTFVTLNHQTQPIWLHDPIHVRENFEKARAKGWVDERAILEFAKFAAFVAWKLGDLVDFWATFDEPMVTVELGYLAPYVGWPPGILNPKAAKAVIINQLVGHARAYEAVKTFSDKPVGIILNIIPAYPRDPNDPKDVKATENYDLFHNRIFLDGVNEGKVDLDFDGNYVKIDHLKRNDWIGNNYYTREVIRYTEPKYEELPIINFVGTEGYGYSSEPNSVSKDNNPTSDFGWECFPQGMYDSIMIGNEYRKPIYITENGIADSRDLLRPRYIKEHVEKMFEAIQAGADVRGYFHWALTDNYEWAMGFKIKFGLYEVDPISKQRIPRPRSVETYKKIVREGLP

SEQ ID NO: 991 - protein, 1236 aa, Thermococcus kodakaraensis KOD1
  misc_feature (414542)..(414542): n is a or c or g or t.
  misc_feature (786890)..(786890): n is a or c or g or t.
  misc_feature (786907)..(786907): n is a or c or g or t.
  misc_feature (786944)..(786946): n is a or c or g or t.
  misc_feature (839139)..(839139): n is a or c or g or t.
  misc_feature (1128488)..(1128488): n is a or c or g or t.
  misc_feature (1128499)..(1128499): n is a or c or g or t.
  misc_feature (1128505)..(1128506): n is a or c or g or t.
  misc_feature (1128517)..(1128518): n is a or c or g or t.
  misc_feature (1128539)..(1128540): n is a or c or g or t.
  misc_feature (1561400)..(1561400): n is a or c or g or t.
  misc_feature (1561477)..(1561477): n is a or c or g or t.
  misc_feature (1561545)..(1561545): n is a or c or g or t.
  misc_feature (1767941)..(1767941): n is a or c or g or t.
MEVHVKYATSPKTFKAQGVLCVKKIWTSIVLTAVLLLSLVQVGTFPWASAAESVSLSGSAIAWDVVNLTWSPYSSAKAYEVYRSTDPSNLFSPNNLLVVVNWSSYPKYEPGKTYNQGDVVEYNGKIWRVKYWTQSVPGSDDSWELVGDVVPTTSYLDQYHLKANTTYYYGVVPVLADGSRGSPSNVLAITTPLEPYRVIVYYISWGRYARKFYVSDIPWEKVTHVNYAFLDLKEDGTVAFYDTYADPLNLEAMKEYKRKYPAVKVLISVGGWTLSKYFSVVAADPAKRQRFAETAIEILRKYNLDGIDIDWEYPGGGGMAGNYESPDDGKNFVLLLKDLREALDKAAKEDHKDYLLTAATPADPVKAGRIDWVEASKYLDSINIMTYDYHGAWETITGHLAPLYCDPNAPYTDENVKYHFCVNYTVQWYIQHVPDKTKITVGLPFYSRSFANVPPENNGLYQPFSGTPAGTWGPAYETYGVMDYWDVAEKNQSSEYEYHWDPIAQVAWLYSPSKRIFITFDDPRAIGIKVDYMLKNGLGGVMIWEITADRKPGTNDHPLLDTVLQHLGEKPPAWIPDTYYIGSNIPSNITVPEPTPLPPSNETTPEDNQTNPNPSQGNETNPNPSPGNETTPSDNQTTPSTGDFVKPGSLSVKVTDWGNTEYDVTLNLGGTYDWVVKVKLKDGSSVSSFWSANKAEEGGYVVFTPVSWNRGPTATFGFIATGSESVEAIYLYVDGQLWDAWPSNTQQPEENQTVPSPSPGNETTPTPSPGNETAPSENQTTPSTGDLVKPDAFSVKIQDWGSTEYDVTLNLGGTYDWVVKVKLKDGSAVSSVWSANKAEEGGYVVFTPVSWNKGPTATFGFIATGSEPVEAMYLYVNDQLWDVWPETASAPGNESTPSDNQTNPNPSPGNETNPNPSPGNETGPYVPAGPGLPEHFFAPYIDMSLGIHKPLVEYYNLTGTPYFTLAFVLYSSVYNGPAWAGSIPLDAFVDEVKGLREAGGDVIIAFGGAVGPYLCQQAKTPEQLAQWYIQVIDTYNATYLDFDIESGVDADKLADALLIVQRERPNVRFSFTLPSDPGIGLAGGYGIIETMAKKGVIVDRVNPMTMDYYWTPANADNAISVAEHVFNQLKQIYPDKSDDEIWGMIGLTPMIGTNDDKSVFSLQDAEKLVDWAIQHKIRSLAFWSVDRDHPGPTGEVSPIHRGTSDPDWAFSHAFLRFMKAFQPVASTAQVAVAVPV

SEQ ID NO: 992 - protein, 656 aa, Thermococcus kodakaraensis KOD1
  misc_feature (414542)..(414542): n is a or c or g or t.
  misc_feature (786890)..(786890): n is a or c or g or t.
  misc_feature (786907)..(786907): n is a or c or g or t.
  misc_feature (786944)..(786946): n is a or c or g or t.
  misc_feature (839139)..(839139): n is a or c or g or t.
  misc_feature (1128488)..(1128488): n is a or c or g or t.
  misc_feature (1128499)..(1128499): n is a or c or g or t.
  misc_feature (1128505)..(1128506): n is a or c or g or t.
  misc_feature (1128517)..(1128518): n is a or c or g or t.
  misc_feature (1128539)..(1128540): n is a or c or g or t.
  misc_feature (1561400)..(1561400): n is a or c or g or t.
  misc_feature (1561477)..(1561477): n is a or c or g or t.
  misc_feature (1561545)..(1561545): n is a or c or g or t.
  misc_feature (1767941)..(1767941): n is a or c or g or t.
VYKVFGFEENFIHGRVARVEFSLPDAGRWDYAYLLGNFNAFNEGSFRMKHEDKRWIIEIKLPEGLWRYAFSAGGEFLLDPENPEKELYRRPSYKFEREVSLAKIAGNDMVFHRPALLYLYSFGDRTHVLLRSKKGKVDAAYLVTDDTHVKMRKKADGEVFEYYEAVLQETEKLRYSFEVFLKEGKSLTLGPFEAAPFRLDAPSWILDRVFYQIMPDRFAKGRDHEPPFLSWEYYGGDLWGIVEKIDHLEELGVNALYLTPIFESMTYHGYDITDYLRVAERLGGEEAFRELVKALKSRDIKLVLDGVFHHTSFFHPFFRDVVERGEESEYADFYRVKGFPVVSEEFIRVLKSDLPPMEKYQTLKKMGWNYESFFSVWVMPRLNHDSPKVREFVARVMNYWLEKGADGWRLDVAHGVPPGFWREVREGLPDDAYLFGEVMDDPRLYLFGVFHGVMNYPLYDLLLRFFAFGEIGATEFINGIELLSAHLGPAEYFTYNFLDNHDTERFIDLAGKERYLCALTFLMTYKGIPAIFYGDEIGLRGSGEGMSAGRTPMSWDEEKWDFQILRQTMKLIELRRSLKSLQVGSFRVIGAGEKWFVYERKAGSERVLVGINCSWNDVETPVPSNGSNEQIKIPAFSSIIRVKDSMNVHIGSDLQE

SEQ ID NO: 993 - protein, 448 aa, Thermococcus kodakaraensis KOD1
  misc_feature (414542)..(414542): n is a or c or g or t.
  misc_feature (786890)..(786890): n is a or c or g or t.
  misc_feature (786907)..(786907): n is a or c or g or t.
  misc_feature (786944)..(786946): n is a or c or g or t.
  misc_feature (839139)..(839139): n is a or c or g or t.
  misc_feature (1128488)..(1128488): n is a or c or g or t.
  misc_feature (1128499)..(1128499): n is a or c or g or t.
  misc_feature (1128505)..(1128506): n is a or c or g or t.
  misc_feature (1128517)..(1128518): n is a or c or g or t.
  misc_feature (1128539)..(1128540): n is a or c or g or t.
  misc_feature (1561400)..(1561400): n is a or c or g or t.
  misc_feature (1561477)..(1561477): n is a or c or g or t.
  misc_feature (1561545)..(1561545): n is a or c or g or t.
  misc_feature (1767941)..(1767941): n is a or c or g or t.
MRKGIFALLLVGVLFLGVVASGCIGGGETTTTPSTSQSQTTSSPTETTSPTETTTTSPTETTTAPTVECGSGKVVIWHNMQPNELEVFQSIAEEYMAECPNVEITFEQKPNLEDALKAAIPSGQGPDLFIWAHDWIGKFADAGLLEPIDDYITDDILKDFAPMAVDAMQYKGHYYAMPFAAETVAIIYNKAMVSEPPKTFDEMKAIMEKYYDPDNEKYGIAWPINAYFISGIAQAFGGYYFDDATEQPGLDKPETIEGFKFFFTQIWPYMAPTADYNTQQSIFLEGRAPMMVNGPWSINDVKKAGIDFGVVPLPPITKDGKEYWPRPYGGVKDIYFAAGLKNKDAAWKFVKWFTTTPEVIKELSLQLGYIPVLKPVLEDPDIKADPVIYGFGQAVQHAYLMPKSPKMGAVWGGVDGAITEILQDPAHADFEAILKKYQEKILQDMGSS

SEQ ID NO: 994 - protein, 372 aa, Thermococcus kodakaraensis KOD1
  misc_feature (414542)..(414542): n is a or c or g or t.
  misc_feature (786890)..(786890): n is a or c or g or t.
  misc_feature (786907)..(786907): n is a or c or g or t.
  misc_feature (786944)..(786946): n is a or c or g or t.
  misc_feature (839139)..(839139): n is a or c or g or t.
  misc_feature (1128488)..(1128488): n is a or c or g or t.
  misc_feature (1128499)..(1128499): n is a or c or g or t.
  misc_feature (1128505)..(1128506): n is a or c or g or t.
  misc_feature (1128517)..(1128518): n is a or c or g or t.
  misc_feature (1128539)..(1128540): n is a or c or g or t.
  misc_feature (1561400)..(1561400): n is a or c or g or t.
  misc_feature (1561477)..(1561477): n is a or c or g or t.
  misc_feature (1561545)..(1561545): n is a or c or g or t.
  misc_feature (1767941)..(1767941): n is a or c or g or t.
MAEVKLINVWKQFGDFTAVKDMNLHIKDGEFMILLGPSGCGKTTTLRMIAGLEEPTKGQIYIGDKLVADPEKGIFVPPKDRDIAMVFQSYALYPHMTVYDNIAFPLKLRKVPKDEIDRRVREVAEMLGLTELLNRKPRELSGGQRQRVALGRAIVRKPQVFLMDEPLSNLDAKLRVKMRAELKRLQRQLGVTTIYVTHDQVEAMTMGDRVAVINQGQLQQVGTPEEVYDRPANTFVAGFIGSPPMNFMDATVTEDGFADFGEFRLKFLPDQFEVLREKNLVGREVIFGIRPEDIYDALFAQVKIPGENMARALVEIIENLGGEKIVHLSIGDVTFLGKFPAESRVQEGQEVDVVFDMRKAHVFEKGSGKAVF

SEQ ID NO: 995 - protein, 728 aa, Thermococcus kodakaraensis KOD1
  misc_feature (414542)..(414542): n is a or c or g or t.
  misc_feature (786890)..(786890): n is a or c or g or t.
  misc_feature (786907)..(786907): n is a or c or g or t.
  misc_feature (786944)..(786946): n is a or c or g or t.
  misc_feature (839139)..(839139): n is a or c or g or t.
  misc_feature (1128488)..(1128488): n is a or c or g or t.
  misc_feature (1128499)..(1128499): n is a or c or g or t.
  misc_feature (1128505)..(1128506): n is a or c or g or t.
  misc_feature (1128517)..(1128518): n is a or c or g or t.
  misc_feature (1128539)..(1128540): n is a or c or g or t.
  misc_feature (1561400)..(1561400): n is a or c or g or t.
  misc_feature (1561477)..(1561477): n is a or c or g or t.
  misc_feature (1561545)..(1561545): n is a or c or g or t.
  misc_feature (1767941)..(1767941): n is a or c or g or t.
MFLLAAMWNPPVERNWVMVMNLPPPLPRNVISIKGTPPSSFADVRVSPRGYIRHCLQSRPSARNGGTRHCNTSSTSNQKTSDNTKRFYKPEYKVICHLLQGVQPMEFKPYIPPEKSLPEYTVKAFVLGVLLSIVMGAANAYLGMYAGMTVSASIPAAVISMAILLAFKDRNILENNMVQTAASAGESLAAGVIFTFPALVVLEYYTTFPYYIVTIIAALGGSLGALFTVVLRRAFIVEEKLPYPEGTACAEVLIAGDKGGSHAKPIFYGGIFGGIYKLLGQTGLWSGTVETAKMIGSRVYYFGSDLSAALVAVGYIVGLNIAFLVFLGGAIAWFIAIPLYAGQMGSTDMSALDLAWTIWSTKIRYMGVGAMVVGGLWSLIKLRGPITRGIKAGLEAAKRRQAGEAVLRTEEDLPLNYVLILIAAFAIPLFLLYYHIIGSIGIAAVMAVILLIVGFLGSAIAGYLAGVVGSSNNPVSGITIMSLLFTALVLKALGLSGTEGMVATILVAAVICTAAAIAGDTMQDLATGYLVGATPKRQQVFEIIGTFAAALVMAPVLNLLIEAYGIAGTPTAKENALAAPQAFLMAKVTEGVFTGNLEWKMVYIGAGIAIALIIVDEILAMKKAKFRTPVMPVAVGIYLPLSLGVPIFIGGLIRHFASKAKGNGGEDMTDAGVLGAAGLIAGEALMGIIFAALIVANVAPSVGFTSNVLGVLLLAGIVIWLYMMGKKK

SEQ ID NO: 996 - protein, 248 aa, Thermococcus kodakaraensis KOD1
  misc_feature (414542)..(414542): n is a or c or g or t.
  misc_feature (786890)..(786890): n is a or c or g or t.
  misc_feature (786907)..(786907): n is a or c or g or t.
  misc_feature (786944)..(786946): n is a or c or g or t.
  misc_feature (839139)..(839139): n is a or c or g or t.
  misc_feature (1128488)..(1128488): n is a or c or g or t.
  misc_feature (1128499)..(1128499): n is a or c or g or t.
  misc_feature (1128505)..(1128506): n is a or c or g or t.
  misc_feature (1128517)..(1128518): n is a or c or g or t.
  misc_feature (1128539)..(1128540): n is a or c or g or t.
  misc_feature (1561400)..(1561400): n is a or c or g or t.
  misc_feature (1561477)..(1561477): n is a or c or g or t.
  misc_feature (1561545)..(1561545): n is a or c or g or t.
  misc_feature (1767941)..(1767941): n is a or c or g or t.
MPTWKDGKLGLPVKEALKVFPELGKYIDESGRLDFSNREARILYNRAIARAIFGLDVEYHPKGLVTTPISRYLFLKTFLRGGEKVLEIGTGHTAMMALMAERLFNCDVTATELDEEFFEYAKRNIEKNGANVKPIKSNGGIIRGVVPKGERFDVIFSAPPYYEAPTRGVLTEKEGVGGGRYGEAFSVRLIEEALEYLNPGGKVALFLPDKEPLIEAIAEKGKELGYSVRDVKFKVGTRWRHSLLLHKS

SEQ ID NO: 997 - protein, 408 aa, Thermococcus kodakaraensis KOD1
  misc_feature (414542)..(414542): n is a or c or g or t.
  misc_feature (786890)..(786890): n is a or c or g or t.
  misc_feature (786907)..(786907): n is a or c or g or t.
  misc_feature (786944)..(786946): n is a or c or g or t.
  misc_feature (839139)..(839139): n is a or c or g or t.
  misc_feature (1128488)..(1128488): n is a or c or g or t.
  misc_feature (1128499)..(1128499): n is a or c or g or t.
  misc_feature (1128505)..(1128506): n is a or c or g or t.
  misc_feature (1128517)..(1128518): n is a or c or g or t.
  misc_feature (1128539)..(1128540): n is a or c or g or t.
  misc_feature (1561400)..(1561400): n is a or c or g or t.
  misc_feature (1561477)..(1561477): n is a or c or g or t.
  misc_feature (1561545)..(1561545): n is a or c or g or t.
  misc_feature (1767941)..(1767941): n is a or c or g or t.
MSPILGGSMLDPFGKRAESLIREEFGDLLALLERVPSAISVEEPISLVSWMLESENPPQELVEVDNLEELRDLFKFYALLGAASISPYGLEAEVVKRATLRLYSERIKASKNLSETMLPVVPVGENEIPHNDLNILERRMDRNLSPEEKEKLKIKYKIPIKDLLNLWGSSLKEVYIRNGYAYLRWETALKMWEKAFEKRFERAVNILYEYRDELPEFYHRLREKLEEIAEEYFKERGEMFKGTASPLRFDLFPPCVKEALKGVPAGMRNYAITVLLTSFLSYARICPNPPKKDVRIKDCINDLKIIEEEILPVIIEAGNRCKPPLFEDQPHEIKNIWYHLGFGLTDSPTMEDSGNSTWYFPPNCDKIRANAPQLCKPDKYCRGIKNPLSYYLKRLYLEGKKKEGETSE

SEQ ID NO: 998 - protein, 185 aa, Thermococcus kodakaraensis KOD1
  misc_feature (414542)..(414542): n is a or c or g or t.
  misc_feature (786890)..(786890): n is a or c or g or t.
  misc_feature (786907)..(786907): n is a or c or g or t.
  misc_feature (786944)..(786946): n is a or c or g or t.
  misc_feature (839139)..(839139): n is a or c or g or t.
  misc_feature (1128488)..(1128488): n is a or c or g or t.
  misc_feature (1128499)..(1128499): n is a or c or g or t.
  misc_feature (1128505)..(1128506): n is a or c or g or t.
  misc_feature (1128517)..(1128518): n is a or c or g or t.
  misc_feature (1128539)..(1128540): n is a or c or g or t.
  misc_feature (1561400)..(1561400): n is a or c or g or t.
  misc_feature (1561477)..(1561477): n is a or c or g or t.
  misc_feature (1561545)..(1561545): n is a or c or g or t.
  misc_feature (1767941)..(1767941): n is a or c or g or t.
MVYYIAPILATLMSWRFLGETIDRKTLSLIILAFLGLILIMSGQEISFENRDFVGILLAFTAAFFYAMIPNLGRFLKEVDGKILTLSQLGIASFVLLPFVLLQDVGKPVWWTVLVLVLIHTVFALFLYMEGLKEVEVKDAALLSYLDPASAVVYAFLVFGEVPGTRTVIGGVLILLASALDALRR

SEQ ID NO: 999 - protein, 409 aa, Thermococcus kodakaraensis KOD1
  misc_feature (414542)..(414542): n is a or c or g or t.
  misc_feature (786890)..(786890): n is a or c or g or t.
  misc_feature (786907)..(786907): n is a or c or g or t.
  misc_feature (786944)..(786946): n is a or c or g or t.
  misc_feature (839139)..(839139): n is a or c or g or t.
  misc_feature (1128488)..(1128488): n is a or c or g or t.
  misc_feature (1128499)..(1128499): n is a or c or g or t.
  misc_feature (1128505)..(1128506): n is a or c or g or t.
  misc_feature (1128517)..(1128518): n is a or c or g or t.
  misc_feature (1128539)..(1128540): n is a or c or g or t.
  misc_feature (1561400)..(1561400): n is a or c or g or t.
  misc_feature (1561477)..(1561477): n is a or c or g or t.
  misc_feature (1561545)..(1561545): n is a or c or g or t.
  misc_feature (1767941)..(1767941): n is a or c or g or t.
MHELVLSGRFVLNGEIVGGSIGIDNGLITEISRRDIKGEEVIAFKSEIILPGLIDTHVHLRDFEQKEKETVESGTKAALHGGITAVFDMPNTKPPIMDVKTFEKRLSILEKHAYSDYAASFLLAGNCGEASRARADFYKIFMGASTGGIFSENFESDYSCAPGIVSVHAEDPETIRENPERPPEAEIRAIKKALTAAEKLRKPLNVCHVSTVGGIEAIIKKNLPWVSFEVTPHHLFLTSKDFERNPLLKVYPPLRSEEHRKALWENFSRIPIIASDHAPHTIEDKEAGAAGIPGLETEVALLLDAANRGLITVFDIVEKMHDNPVRFFGIKGRDFSLGNEATFTIIDPKKEWKVKPEEFYTKAKWSPWEGKKLKGKVVMTVIRGMVVMEGDEIIEEPKGVRLDVQGGNH

SEQ ID NO: 1000 - protein, 319 aa, Thermococcus kodakaraensis KOD1
  misc_feature (414542)..(414542): n is a or c or g or t.
  misc_feature (786890)..(786890): n is a or c or g or t.
  misc_feature (786907)..(786907): n is a or c or g or t.
  misc_feature (786944)..(786946): n is a or c or g or t.
  misc_feature (839139)..(839139): n is a or c or g or t.
  misc_feature (1128488)..(1128488): n is a or c or g or t.
  misc_feature (1128499)..(1128499): n is a or c or g or t.
  misc_feature (1128505)..(1128506): n is a or c or g or t.
  misc_feature (1128517)..(1128518): n is a or c or g or t.
  misc_feature (1128539)..(1128540): n is a or c or g or t.
  misc_feature (1561400)..(1561400): n is a or c or g or t.
  misc_feature (1561477)..(1561477): n is a or c or g or t.
  misc_feature (1561545)..(1561545): n is a or c or g or t.
  misc_feature (1767941)..(1767941): n is a or c or g or t.
VTNYLFKPTFSALPGEKMGIKMRWEDFARSMGVEPQILENKEARLLKQFVMDLKFPTHCQGCQGLDLNNPNPVHHPSYELTPACNHDCIFCYSNVAVKLGKAPKPGYYGWENPYAITVSQYGEPLISPRIVEVNRMLREKFPNARLDLQTNGSLLTEELWAKLDFDLVMISLDAASREKHLKITNADTFEAVVNALRIVGSDKSVRSVVRTIFMPGINDEDIPKIAELAASLGIDEMMLQPLTIHELNVERLKKAGLDFERAESIREFLKAAMEAKKHIDVRISGCQLAIYRTMDPLTLFSAKRVAREVAPVVKRERLL

SEQ ID NO: 1001 - protein, 232 aa, Thermococcus kodakaraensis KOD1
  misc_feature (414542)..(414542): n is a or c or g or t.
  misc_feature (786890)..(786890): n is a or c or g or t.
  misc_feature (786907)..(786907): n is a or c or g or t.
  misc_feature (786944)..(786946): n is a or c or g or t.
  misc_feature (839139)..(839139): n is a or c or g or t.
  misc_feature (1128488)..(1128488): n is a or c or g or t.
  misc_feature (1128499)..(1128499): n is a or c or g or t.
  misc_feature (1128505)..(1128506): n is a or c or g or t.
  misc_feature (1128517)..(1128518): n is a or c or g or t.
  misc_feature (1128539)..(1128540): n is a or c or g or t.
  misc_feature (1561400)..(1561400): n is a or c or g or t.
  misc_feature (1561477)..(1561477): n is a or c or g or t.
  misc_feature (1561545)..(1561545): n is a or c or g or t.
  misc_feature (1767941)..(1767941): n is a or c or g or t.
MGENLFSALLNIQAVDLMDIWTLVAVYILIFLSLANLFIKPILFAKRMAGKVLKKLLRVRVPENQKKGVERLYTPIWVIIGLWAFFKLKDASLLGAVFGLLAFRSGANITRLLVYSSHDGKILKEMAEGRVLGILEKAVRISLILEAAFPFAMLLAYKTLSAVTISHGSVGKFLLELWVAGAIFGLVFGYLIAKDNRGLLLEDSVEALTFMIALKGKQKAEKAKERIKFRAP

SEQ ID NO: 1002 - protein, 396 aa, Thermococcus kodakaraensis KOD1
  misc_feature (414542)..(414542): n is a or c or g or t.
  misc_feature (786890)..(786890): n is a or c or g or t.
  misc_feature (786907)..(786907): n is a or c or g or t.
  misc_feature (786944)..(786946): n is a or c or g or t.
  misc_feature (839139)..(839139): n is a or c or g or t.
  misc_feature (1128488)..(1128488): n is a or c or g or t.
  misc_feature (1128499)..(1128499): n is a or c or g or t.
  misc_feature (1128505)..(1128506): n is a or c or g or t.
  misc_feature (1128517)..(1128518): n is a or c or g or t.
  misc_feature (1128539)..(1128540): n is a or c or g or t.
  misc_feature (1561400)..(1561400): n is a or c or g or t.
  misc_feature (1561477)..(1561477): n is a or c or g or t.
  misc_feature (1561545)..(1561545): n is a or c or g or t.
  misc_feature (1767941)..(1767941): n is a or c or g or t.
VEFLGYLAVLLVVAKSIEWAFEKAEIHPIIAHVITGILLGPFALGIVKPGKEIEVLAQFGLIMMMLYMGLTSNFSAIAQNTKKATFVAVLGVAFSFILGFATVYLFGKGFSAAVFVGVTLGNTAIEVTSGVLVKERVNRRVSAILMGAAFADDILAVYLIGIITGMASGNFNAQSLLILTGKIFAFIVATLLISEYIFKRSRWFYSVVRNLNVFFTFTLILTFALAIISEWVGLNQIIGAYLAGLTISRLRERKDPLVVTRIKLNELIGDLQVVLTEFFMPLFFIYVGLMFNPPIKDINIFLILALYASAVLGKLIGCGLGSKLVGLPWEDSIAVGIGMGGRGSLELAILTFGLSTGLIDQSIFASVIMVSMLTALTTPIFFKAYLKRQRLKAGES

SEQ ID NO: 1003 - protein, 29 aa, Thermococcus kodakaraensis KOD1
  misc_feature (414542)..(414542): n is a or c or g or t.
  misc_feature (786890)..(786890): n is a or c or g or t.
  misc_feature (786907)..(786907): n is a or c or g or t.
  misc_feature (786944)..(786946): n is a or c or g or t.
  misc_feature (839139)..(839139): n is a or c or g or t.
  misc_feature (1128488)..(1128488): n is a or c or g or t.
  misc_feature (1128499)..(1128499): n is a or c or g or t.
  misc_feature (1128505)..(1128506): n is a or c or g or t.
  misc_feature (1128517)..(1128518): n is a or c or g or t.
  misc_feature (1128539)..(1128540): n is a or c or g or t.
  misc_feature (1561400)..(1561400): n is a or c or g or t.
  misc_feature (1561477)..(1561477): n is a or c or g or t.
  misc_feature (1561545)..(1561545): n is a or c or g or t.
  misc_feature (1767941)..(1767941): n is a or c or g or t.
VKTRPALVLSSESFNRKSNSIIVAQITPT

SEQ ID NO: 1004 - protein, 386 aa, Thermococcus kodakaraensis KOD1
  misc_feature (414542)..(414542): n is a or c or g or t.
  misc_feature (786890)..(786890): n is a or c or g or t.
  misc_feature (786907)..(786907): n is a or c or g or t.
  misc_feature (786944)..(786946): n is a or c or g or t.
  misc_feature (839139)..(839139): n is a or c or g or t.
  misc_feature (1128488)..(1128488): n is a or c or g or t.
  misc_feature (1128499)..(1128499): n is a or c or g or t.
  misc_feature (1128505)..(1128506): n is a or c or g or t.
  misc_feature (1128517)..(1128518): n is a or c or g or t.
  misc_feature (1128539)..(1128540): n is a or c or g or t.
  misc_feature (1561400)..(1561400): n is a or c or g or t.
  misc_feature (1561477)..(1561477): n is a or c or g or t.
  misc_feature (1561545)..(1561545): n is a or c or g or t.
  misc_feature (1767941)..(1767941): n is a or c or g or t.
MVSTLAVILAGIAVFWMVLYALFGKKEIDPETGEPIEKEEGLSVDMFIAMWRTKRLLGFIDRVSRINPRFWKVYADVGIALGYMGMVYVFYALAKTAAQTLQTKGQQAGVQLVIPGVTIPLWYGLIGLVVVMVVHELSHGIVARADKLPLKSVGLVLLAVIPGAFVEPDEEELAKAPLRSRLRVYGAGSMANITTAIITALIITYAINPLLVPAGVEVKGIIPGSPAEKVLQKGDVIIGINGQEIKTMEDFMELMDKTKPGETLELEVLRNGEKISVELTLAEHPDRPGKGFIGIQPAQHVESKVGSAKVVLPIFFALYWIYLLNVGIGLMNLFPLVPLDGGRMLDDVLKEYLPEKIARPVRYTTIGVGLLLLALNLWPALLNLAG

SEQ ID NO: 1005 - protein, 374 aa, Thermococcus kodakaraensis KOD1
  misc_feature (414542)..(414542): n is a or c or g or t.
  misc_feature (786890)..(786890): n is a or c or g or t.
  misc_feature (786907)..(786907): n is a or c or g or t.
  misc_feature (786944)..(786946): n is a or c or g or t.
  misc_feature (839139)..(839139): n is a or c or g or t.
  misc_feature (1128488)..(1128488): n is a or c or g or t.
  misc_feature (1128499)..(1128499): n is a or c or g or t.
  misc_feature (1128505)..(1128506): n is a or c or g or t.
  misc_feature (1128517)..(1128518): n is a or c or g or t.
  misc_feature (1128539)..(1128540): n is a or c or g or t.
  misc_feature (1561400)..(1561400): n is a or c or g or t.
  misc_feature (1561477)..(1561477): n is a or c or g or t.
  misc_feature (1561545)..(1561545): n is a or c or g or t.
  misc_feature (1767941)..(1767941): n is a or c or g or t.
MGFLFTFSSESLAVHGGEEVRMFSMATTTYPISNICINSFKSIQESRPGEEMKCSKCGKTAVYHARYTGRYYCKKHFNEMVEKKFKETVKKYRLIEKGERIAVGVSGGKDSVVLMHLLAKLREKFPFELVAITIDEGIAGYRPPSVEIAKRNAKKLGIEHRIYSFKEYIGFTLDETVEIMGSFEKGERVGACSYCGVWRRWLLNYAAMDVGADKLAVGHNLDDEVQMFLMNILRGDIARLGRTGPYYEEIHPELVPRIKPLREIPEKEIVLYAVLNNIEVDLSECPYAVEAFRAEIRDWINEMEEKHPGTKYQILRSYDKLFPLIAKTYTKKTSELNRCKICGQPTTGEICKACQFRLQVEKKAREKGLTFRVE

SEQ ID NO: 1006 - protein, 424 aa, Thermococcus kodakaraensis KOD1
  misc_feature (414542)..(414542): n is a or c or g or t.
  misc_feature (786890)..(786890): n is a or c or g or t.
  misc_feature (786907)..(786907): n is a or c or g or t.
  misc_feature (786944)..(786946): n is a or c or g or t.
  misc_feature (839139)..(839139): n is a or c or g or t.
  misc_feature (1128488)..(1128488): n is a or c or g or t.
  misc_feature (1128499)..(1128499): n is a or c or g or t.
  misc_feature (1128505)..(1128506): n is a or c or g or t.
  misc_feature (1128517)..(1128518): n is a or c or g or t.
  misc_feature (1128539)..(1128540): n is a or c or g or t.
  misc_feature (1561400)..(1561400): n is a or c or g or t.
  misc_feature (1561477)..(1561477): n is a or c or g or t.
  misc_feature (1561545)..(1561545): n is a or c or g or t.
  misc_feature (1767941)..(1767941): n is a or c or g or t.
MKESLARVLTEWQETWTPELIERDFDFSLIPEKPRKVVTFAGCRRTGKTYLMFQLINELSKKVPKERIFYINFEDERLEKNISTLTGLIPTIEELFGTSAELYLFLDEIQNVEGWDSWVRRVHDSGKAKLFLSGSSSKLSSREIPTSLRGRALTFEVFPLSFREFLRFKGFEVPSRVEFSSKKPRLLNLLREYVTYGGFPEVVLADDPRVKRLIVTDYFNTIIALDVVERYSLRNPEELRAFLRLALNSEYLSLSKMERTLKSLGYRISRLTLANYLRYLSESYFLFPVEVLSPKVRLRIGHPKKVYFVDNSFLTFLSVKFSENFGRLMENTVFLELRRKGEEINYLLNENWEIDFALPEKETLIQVSYDLSDPETLGRELKAVKAARRETGWKKAYVINWDIEKEVDGIKLIPLWRFLLEEDY

SEQ ID NO: 1007 - protein, 108 aa, Thermococcus kodakaraensis KOD1
  misc_feature (414542)..(414542): n is a or c or g or t.
  misc_feature (786890)..(786890): n is a or c or g or t.
  misc_feature (786907)..(786907): n is a or c or g or t.
  misc_feature (786944)..(786946): n is a or c or g or t.
  misc_feature (839139)..(839139): n is a or c or g or t.
  misc_feature (1128488)..(1128488): n is a or c or g or t.
  misc_feature (1128499)..(1128499): n is a or c or g or t.
  misc_feature (1128505)..(1128506): n is a or c or g or t.
  misc_feature (1128517)..(1128518): n is a or c or g or t.
  misc_feature (1128539)..(1128540): n is a or c or g or t.
  misc_feature (1561400)..(1561400): n is a or c or g or t.
  misc_feature (1561477)..(1561477): n is a or c or g or t.
  misc_feature (1561545)..(1561545): n is a or c or g or t.
  misc_feature (1767941)..(1767941): n is a or c or g or t.
MKLRIVFDKEYDIMNGTYKVKVRELEFDEELQEILKGITPTVRIGEEDLPISELKGRVFELPSKDAAERLMGEIRGALVEALSGIIARFREAQSFNGSVSYEIDFNEL

SEQ ID NO: 1008 - protein, 373 aa, Thermococcus kodakaraensis KOD1
  misc_feature (414542)..(414542): n is a or c or g or t.
  misc_feature (786890)..(786890): n is a or c or g or t.
  misc_feature (786907)..(786907): n is a or c or g or t.
  misc_feature (786944)..(786946): n is a or c or g or t.
  misc_feature (839139)..(839139): n is a or c or g or t.
  misc_feature (1128488)..(1128488): n is a or c or g or t.
  misc_feature (1128499)..(1128499): n is a or c or g or t.
  misc_feature (1128505)..(1128506): n is a or c or g or t.
  misc_feature (1128517)..(1128518): n is a or c or g or t.
  misc_feature (1128539)..(1128540): n is a or c or g or t.
  misc_feature (1561400)..(1561400): n is a or c or g or t.
  misc_feature (1561477)..(1561477): n is a or c or g or t.
  misc_feature (1561545)..(1561545): n is a or c or g or t.
  misc_feature (1767941)..(1767941): n is a or c or g or t.
VKMKYDVLIIGGGPVGNYLASLLARDFNVAVVERKTSFGGKACTGIIGAENYERLGLPEKAVLNQLRGAVFYSRIQSFEIQRKSPQAYVVDRKTLEKELAKSAVKKGADYFMGTTFQGFKNGKAVLSHMNERLEVEASFYVGADGVASTVAKNIGASTKAEFLTGYEIEVVGEFERTDFTEVWVNKEITPKFFAWVTPVEDDLARVGTFGTLDELNRFLRVRMLKPTSSIEFKAGSVGLGWRKPWIRENVALIGDAALQIKPTTAGGIAYGMLCAHALRKALIEGAPERYWNYCSWVRKQISFGLKFRKLFLGLDQEAIEKIFEVLKSEEAREVIESQADFDDHWRTAKAILRKPSLLARLIKVSPSIIRALL

SEQ ID NO: 1009 - protein, 117 aa, Thermococcus kodakaraensis KOD1
  misc_feature (414542)..(414542): n is a or c or g or t.
  misc_feature (786890)..(786890): n is a or c or g or t.
  misc_feature (786907)..(786907): n is a or c or g or t.
  misc_feature (786944)..(786946): n is a or c or g or t.
  misc_feature (839139)..(839139): n is a or c or g or t.
  misc_feature (1128488)..(1128488): n is a or c or g or t.
  misc_feature (1128499)..(1128499): n is a or c or g or t.
  misc_feature (1128505)..(1128506): n is a or c or g or t.
  misc_feature (1128517)..(1128518): n is a or c or g or t.
  misc_feature (1128539)..(1128540): n is a or c or g or t.
  misc_feature (1561400)..(1561400): n is a or c or g or t.
  misc_feature (1561477)..(1561477): n is a or c or g or t.
  misc_feature (1561545)..(1561545): n is a or c or g or t.
  misc_feature (1767941)..(1767941): n is a or c or g or t.
MARWKMGLQEEYLRAIAEGKKKIEGRLYDEKRQKIKPGDEIVFENKLVCVVKDVRVYSSFREMLEKEGLENVLPGVKSIEEGVKVYRKFYSEEKEKKYGVAAIEVEPVAWISEENNP

SEQ ID NO: 1010 - protein, 399 aa, Thermococcus kodakaraensis KOD1
  misc_feature (414542)..(414542): n is a or c or g or t.
  misc_feature (786890)..(786890): n is a or c or g or t.
  misc_feature (786907)..(786907): n is a or c or g or t.
  misc_feature (786944)..(786946): n is a or c or g or t.
  misc_feature (839139)..(839139): n is a or c or g or t.
  misc_feature (1128488)..(1128488): n is a or c or g or t.
  misc_feature (1128499)..(1128499): n is a or c or g or t.
  misc_feature (1128505)..(1128506): n is a or c or g or t.
  misc_feature (1128517)..(1128518): n is a or c or g or t.
  misc_feature (1128539)..(1128540): n is a or c or g or t.
  misc_feature (1561400)..(1561400): n is a or c or g or t.
  misc_feature (1561477)..(1561477): n is a or c or g or t.
  misc_feature (1561545)..(1561545): n is a or c or g or t.
  misc_feature (1767941)..(1767941): n is a or c or g or t.
VITDDYPESDSEWFYWELSKAAGTGLAILALLEAGENPNSKEIEEAAQFLLKNESKNYWTSTVYLYWEKTGLHKVNESPSIVATAYAVAALSRLGYNVSREWKWLRERLTRERLITPYLDNFFTGFLFPMPYRDMRAPYESIVLPLLFLREENMTLPNETLEFIASLFEETQYAGNATLRLSFKRVTNYTVKELEYSINGCEVREEWKGSGEKASIDLNPGPSKNSRVFLIISGEPLLLNESGFFKGNQRLYPHLPEDYIEFVGDFYAERSVLQFEDGRNYAIIEVPALDGSWNHDVYSTAMALMWLYLAGKKDNHTEEVLRFLELASSKNTMAFDGSAYALISLSLYSGEWENEQATVEKEQSSQHQLPLKLLAVFILGLLIGALVGVKIGMTKKKRS

SEQ ID NO: 1011 - protein, 164 aa, Thermococcus kodakaraensis KOD1
  misc_feature (414542)..(414542): n is a or c or g or t.
  misc_feature (786890)..(786890): n is a or c or g or t.
  misc_feature (786907)..(786907): n is a or c or g or t.
  misc_feature (786944)..(786946): n is a or c or g or t.
  misc_feature (839139)..(839139): n is a or c or g or t.
  misc_feature (1128488)..(1128488): n is a or c or g or t.
  misc_feature (1128499)..(1128499): n is a or c or g or t.
  misc_feature (1128505)..(1128506): n is a or c or g or t.
  misc_feature (1128517)..(1128518): n is a or c or g or t.
  misc_feature (1128539)..(1128540): n is a or c or g or t.
  misc_feature (1561400)..(1561400): n is a or c or g or t.
  misc_feature (1561477)..(1561477): n is a or c or g or t.
  misc_feature (1561545)..(1561545): n is a or c or g or t.
  misc_feature (1767941)..(1767941): n is a or c or g or t.
MEKLPKLYVETTQEECVKDGKTLAECVVIMGNVEVWLKENEELPDFIDPSRAKFLKREVYDRFYLYVDRTEQKMTADVILVLPDGRTRIYLKKGDELMILPVEGFTKTLIANVGNRVRTGDAFAAVTTRKGEVHYLKPPKTGTVVFIDEITNRPHYLYYILPEE

SEQ ID NO: 1012 - protein, 159 aa, Thermococcus kodakaraensis KOD1
  misc_feature (414542)..(414542): n is a or c or g or t.
  misc_feature (786890)..(786890): n is a or c or g or t.
  misc_feature (786907)..(786907): n is a or c or g or t.
  misc_feature (786944)..(786946): n is a or c or g or t.
  misc_feature (839139)..(839139): n is a or c or g or t.
  misc_feature (1128488)..(1128488): n is a or c or g or t.
  misc_feature (1128499)..(1128499): n is a or c or g or t.
  misc_feature (1128505)..(1128506): n is a or c or g or t.
  misc_feature (1128517)..(1128518): n is a or c or g or t.
  misc_feature (1128539)..(1128540): n is a or c or g or t.
  misc_feature (1561400)..(1561400): n is a or c or g or t.
  misc_feature (1561477)..(1561477): n is a or c or g or t.
  misc_feature (1561545)..(1561545): n is a or c or g or t.
  misc_feature (1767941)..(1767941): n is a or c or g or t.
MKVEAGDYVLFHYVGRFEDGEVFDTSYEEIARENGILVEEREYGPMWVRIGVGEIIPGLDEAIIGMEAGEKKTVTVPPEKAYGMPNPELVISVPREEFTKAGLEPQEGLYVMTDSGIAKIVSVGESEVSLDFNHPLAGKTLVFEVEVIEVKKAEEDSEA

SEQ ID NO: 1013 - protein, 113 aa, Thermococcus kodakaraensis KOD1
  misc_feature (414542)..(414542): n is a or c or g or t.
  misc_feature (786890)..(786890): n is a or c or g or t.
  misc_feature (786907)..(786907): n is a or c or g or t.
  misc_feature (786944)..(786946): n is a or c or g or t.
  misc_feature (839139)..(839139): n is a or c or g or t.
  misc_feature (1128488)..(1128488): n is a or c or g or t.
  misc_feature (1128499)..(1128499): n is a or c or g or t.
  misc_feature (1128505)..(1128506): n is a or c or g or t.
  misc_feature (1128517)..(1128518): n is a or c or g or t.
  misc_feature (1128539)..(1128540): n is a or c or g or t.
  misc_feature (1561400)..(1561400): n is a or c or g or t.
  misc_feature (1561477)..(1561477): n is a or c or g or t.
  misc_feature (1561545)..(1561545): n is a or c or g or t.
  misc_feature (1767941)..(1767941): n is a or c or g or t.
VVEMEKLEIKVVEIRGKCPVFKLGDRIVIEGPRINLEETDAVCTHAFASLLPYIVALRKGIKPNEIGLGRGEKAYVQCLDPGPPYTDGGTVIFEITVVRDEGEKGMESRERGS

SEQ ID NO: 1014 - protein, 115 aa, Thermococcus kodakaraensis KOD1
  misc_feature (414542)..(414542): n is a or c or g or t.
  misc_feature (786890)..(786890): n is a or c or g or t.
  misc_feature (786907)..(786907): n is a or c or g or t.
  misc_feature (786944)..(786946): n is a or c or g or t.
  misc_feature (839139)..(839139): n is a or c or g or t.
  misc_feature (1128488)..(1128488): n is a or c or g or t.
  misc_feature (1128499)..(1128499): n is a or c or g or t.
  misc_feature (1128505)..(1128506): n is a or c or g or t.
  misc_feature (1128517)..(1128518): n is a or c or g or t.
  misc_feature (1128539)..(1128540): n is a or c or g or t.
  misc_feature (1561400)..(1561400): n is a or c or g or t.
  misc_feature (1561477)..(1561477): n is a or c or g or t.
  misc_feature (1561545)..(1561545): n is a or c or g or t.
  misc_feature (1767941)..(1767941): n is a or c or g or t.
MMRHLSCIEVLLNLHGSEEQRDLVMEAMEIFLPWVTRGVEALVSKREIPVEELPFIEFEFNELWDSYVRTETPYVMGTLVHLEGFFNHTKNLLRSAVYYLLGSKGLEKTPILYIV

SEQ ID NO: 1015 - protein, 197 aa, Thermococcus kodakaraensis KOD1
  misc_feature (414542)..(414542): n is a or c or g or t.
  misc_feature (786890)..(786890): n is a or c or g or t.
  misc_feature (786907)..(786907): n is a or c or g or t.
  misc_feature (786944)..(786946): n is a or c or g or t.
  misc_feature (839139)..(839139): n is a or c or g or t.
  misc_feature (1128488)..(1128488): n is a or c or g or t.
  misc_feature (1128499)..(1128499): n is a or c or g or t.
  misc_feature (1128505)..(1128506): n is a or c or g or t.
  misc_feature (1128517)..(1128518): n is a or c or g or t.
  misc_feature (1128539)..(1128540): n is a or c or g or t.
  misc_feature (1561400)..(1561400): n is a or c or g or t.
  misc_feature (1561477)..(1561477): n is a or c or g or t.
  misc_feature (1561545)..(1561545): n is a or c or g or t.
  misc_feature (1767941)..(1767941): n is a or c or g or t.
MRKLLDIGEEQLKKLINEMGNDALNSLENARKSLKGEFNSTEEISSKLHLLRNEVLDIATELLVRYSPVASDLRFIQSSIDVSYDLYRISRYAMEIERTAKIVGAEESELIREGFELTVEAVKTAIEAFENLDEVSAGKLLEIDNRIDDLYIQSLENLKSSASSPVEALIMRHLERISDHAKEIGARVVYVKEGKRV

SEQ ID NO: 1016 - protein, 280 aa, Thermococcus kodakaraensis KOD1
  misc_feature (414542)..(414542): n is a or c or g or t.
  misc_feature (786890)..(786890): n is a or c or g or t.
  misc_feature (786907)..(786907): n is a or c or g or t.
  misc_feature (786944)..(786946): n is a or c or g or t.
  misc_feature (839139)..(839139): n is a or c or g or t.
  misc_feature (1128488)..(1128488): n is a or c or g or t.
  misc_feature (1128499)..(1128499): n is a or c or g or t.
  misc_feature (1128505)..(1128506): n is a or c or g or t.
  misc_feature (1128517)..(1128518): n is a or c or g or t.
  misc_feature (1128539)..(1128540): n is a or c or g or t.
  misc_feature (1561400)..(1561400): n is a or c or g or t.
  misc_feature (1561477)..(1561477): n is a or c or g or t.
  misc_feature (1561545)..(1561545): n is a or c or g or t.
  misc_feature (1767941)..(1767941): n is a or c or g or t.
MKTETEGTLLAFLVLLALGLEPAVIKANPSNPISFIALSVFFAALILWTVLLTTGRFKEILEKPAELKRTFLTGLFATAIAYSLYSLGTSMSTAVNSAIITRLEVFYSLAIGWLLLRERVSGRALAASLLLFGGVFLVLTQGKGITPRKGDLLLLITPLFWQLGHAVAKFTDYSPLTIATLRNTFGFLLLLPFALMSGIQLTGLAVAEGVIIAATQALWYASISRINLSKATAILTPAPAVTIAVAIAFLGEKVGVYHLLGFLLVTIGTLLIAFEESGTR

SEQ ID NO: 1017 - protein, 258 aa, Thermococcus kodakaraensis KOD1
  misc_feature (414542)..(414542): n is a or c or g or t.
  misc_feature (786890)..(786890): n is a or c or g or t.
  misc_feature (786907)..(786907): n is a or c or g or t.
  misc_feature (786944)..(786946): n is a or c or g or t.
  misc_feature (839139)..(839139): n is a or c or g or t.
  misc_feature (1128488)..(1128488): n is a or c or g or t.
  misc_feature (1128499)..(1128499): n is a or c or g or t.
  misc_feature (1128505)..(1128506): n is a or c or g or t.
  misc_feature (1128517)..(1128518): n is a or c or g or t.
  misc_feature (1128539)..(1128540): n is a or c or g or t.
  misc_feature (1561400)..(1561400): n is a or c or g or t.
  misc_feature (1561477)..(1561477): n is a or c or g or t.
  misc_feature (1561545)..(1561545): n is a or c or g or t.
  misc_feature (1767941)..(1767941): n is a or c or g or t.
MKVIILGSGSYSGTPKPLCTCENCSRARINPALRRTRFSLYIEGGILVDPSPDLHYHLERLNRKVEKVFITHAHFDHIAGFPELQVFKRIDVYSHRQAIDMAKHLSAIFLGGAAPENRDWGYHELEFGKWYEIDGMKVHHFRTTHRSIENAGGFLFEIKGKRIAVTGDTGPEILKDKKTLKLLEGADLLIAEMTHRESIPGTHLGVEDAIKLAEITGASYAVFAHISHSNYTHEVLEKRVRESGIKGEVARDFTWIEL

SEQ ID NO: 1018 - protein, 490 aa, Thermococcus kodakaraensis KOD1
  misc_feature (414542)..(414542): n is a or c or g or t.
  misc_feature (786890)..(786890): n is a or c or g or t.
  misc_feature (786907)..(786907): n is a or c or g or t.
  misc_feature (786944)..(786946): n is a or c or g or t.
  misc_feature (839139)..(839139): n is a or c or g or t.
  misc_feature (1128488)..(1128488): n is a or c or g or t.
  misc_feature (1128499)..(1128499): n is a or c or g or t.
  misc_feature (1128505)..(1128506): n is a or c or g or t.
  misc_feature (1128517)..(1128518): n is a or c or g or t.
  misc_feature (1128539)..(1128540): n is a or c or g or t.
  misc_feature (1561400)..(1561400): n is a or c or g or t.
  misc_feature (1561477)..(1561477): n is a or c or g or t.
  misc_feature (1561545)..(1561545): n is a or c or g or t.
  misc_feature (1767941)..(1767941): n is a or c or g or t.
MFSNVLKWQNLNISPAVIHRDTAEHRGGSMKKFVALLITMFFVVSMAAVAQPASAAKYSELEEGGVIMQAFYWDVPAGGIWWDTIRSKIPEWYEAGISAIWIPPASKGMGGAYSMGYDPYDFFDLGEYNQKGTVETRFGSKQELINMINTAHAYGIKVIADIVINHRAGGDLEWNPFVGDYTWTDFSKVASGKYTANYLDFHPNEVKCCDEGTFGGFPDIAHEKEWDQHWLWASDESYAAYLRSIGVDAWRFDYVKGYGAWVVKDWLNWWGGWAVGEYWDTNVDALLNWAYSSGAKVFDFPLYYKMDEAFDNTNIPALVDALQNGGTVVSRDPFKAVTFVANHDTDIIWNKYPAYAFILTYEGQPVIFYRDYEEWLNKDKLNNLIWIHDHLAGGSTSIVYYDSDELIFVRNGDSKRPGLITYINLGSSKVGRWVYVPKFAGACIHEYTGNLGGWVDKYVESSGWVYLEAPAYDPASGQYGYTVWSYCGVG

SEQ ID NO: 1019 - protein, 28 aa, Thermococcus kodakaraensis KOD1
  misc_feature (414542)..(414542): n is a or c or g or t.
  misc_feature (786890)..(786890): n is a or c or g or t.
  misc_feature (786907)..(786907): n is a or c or g or t.
  misc_feature (786944)..(786946): n is a or c or g or t.
  misc_feature (839139)..(839139): n is a or c or g or t.
  misc_feature (1128488)..(1128488): n is a or c or g or t.
  misc_feature (1128499)..(1128499): n is a or c or g or t.
  misc_feature (1128505)..(1128506): n is a or c or g or t.
  misc_feature (1128517)..(1128518): n is a or c or g or t.
  misc_feature (1128539)..(1128540): n is a or c or g or t.
  misc_feature (1561400)..(1561400): n is a or c or g or t.
  misc_feature (1561477)..(1561477): n is a or c or g or t.
  misc_feature (1561545)..(1561545): n is a or c or g or t.
  misc_feature (1767941)..(1767941): n is a or c or g or t.
MICLRILHIVLPPYNQPKPLKNHSVLPS

SEQ ID NO: 1020 - protein, 281 aa, Thermococcus kodakaraensis KOD1
  misc_feature (414542)..(414542): n is a or c or g or t.
  misc_feature (786890)..(786890): n is a or c or g or t.
  misc_feature (786907)..(786907): n is a or c or g or t.
  misc_feature (786944)..(786946): n is a or c or g or t.
  misc_feature (839139)..(839139): n is a or c or g or t.
  misc_feature (1128488)..(1128488): n is a or c or g or t.
  misc_feature (1128499)..(1128499): n is a or c or g or t.
  misc_feature (1128505)..(1128506): n is a or c or g or t.
  misc_feature (1128517)..(1128518): n is a or c or g or t.
  misc_feature (1128539)..(1128540): n is a or c or g or t.
  misc_feature (1561400)..(1561400): n is a or c or g or t.
  misc_feature (1561477)..(1561477): n is a or c or g or t.
  misc_feature (1561545)..(1561545): n is a or c or g or t.
  misc_feature (1767941)..(1767941): n is a or c or g or t.
MVITVLIGRLDNIRVAFPVETKLRKFNNLWKLKFSGGERMENGKPVKLVLPEVKNPILIEGYPGIGLVGHIAANFLAKELKMDMIGYVESPFLPPMALILEGKPNPPLRFYGKDNIIVAVADIYVPPTLVNEIAKELVNYLSEMKAEKVISMGGIGIGFFKEQLEVWGVGSRDELNKELEEKGVKILQYGSIMGMSGKLLWEASRKGLNAYALMGETFGDRPDPRAAANVLEVVKKLTSLDFSTEPLLQEARMIEEQLRKMHEQMEQARQRAEKQYESLYL

SEQ ID NO: 1021 - protein, 420 aa, Thermococcus kodakaraensis KOD1
  misc_feature (414542)..(414542): n is a or c or g or t.
  misc_feature (786890)..(786890): n is a or c or g or t.
  misc_feature (786907)..(786907): n is a or c or g or t.
  misc_feature (786944)..(786946): n is a or c or g or t.
  misc_feature (839139)..(839139): n is a or c or g or t.
  misc_feature (1128488)..(1128488): n is a or c or g or t.
  misc_feature (1128499)..(1128499): n is a or c or g or t.
  misc_feature (1128505)..(1128506): n is a or c or g or t.
  misc_feature (1128517)..(1128518): n is a or c or g or t.
  misc_feature (1128539)..(1128540): n is a or c or g or t.
  misc_feature (1561400)..(1561400): n is a or c or g or t.
  misc_feature (1561477)..(1561477): n is a or c or g or t.
  misc_feature (1561545)..(1561545): n is a or c or g or t.
  misc_feature (1767941)..(1767941): n is a or c or g or t.
VESGTMDDDYLSSIFEKYLHARKIFKNKEVLRHSYTPKELPHRHKQIDDLAHILVPVLRGETPSNVFVYGKTGTGKTVTVKFVTEELKKISQKYNIPVEVIYINCEIIDTHYRVLARIVNHFKEESGIEVPLVGWPTDEVYAKLKEVIDAKERFVIIVLDEIDKLIKKSGDDILYSLTRINSELSKAKVSIIGISNDLKFKEYLDARVLSSLSEEEVVFPPYDANQLRDILMQRAKEAFYEGVLDDAVVPLCAALAAREHGDARRALDLLRVAGEIAEREGASKVTERHVWKAQEKIEQDTMEEVIKTLPLHSKVLLYAIVMLDENGELPANTGEVYSIYKMLCDSLDVEPLTQRRVSDLINELDMLGIINAKVVSKGRYGRTKEIRLNVTPYMVKNIYRHDEQVRPLLTLSLSRQRRLF

SEQ ID NO: 1022 - protein, 180 aa, Thermococcus kodakaraensis KOD1
  misc_feature (414542)..(414542): n is a or c or g or t.
  misc_feature (786890)..(786890): n is a or c or g or t.
  misc_feature (786907)..(786907): n is a or c or g or t.
  misc_feature (786944)..(786946): n is a or c or g or t.
  misc_feature (839139)..(839139): n is a or c or g or t.
  misc_feature (1128488)..(1128488): n is a or c or g or t.
  misc_feature (1128499)..(1128499): n is a or c or g or t.
  misc_feature (1128505)..(1128506): n is a or c or g or t.
  misc_feature (1128517)..(1128518): n is a or c or g or t.
  misc_feature (1128539)..(1128540): n is a or c or g or t.
  misc_feature (1561400)..(1561400): n is a or c or g or t.
  misc_feature (1561477)..(1561477): n is a or c or g or t.
  misc_feature (1561545)..(1561545): n is a or c or g or t.
  misc_feature (1767941)..(1767941): n is a or c or g or t.
MGNPFAGEPEYLELNAETFEPKIVFDRKNQRIPEKFYFRELILQSLVRKKLGVTVLRDVLEIFEVDNSPEEFEVLGEKALPEGYVDIFIKLKHPSALNRYILAEVKTGKAQKKDVEQLRKYLSEYGNEAVGGLLIAKDFSRSAFEDDRIIPVRYYFKELDPFGEYSYDELLSMLKLEIVV

SEQ ID NO: 1023 - protein, 212 aa, Thermococcus kodakaraensis KOD1
  misc_feature (414542)..(414542): n is a or c or g or t.
  misc_feature (786890)..(786890): n is a or c or g or t.
  misc_feature (786907)..(786907): n is a or c or g or t.
  misc_feature (786944)..(786946): n is a or c or g or t.
  misc_feature (839139)..(839139): n is a or c or g or t.
  misc_feature (1128488)..(1128488): n is a or c or g or t.
  misc_feature (1128499)..(1128499): n is a or c or g or t.
  misc_feature (1128505)..(1128506): n is a or c or g or t.
  misc_feature (1128517)..(1128518): n is a or c or g or t.
  misc_feature (1128539)..(1128540): n is a or c or g or t.
  misc_feature (1561400)..(1561400): n is a or c or g or t.
  misc_feature (1561477)..(1561477): n is a or c or g or t.
  misc_feature (1561545)..(1561545): n is a or c or g or t.
  misc_feature (1767941)..(1767941): n is a or c or g or t.
MKAKREALQSLFTAMRDGKVDGDIIDLLLLINSIKGIYTTSSCSGRIGIIEEPALGAKPLSRWLIKVHRPIEFEEAKEALKNAKEGIIFLKSQPPIFHVVAEDLEKARKLHELGLASGFKYTTFKVISKRYLVEINATEYLTAPLGRDGRVLVDDGYLRFAVEIGNEMLRRSKGRLPRLEENFRRLREELGTDELFYELVEEYKIRENWELP

SEQ ID NO: 1024 - protein, 352 aa, Thermococcus kodakaraensis KOD1
  misc_feature (414542)..(414542): n is a or c or g or t.
  misc_feature (786890)..(786890): n is a or c or g or t.
  misc_feature (786907)..(786907): n is a or c or g or t.
  misc_feature (786944)..(786946): n is a or c or g or t.
  misc_feature (839139)..(839139): n is a or c or g or t.
  misc_feature (1128488)..(1128488): n is a or c or g or t.
  misc_feature (1128499)..(1128499): n is a or c or g or t.
  misc_feature (1128505)..(1128506): n is a or c or g or t.
  misc_feature (1128517)..(1128518): n is a or c or g or t.
  misc_feature (1128539)..(1128540): n is a or c or g or t.
  misc_feature (1561400)..(1561400): n is a or c or g or t.
  misc_feature (1561477)..(1561477): n is a or c or g or t.
  misc_feature (1561545)..(1561545): n is a or c or g or t.
  misc_feature (1767941)..(1767941): n is a or c or g or t.
VKISVVIPTYNERENLPELVERLSRALQGYEYEIVIVDDDSPDKTWGLAEELARKYPIKVIRRTKEKGLSSAVIRGFKEASGDVFVVMDADLQHPPEKVPELIEAIKRGADIAIASRYVPGGAVKNWYWYRKLISKGAIMIGRVALPRIRNVKDPVSGFFALRREVVEGVELNPVGFKILMEILVKGHYNNVREVPFTFGLRKAGESKLGSRTIVNYLRHIYRLMRWEGEIDRLVKFSLVGLSGVLVNEGFLWAFVEFFGWDKVFSNILATELAILNNFTWNDIWTFRDLKNKPLLKRLVSFHVAALSGALVQWAIYVILMAVGVHYLLANLIGIVVSFIVRFAVNRHVTWG

SEQ ID NO: 1025 - protein, 252 aa, Thermococcus kodakaraensis KOD1
  misc_feature (414542)..(414542): n is a or c or g or t.
  misc_feature (786890)..(786890): n is a or c or g or t.
  misc_feature (786907)..(786907): n is a or c or g or t.
  misc_feature (786944)..(786946): n is a or c or g or t.
  misc_feature (839139)..(839139): n is a or c or g or t.
  misc_feature (1128488)..(1128488): n is a or c or g or t.
  misc_feature (1128499)..(1128499): n is a or c or g or t.
  misc_feature (1128505)..(1128506): n is a or c or g or t.
  misc_feature (1128517)..(1128518): n is a or c or g or t.
  misc_feature (1128539)..(1128540): n is a or c or g or t.
  misc_feature (1561400)..(1561400): n is a or c or g or t.
  misc_feature (1561477)..(1561477): n is a or c or g or t.
  misc_feature (1561545)..(1561545): n is a or c or g or t.
  misc_feature (1767941)..(1767941): n is a or c or g or t.
VGLNREQWKISRGERMYVGELLKNLDRIPSGVPGLDELIGGGFLPGRVYVVTGPPGSGKTTLGMQFLAEGAKNDEKGLFIALFETPDIIVRDMLRYNLGILEYVNSKKIVFYDLGEILLSANRELSWDELFKLLLEIIKRENAKRVVIDSFSLFESFVTNPEGKKKELGRFVRKLRTMDITTLLLSEMLSSEKYTDEYYLADGVIVLHHFMRNYQMVRAIQILKMRGVPHDSNLKRMRFTNEGITVYKEAPI

SEQ ID NO: 1026 - protein, 193 aa, Thermococcus kodakaraensis KOD1
  misc_feature (414542)..(414542): n is a or c or g or t.
  misc_feature (786890)..(786890): n is a or c or g or t.
  misc_feature (786907)..(786907): n is a or c or g or t.
  misc_feature (786944)..(786946): n is a or c or g or t.
  misc_feature (839139)..(839139): n is a or c or g or t.
  misc_feature (1128488)..(1128488): n is a or c or g or t.
  misc_feature (1128499)..(1128499): n is a or c or g or t.
  misc_feature (1128505)..(1128506): n is a or c or g or t.
  misc_feature (1128517)..(1128518): n is a or c or g or t.
  misc_feature (1128539)..(1128540): n is a or c or g or t.
  misc_feature (1561400)..(1561400): n is a or c or g or t.
  misc_feature (1561477)..(1561477): n is a or c or g or t.
  misc_feature (1561545)..(1561545): n is a or c or g or t.
  misc_feature (1767941)..(1767941): n is a or c or g or t.
MIGSILVGSSYLMLIGLVLFLLSRGKGIEPERKRLRYVFGSVELSDVVEVARLSEMERGRILTMAKAFGTTPVALTAFLIAFVAKGAPYTELLAVYAYWLIIYIEIFIFPLKELKKKKLSLTILPILLSLPLLAFGSLKTLPITLLTWLFGSFLLDELLGRDLVVVRTEKGSYLVSCANGELIVGLIGYGGIM

SEQ ID NO: 1027 - protein, 344 aa, Thermococcus kodakaraensis KOD1
  misc_feature (414542)..(414542): n is a or c or g or t.
  misc_feature (786890)..(786890): n is a or c or g or t.
  misc_feature (786907)..(786907): n is a or c or g or t.
  misc_feature (786944)..(786946): n is a or c or g or t.
  misc_feature (839139)..(839139): n is a or c or g or t.
  misc_feature (1128488)..(1128488): n is a or c or g or t.
  misc_feature (1128499)..(1128499): n is a or c or g or t.
  misc_feature (1128505)..(1128506): n is a or c or g or t.
  misc_feature (1128517)..(1128518): n is a or c or g or t.
  misc_feature (1128539)..(1128540): n is a or c or g or t.
  misc_feature (1561400)..(1561400): n is a or c or g or t.
  misc_feature (1561477)..(1561477): n is a or c or g or t.
  misc_feature (1561545)..(1561545): n is a or c or g or t.
  misc_feature (1767941)..(1767941): n is a or c or g or t.
VSSMHEIPFGEVLEKLRGLNAHRVLIQTPEGLKREAQELADFLEENGIEAIISGDINYGACDPADSEAKRLGCDALIHLGHSYMQLHLEVPTIFVPAFAKVDVVPALEKNLEEIRKLGKRIVLVTTAQHIHGLERAKEFLEKNGFEVLIGRGDSRVSWPGQVLGCNFSAAKVDADGVLFIGAGYFHPIGVAMAVKKPTLAINPYSGDAIWMDTEAERLVRKRWAQIAKAMDAQRFGVITSTKKGQLRLAEAKRVVKLLREYGKYARLLTMNHISYQALEGFDFDAYVVVACPRVPIDDYENWRKPVLTPREVEILLGLREDYEFDEILGAERREDEPIGISLRH

SEQ ID NO: 1028 - protein, 592 aa, Thermococcus kodakaraensis KOD1
  misc_feature (414542)..(414542): n is a or c or g or t.
  misc_feature (786890)..(786890): n is a or c or g or t.
  misc_feature (786907)..(786907): n is a or c or g or t.
  misc_feature (786944)..(786946): n is a or c or g or t.
  misc_feature (839139)..(839139): n is a or c or g or t.
  misc_feature (1128488)..(1128488): n is a or c or g or t.
  misc_feature (1128499)..(1128499): n is a or c or g or t.
  misc_feature (1128505)..(1128506): n is a or c or g or t.
  misc_feature (1128517)..(1128518): n is a or c or g or t.
  misc_feature (1128539)..(1128540): n is a or c or g or t.
  misc_feature (1561400)..(1561400): n is a or c or g or t.
  misc_feature (1561477)..(1561477): n is a or c or g or t.
  misc_feature (1561545)..(1561545): n is a or c or g or t.
  misc_feature (1767941)..(1767941): n is a or c or g or t.
VSANSKLLEGYLKSRKIKKASELVLSNEEALTLLLSFLHSKDSKMKLAAVMTLEEALKRMPDIMRLRILKRTLDDLIALALENDDRVSIYALRAIKALITGLPLDPESFVKLGHAIKDLVKARRNEVVLLEIPPILESVRITSSDPRVHDIISRLLHSKNPRLKAMGLRLLLNTSAYTGDPALLKTVFSEVRDMLTVEDIPLIDFALTLLLDVAHYPLREEIIDDVAGVLTLVKNLALKGKPGVSDKARLVAEKLEDAIYRYYKNRPEEAKQKIQELLINERFYEAIDLALAVGDTYVLNWLAEELEKMEKERLRINERVLPGPKYLSPPPEAKAQKSLKVPHISQFGRKKTGREKLTKHVEKSGQTPKMSDEETKKELEKAITSGKTSELIELAMKKPEVIFELERKLEEGDKFEKMDALWALSKLAEKLDETKAFILKPAVEPLMKVASSKNRWMRLRAVRTLAAIAPKAPYGDEIVGQFLEWYLSGDEERVVPSLEFFSYYFSKIWDEKTARVVLSRLLEYLENDGMRFDALLTLDALVGSAPVEKVSLFGPFVEKLKEIKKTASPDEQKLAIRILENIASKSKALVIH

SEQ ID NO: 1029 - protein, 124 aa, Thermococcus kodakaraensis KOD1
  misc_feature (414542)..(414542): n is a or c or g or t.
  misc_feature (786890)..(786890): n is a or c or g or t.
  misc_feature (786907)..(786907): n is a or c or g or t.
  misc_feature (786944)..(786946): n is a or c or g or t.
  misc_feature (839139)..(839139): n is a or c or g or t.
  misc_feature (1128488)..(1128488): n is a or c or g or t.
  misc_feature (1128499)..(1128499): n is a or c or g or t.
  misc_feature (1128505)..(1128506): n is a or c or g or t.
  misc_feature (1128517)..(1128518): n is a or c or g or t.
  misc_feature (1128539)..(1128540): n is a or c or g or t.
  misc_feature (1561400)..(1561400): n is a or c or g or t.
  misc_feature (1561477)..(1561477): n is a or c or g or t.
  misc_feature (1561545)..(1561545): n is a or c or g or t.
  misc_feature (1767941)..(1767941): n is a or c or g or t.
VIFDKALDLVLEILTSPIPLRMEDVIRYLYSPLKALTESAPDAIITSKAREVFSALVKSAQRYYALRPTEARESARRLRKEGLEYEAVFIEELSGQPHSPVPYGEKTLKMLTEDRSDLPDFLKG

SEQ ID NO: 1030 - protein, 450 aa, Thermococcus kodakaraensis KOD1
  misc_feature (414542)..(414542): n is a or c or g or t.
  misc_feature (786890)..(786890): n is a or c or g or t.
  misc_feature (786907)..(786907): n is a or c or g or t.
  misc_feature (786944)..(786946): n is a or c or g or t.
  misc_feature (839139)..(839139): n is a or c or g or t.
  misc_feature (1128488)..(1128488): n is a or c or g or t.
  misc_feature (1128499)..(1128499): n is a or c or g or t.
  misc_feature (1128505)..(1128506): n is a or c or g or t.
  misc_feature (1128517)..(1128518): n is a or c or g or t.
  misc_feature (1128539)..(1128540): n is a or c or g or t.
  misc_feature (1561400)..(1561400): n is a or c or g or t.
  misc_feature (1561477)..(1561477): n is a or c or g or t.
  misc_feature (1561545)..(1561545): n is a or c or g or t.
  misc_feature (1767941)..(1767941): n is a or c or g or t.
VPKLKLSDRQLYALIEALKLGEEVKPSQQAKRRAFSKYRIEGWENSKLTGIFYSIQRRLGLIDEVIEELVGVSPLILDPWLRAALRVAVEVGVFREPSERTLQHLKGVAQFLSKRTHPYVGYYYYDLLPRVVNYVPKLDTEEKRLKWEYLFPEWFIARMRALLGEEAEELLRALNETLPTSIRVNRLRTSVEEVENYLRKKGVRFERSERVNTVIRILDPFNPEWLFNKGYAIAQEEASAVASLVLAPKPGETVVDLAAAPGGKTAHMAELMENRGKIYAFDVDSARIKRMKEVLKRTGVEIAEVIKADGRNAPELLGEEIADRVLLDAPCTSDGTIAKNPELRWRLREKNIPKVVALQKELMESAWKLLKPGGRLLYSTCSMLPEENEEVVKWFLERHPGAELVPLNGPYDPGFLKGTMRAWPHRHRTIGFFYALIEKRRSESRIVRAC

SEQ ID NO: 1031 - protein, 30 aa, Thermococcus kodakaraensis KOD1
  misc_feature (414542)..(414542): n is a or c or g or t.
  misc_feature (786890)..(786890): n is a or c or g or t.
  misc_feature (786907)..(786907): n is a or c or g or t.
  misc_feature (786944)..(786946): n is a or c or g or t.
  misc_feature (839139)..(839139): n is a or c or g or t.
  misc_feature (1128488)..(1128488): n is a or c or g or t.
  misc_feature (1128499)..(1128499): n is a or c or g or t.
  misc_feature (1128505)..(1128506): n is a or c or g or t.
  misc_feature (1128517)..(1128518): n is a or c or g or t.
  misc_feature (1128539)..(1128540): n is a or c or g or t.
  misc_feature (1561400)..(1561400): n is a or c or g or t.
  misc_feature (1561477)..(1561477): n is a or c or g or t.
  misc_feature (1561545)..(1561545): n is a or c or g or t.
  misc_feature (1767941)..(1767941): n is a or c or g or t.
VRTKTVKNDNMLAIGAFGTSTEKSADRLTI

SEQ ID NO: 1032 - protein, 113 aa, Thermococcus kodakaraensis KOD1
  misc_feature (414542)..(414542): n is a or c or g or t.
  misc_feature (786890)..(786890): n is a or c or g or t.
  misc_feature (786907)..(786907): n is a or c or g or t.
  misc_feature (786944)..(786946): n is a or c or g or t.
  misc_feature (839139)..(839139): n is a or c or g or t.
  misc_feature (1128488)..(1128488): n is a or c or g or t.
  misc_feature (1128499)..(1128499): n is a or c or g or t.
  misc_feature (1128505)..(1128506): n is a or c or g or t.
  misc_feature (1128517)..(1128518): n is a or c or g or t.
  misc_feature (1128539)..(1128540): n is a or c or g or t.
  misc_feature (1561400)..(1561400): n is a or c or g or t.
  misc_feature (1561477)..(1561477): n is a or c or g or t.
  misc_feature (1561545)..(1561545): n is a or c or g or t.
  misc_feature (1767941)..(1767941): n is a or c or g or t.
MKFKASSEKALMKAASWEIHIAIYDLSLPEYSVFKVFALCHQKAESTKTTMHTAEIFLLIFILPPPFSYIKCKNKYQTKSKTIFQQLTGVVMVDIVINYSFNHPNLLEPLRCT

SEQ ID NO: 1033 - protein, 129 aa, Thermococcus kodakaraensis KOD1
  misc_feature (414542)..(414542): n is a or c or g or t.
  misc_feature (786890)..(786890): n is a or c or g or t.
  misc_feature (786907)..(786907): n is a or c or g or t.
  misc_feature (786944)..(786946): n is a or c or g or t.
  misc_feature (839139)..(839139): n is a or c or g or t.
  misc_feature (1128488)..(1128488): n is a or c or g or t.
  misc_feature (1128499)..(1128499): n is a or c or g or t.
  misc_feature (1128505)..(1128506): n is a or c or g or t.
  misc_feature (1128517)..(1128518): n is a or c or g or t.
  misc_feature (1128539)..(1128540): n is a or c or g or t.
  misc_feature (1561400)..(1561400): n is a or c or g or t.
  misc_feature (1561477)..(1561477): n is a or c or g or t.
  misc_feature (1561545)..(1561545): n is a or c or g or t.
  misc_feature (1767941)..(1767941): n is a or c or g or t.
VMDMDFEKELIRELEKDELWTVITFKTPHGPGTTMEKLAEAVEKAGWRITFKANWWTADIPYGLVRIDMRKGDREKILLGKWILGDECRLIKLESLDLERGKDEFFRMVDSITSTLIHDPVIRTMREQY

SEQ ID NO: 1034 - protein, 176 aa, Thermococcus kodakaraensis KOD1
  misc_feature (414542)..(414542): n is a or c or g or t.
  misc_feature (786890)..(786890): n is a or c or g or t.
  misc_feature (786907)..(786907): n is a or c or g or t.
  misc_feature (786944)..(786946): n is a or c or g or t.
  misc_feature (839139)..(839139): n is a or c or g or t.
  misc_feature (1128488)..(1128488): n is a or c or g or t.
  misc_feature (1128499)..(1128499): n is a or c or g or t.
  misc_feature (1128505)..(1128506): n is a or c or g or t.
  misc_feature (1128517)..(1128518): n is a or c or g or t.
  misc_feature (1128539)..(1128540): n is a or c or g or t.
  misc_feature (1561400)..(1561400): n is a or c or g or t.
  misc_feature (1561477)..(1561477): n is a or c or g or t.
  misc_feature (1561545)..(1561545): n is a or c or g or t.
  misc_feature (1767941)..(1767941): n is a or c or g or t.
MPMLSVEKFRVGERVVWIGVIFSGRVQGIAFAFDRGTLMKRIHDLAEHLGKRGVSISLDVQPSDYPEKVFKVLIGELDNASFLRELSFEGVTPFEKKVYEWLTKNVKRGSVITYGDLAKALNTSPRAVGGAMKRNPYPIVVPCHRVVAHDGIGYYSSGIEEKKFLLEIEGVKEWTS

SEQ ID NO: 1035 - protein, 161 aa, Thermococcus kodakaraensis KOD1
  misc_feature (414542)..(414542): n is a or c or g or t.
  misc_feature (786890)..(786890): n is a or c or g or t.
  misc_feature (786907)..(786907): n is a or c or g or t.
  misc_feature (786944)..(786946): n is a or c or g or t.
  misc_feature (839139)..(839139): n is a or c or g or t.
  misc_feature (1128488)..(1128488): n is a or c or g or t.
  misc_feature (1128499)..(1128499): n is a or c or g or t.
  misc_feature (1128505)..(1128506): n is a or c or g or t.
  misc_feature (1128517)..(1128518): n is a or c or g or t.
  misc_feature (1128539)..(1128540): n is a or c or g or t.
  misc_feature (1561400)..(1561400): n is a or c or g or t.
  misc_feature (1561477)..(1561477): n is a or c or g or t.
  misc_feature (1561545)..(1561545): n is a or c or g or t.
  misc_feature (1767941)..(1767941): n is a or c or g or t.
VAKTIPLSVGTDCGTAGIVSLSLFIPERCFKGSHFLNLFKIPRQLYPVEAMMGMNPRQMKKLMKQLGIKMEELEGVEEVVLRMKGKEIILKEPAVTVMVVQGEKTYQIIPGSEEVREVLEISEDDIKLVMEQAGVDYDTAKKALEEAKGDLAEAILKLTEG

SEQ ID NO: 1036 - protein, 194 aa, Thermococcus kodakaraensis KOD1
  misc_feature (414542)..(414542): n is a or c or g or t.
  misc_feature (786890)..(786890): n is a or c or g or t.
  misc_feature (786907)..(786907): n is a or c or g or t.
  misc_feature (786944)..(786946): n is a or c or g or t.
  misc_feature (839139)..(839139): n is a or c or g or t.
  misc_feature (1128488)..(1128488): n is a or c or g or t.
  misc_feature (1128499)..(1128499): n is a or c or g or t.
  misc_feature (1128505)..(1128506): n is a or c or g or t.
  misc_feature (1128517)..(1128518): n is a or c or g or t.
  misc_feature (1128539)..(1128540): n is a or c or g or t.
  misc_feature (1561400)..(1561400): n is a or c or g or t.
  misc_feature (1561477)..(1561477): n is a or c or g or t.
  misc_feature (1561545)..(1561545): n is a or c or g or t.
  misc_feature (1767941)..(1767941): n is a or c or g or t.
VKTFKEAGRMIEIRFHGRGGQGAVTAANILASAAFKEGKYVQAFPFFGVERRGAPVTAFTRIDDKPIRIKTQIYEPDVVVVLDPSLLDTVDVTAGLKDGGIVIVNTEKSKEEVLEKLKKKPGKLALVDATGIALEILGLPITNTAILGAVAKATGLVKLESVQEAIKETFSGALGEKNAKAAEEAFNKTVVYEL

SEQ ID NO: 1037 - protein, 398 aa, Thermococcus kodakaraensis KOD1
  misc_feature (414542)..(414542): n is a or c or g or t.
  misc_feature (786890)..(786890): n is a or c or g or t.
  misc_feature (786907)..(786907): n is a or c or g or t.
  misc_feature (786944)..(786946): n is a or c or g or t.
  misc_feature (839139)..(839139): n is a or c or g or t.
  misc_feature (1128488)..(1128488): n is a or c or g or t.
  misc_feature (1128499)..(1128499): n is a or c or g or t.
  misc_feature (1128505)..(1128506): n is a or c or g or t.
  misc_feature (1128517)..(1128518): n is a or c or g or t.
  misc_feature (1128539)..(1128540): n is a or c or g or t.
  misc_feature (1561400)..(1561400): n is a or c or g or t.
  misc_feature (1561477)..(1561477): n is a or c or g or t.
  misc_feature (1561545)..(1561545): n is a or c or g or t.
  misc_feature (1767941)..(1767941): n is a or c or g or t.
VVEMEYKPIRKVVSGNYAAAYAALHARVQVVAAYPITPQTSIIEKIAEFIANGEADIQYVPVESEHSAMAACIGASAAGARAFTATSAQGLALMHEMLHWASGARLPIVMVDVNRAMAPPWSVWDDQTDSLAQRDTGWMQFYAENNQEVYDGVLMAFKVAETVNLPAMVVESAFILSHTYDVVEMIPQELVDEFLPPRKPLYDLADFEREPFSVGSLATPADYYEFRYKIQKAMEEAKKVIKEVGREFGERFGRDYSQMIETYRTDDADFVFMGMGSLMGTVKEAVDILRQEGYKVGAAKVRWFRPFPKEELYELAKNVDGIAVLDRNYSFGMEGILFTEAKGALYNTDAKPLMKNYIVGLGGRDFTVNDVRKIAENMKAVIEKGELDVEVDWYHLKR

SEQ ID NO: 1038 - protein, 111 aa, Thermococcus kodakaraensis KOD1
  misc_feature (414542)..(414542): n is a or c or g or t.
  misc_feature (786890)..(786890): n is a or c or g or t.
  misc_feature (786907)..(786907): n is a or c or g or t.
  misc_feature (786944)..(786946): n is a or c or g or t.
  misc_feature (839139)..(839139): n is a or c or g or t.
  misc_feature (1128488)..(1128488): n is a or c or g or t.
  misc_feature (1128499)..(1128499): n is a or c or g or t.
  misc_feature (1128505)..(1128506): n is a or c or g or t.
  misc_feature (1128517)..(1128518): n is a or c or g or t.
  misc_feature (1128539)..(1128540): n is a or c or g or t.
  misc_feature (1561400)..(1561400): n is a or c or g or t.
  misc_feature (1561477)..(1561477): n is a or c or g or t.
  misc_feature (1561545)..(1561545): n is a or c or g or t.
  misc_feature (1767941)..(1767941): n is a or c or g or t.
VPADALTIAIKHGMKTEIGIIARKGSERVVIGCKRNAHKISGNSLQSTLSTPSIRESEKIEVYYAGGIENIRGYYYYTQYLPKEIKSRFGVDVEVRYLASEFDRTCFFIFH

SEQ ID NO: 1039 - protein, 268 aa, Thermococcus kodakaraensis KOD1
  misc_feature (414542)..(414542): n is a or c or g or t.
  misc_feature (786890)..(786890): n is a or c or g or t.
  misc_feature (786907)..(786907): n is a or c or g or t.
  misc_feature (786944)..(786946): n is a or c or g or t.
  misc_feature (839139)..(839139): n is a or c or g or t.
  misc_feature (1128488)..(1128488): n is a or c or g or t.
  misc_feature (1128499)..(1128499): n is a or c or g or t.
  misc_feature (1128505)..(1128506): n is a or c or g or t.
  misc_feature (1128517)..(1128518): n is a or c or g or t.
  misc_feature (1128539)..(1128540): n is a or c or g or t.
  misc_feature (1561400)..(1561400): n is a or c or g or t.
  misc_feature (1561477)..(1561477): n is a or c or g or t.
  misc_feature (1561545)..(1561545): n is a or c or g or t.
  misc_feature (1767941)..(1767941): n is a or c or g or t.
MNHGGSGMGTTYYVVAVFDRPWGEVLEKLSREFKYTRELAYQRERREEHLKFIFDMRGFRLVAVGELHYELKTTEEDSFDWLEVETYSKENMTLLQIGVSTGRWLFVLSPELMKFLGKLMRVGAVLICGYTDDHDLRDAGFEENNQFLFYEWLVETVKRKKLEIVPSDVTIVKKELLDLEDGLYELIERPGREDEEYVLIKRLDSYKILVSVRESDLTDEESYRELIEDKTWFSSHIIVVVFRRIGKKVENELLIKRVEEYFKAQTEE

SEQ ID NO: 1040 - protein, 204 aa, Thermococcus kodakaraensis KOD1
  misc_feature (414542)..(414542): n is a or c or g or t.
  misc_feature (786890)..(786890): n is a or c or g or t.
  misc_feature (786907)..(786907): n is a or c or g or t.
  misc_feature (786944)..(786946): n is a or c or g or t.
  misc_feature (839139)..(839139): n is a or c or g or t.
  misc_feature (1128488)..(1128488): n is a or c or g or t.
  misc_feature (1128499)..(1128499): n is a or c or g or t.
  misc_feature (1128505)..(1128506): n is a or c or g or t.
  misc_feature (1128517)..(1128518): n is a or c or g or t.
  misc_feature (1128539)..(1128540): n is a or c or g or t.
  misc_feature (1561400)..(1561400): n is a or c or g or t.
  misc_feature (1561477)..(1561477): n is a or c or g or t.
  misc_feature (1561545)..(1561545): n is a or c or g or t.
  misc_feature (1767941)..(1767941): n is a or c or g or t.
VMTMIGAVLAGGRGRRFGGDKLLFRISGKPLLLYTIERLEQAEKIDEIVLVASKENAEKLRDFGHDVVVDELMIGPMGGIFTALSLGDAFVVAGDMPLLVPEFIDFIVERFEEAKKPACVPRWSNGYLEPLHAAYSSSFRDFLEERIKSRNYAINQAIRESDACYIEIEKLPEGWRESFFNVNTREDLRRLTPLRTRDNPDTLR

SEQ ID NO: 1041 - protein, 307 aa, Thermococcus kodakaraensis KOD1
  misc_feature (414542)..(414542): n is a or c or g or t.
  misc_feature (786890)..(786890): n is a or c or g or t.
  misc_feature (786907)..(786907): n is a or c or g or t.
  misc_feature (786944)..(786946): n is a or c or g or t.
  misc_feature (839139)..(839139): n is a or c or g or t.
  misc_feature (1128488)..(1128488): n is a or c or g or t.
  misc_feature (1128499)..(1128499): n is a or c or g or t.
  misc_feature (1128505)..(1128506): n is a or c or g or t.
  misc_feature (1128517)..(1128518): n is a or c or g or t.
  misc_feature (1128539)..(1128540): n is a or c or g or t.
  misc_feature (1561400)..(1561400): n is a or c or g or t.
  misc_feature (1561477)..(1561477): n is a or c or g or t.
  misc_feature (1561545)..(1561545): n is a or c or g or t.
  misc_feature (1767941)..(1767941): n is a or c or g or t.
VNGNRNEGMKVAHHHHGELKGRMLFSFALNIVITLAEVIGGILSGSLALLSDSLHNFSDSMSILASYLAIKIGEREKNEKYTFGYKRAEILVAFVNSAVLVGVALFLLVEAYKRFKNPEPIDGPLMLGVALIGLFANLISVLLLHEHAHESMNVRSAYLHLLSDTLSSVAVVIGGIAIIRWDVLWIDPLVTVLISVYILREGYEILKESVEVLMEAAPDLDLDEIKREIESIPGIRNAHHFHVWRIGEKEIHFECHVEVNDMPISEAQRLIDEIEERLKRFGITHVTVQLEAGRCEDKNTICGEKGD

SEQ ID NO: 1042 - protein, 877 aa, Thermococcus kodakaraensis KOD1
  misc_feature (414542)..(414542): n is a or c or g or t.
  misc_feature (786890)..(786890): n is a or c or g or t.
  misc_feature (786907)..(786907): n is a or c or g or t.
  misc_feature (786944)..(786946): n is a or c or g or t.
  misc_feature (839139)..(839139): n is a or c or g or t.
  misc_feature (1128488)..(1128488): n is a or c or g or t.
  misc_feature (1128499)..(1128499): n is a or c or g or t.
  misc_feature (1128505)..(1128506): n is a or c or g or t.
  misc_feature (1128517)..(1128518): n is a or c or g or t.
  misc_feature (1128539)..(1128540): n is a or c or g or t.
  misc_feature (1561400)..(1561400): n is a or c or g or t.
  misc_feature (1561477)..(1561477): n is a or c or g or t.
  misc_feature (1561545)..(1561545): n is a or c or g or t.
  misc_feature (1767941)..(1767941): n is a or c or g or t.
MGIQFFFSAPVWSGGVVMKRTYRVLVFMLLAGLVLIGGCVENGPVSTGGGQTTETGTSVSTSTDHIGETDTGTATTTETVTETVTQTNTETGTGTVTETPTPNGSVQFDEDGLPICTGDMDEDLGCEDNKTIDGSGPGFSLPEDILLNITLEPVLQLVPLNPPNLTYVGPLSSMASVPGEEDVIEWVGLATSSTEPGKSVTLTLHFKNESLLSQYIHVPFIMDPVTGKKVTYQPTVMKLSEGDEFGKRWEVHLYGGISGGSFTLYEITGNGPLKLQEGTVELKGSSASFILENFSSIFPEKTYMSMEAVPMSSKFSTFTYPSKESFVIKAKEGRIDYYTSAFFGIEDEPVSIRTTSSEYDLIFEFYVTKDTWLSFTGFIDSSDDGMADWILEVRDRNYELKDESGSLFRDGNVTVENTQLGKKVSLRIENFYSLVPWRKFRFWMTNWIERFPAKSNLWVDASEGMSIEKDVDLYLVAVVEDVFVKENGDYAEGEIQLSSWAYGMTWPDGKAWPINHSSIYTFGYPIGHWVEAEDNSRLLYHDDRMTGSLNMPFVNGYPILAMPIDEAKKYKIIVLETAGWDRDEPGKYVTKTVGYLTDFAVGMATGEIGTVADYAYKGATWMNWLATGQSGDELWGSVFNWLAGAEPDKVGNAVYVLHPNEADFTRGYRVTAESRDGNMRVTYVIYEVEVPRLLKYDNLKAELLEVDFTKDTEIGDDEYYYYARACAGFESLGETEGLHNVEVNVLAPAGYAYSYPVSSSEGATFNRQPCSASKLFHKYLSGNELSLKPGLAMLERDDARVPFLYMEYSGWEEDAGKWGNDDDPMGNVGITIVFDDDYFDWDVTSGIPSKYWSLDFDVCGVSGGCSKVWFGLDVRRE

SEQ ID NO: 1043 - protein, 65 aa, Thermococcus kodakaraensis KOD1
  misc_feature (414542)..(414542): n is a or c or g or t.
  misc_feature (786890)..(786890): n is a or c or g or t.
  misc_feature (786907)..(786907): n is a or c or g or t.
  misc_feature (786944)..(786946): n is a or c or g or t.
  misc_feature (839139)..(839139): n is a or c or g or t.
  misc_feature (1128488)..(1128488): n is a or c or g or t.
  misc_feature (1128499)..(1128499): n is a or c or g or t.
  misc_feature (1128505)..(1128506): n is a or c or g or t.
  misc_feature (1128517)..(1128518): n is a or c or g or t.
  misc_feature (1128539)..(1128540): n is a or c or g or t.
  misc_feature (1561400)..(1561400): n is a or c or g or t.
  misc_feature (1561477)..(1561477): n is a or c or g or t.
  misc_feature (1561545)..(1561545): n is a or c or g or t.
  misc_feature (1767941)..(1767941): n is a or c or g or t.
MKKTAAFKYTSAFENVPSAGSFEEYALLTSARAPVPITLANQLGAKSLTFILIFLHLKKSPYFCF

SEQ ID NO: 1044 - protein, 29 aa, Thermococcus kodakaraensis KOD1
  misc_feature (414542)..(414542): n is a or c or g or t.
  misc_feature (786890)..(786890): n is a or c or g or t.
  misc_feature (786907)..(786907): n is a or c or g or t.
  misc_feature (786944)..(786946): n is a or c or g or t.
  misc_feature (839139)..(839139): n is a or c or g or t.
  misc_feature (1128488)..(1128488): n is a or c or g or t.
  misc_feature (1128499)..(1128499): n is a or c or g or t.
  misc_feature (1128505)..(1128506): n is a or c or g or t.
  misc_feature (1128517)..(1128518): n is a or c or g or t.
  misc_feature (1128539)..(1128540): n is a or c or g or t.
  misc_feature (1561400)..(1561400): n is a or c or g or t.
  misc_feature (1561477)..(1561477): n is a or c or g or t.
  misc_feature (1561545)..(1561545): n is a or c or g or t.
  misc_feature (1767941)..(1767941): n is a or c or g or t.
MKSPLKVIPAIFKTQYKPKVKNTNFPKSI

SEQ ID NO: 1045 - protein, 377 aa, Thermococcus kodakaraensis KOD1
  misc_feature (414542)..(414542): n is a or c or g or t.
  misc_feature (786890)..(786890): n is a or c or g or t.
  misc_feature (786907)..(786907): n is a or c or g or t.
  misc_feature (786944)..(786946): n is a or c or g or t.
  misc_feature (839139)..(839139): n is a or c or g or t.
  misc_feature (1128488)..(1128488): n is a or c or g or t.
  misc_feature (1128499)..(1128499): n is a or c or g or t.
  misc_feature (1128505)..(1128506): n is a or c or g or t.
  misc_feature (1128517)..(1128518): n is a or c or g or t.
  misc_feature (1128539)..(1128540): n is a or c or g or t.
  misc_feature (1561400)..(1561400): n is a or c or g or t.
  misc_feature (1561477)..(1561477): n is a or c or g or t.
  misc_feature (1561545)..(1561545): n is a or c or g or t.
  misc_feature (1767941)..(1767941): n is a or c or g or t.
MKRLMAVLLVLFVVLAGGCVGTSSNGAEKASQQYITVTDSLGRIVQVPVNVQKVVAIGPGALRLIVYLNASNMVVGVEDFEKKYSYGRPYIIAHPELKNLPSIGPGGPGKLPNLEALANVSPDVIIAVFISKEQADEIQEKTGIPVVVLSYGARGGMKGFNDPQLIESIQLAGKILHREKRAKELVDFLNSVQEDLQKRMKGEKSPRVYVGGIGYKGAHGIESTYGDYAPFEVLNLTNIASSLGPGWKTVDKEWLLKEDPDYLFIDEGGLKIILDDYRKNPDFYRALSALKEGRVYGLLPFNFYNTNLGTAIADTYYIGKVLYPERFSDVDPVKKADEIYAFLVGKPVYETLKEQFGGFGKIDFENGTVKYSLPTSP

SEQ ID NO: 1046 - protein, 203 aa, Thermococcus kodakaraensis KOD1
  misc_feature (414542)..(414542): n is a or c or g or t.
  misc_feature (786890)..(786890): n is a or c or g or t.
  misc_feature (786907)..(786907): n is a or c or g or t.
  misc_feature (786944)..(786946): n is a or c or g or t.
  misc_feature (839139)..(839139): n is a or c or g or t.
  misc_feature (1128488)..(1128488): n is a or c or g or t.
  misc_feature (1128499)..(1128499): n is a or c or g or t.
  misc_feature (1128505)..(1128506): n is a or c or g or t.
  misc_feature (1128517)..(1128518): n is a or c or g or t.
  misc_feature (1128539)..(1128540): n is a or c or g or t.
  misc_feature (1561400)..(1561400): n is a or c or g or t.
  misc_feature (1561477)..(1561477): n is a or c or g or t.
  misc_feature (1561545)..(1561545): n is a or c or g or t.
  misc_feature (1767941)..(1767941): n is a or c or g or t.
VDGEGALRMIRKVKPQIRVLGFDDGTFSFSSKLKHEKTILIGVVMKGSLEVVGVLSRWITVDGRDVTDAMINSVNSSRFKDLRVILLKGITYAGFNVVDLERLHNETGLPVVVVVRKKPDILAMEDALRKHFRDAEERIALLRKTPPLVELVPDKLYFQTVGLDEKTAAEVIKVTTRTGFIPEPLRLAHMIASAVMTGESKRE

SEQ ID NO: 1047 - protein, 203 aa, Thermococcus kodakaraensis KOD1
  misc_feature (414542)..(414542): n is a or c or g or t.
  misc_feature (786890)..(786890): n is a or c or g or t.
  misc_feature (786907)..(786907): n is a or c or g or t.
  misc_feature (786944)..(786946): n is a or c or g or t.
  misc_feature (839139)..(839139): n is a or c or g or t.
  misc_feature (1128488)..(1128488): n is a or c or g or t.
  misc_feature (1128499)..(1128499): n is a or c or g or t.
  misc_feature (1128505)..(1128506): n is a or c or g or t.
  misc_feature (1128517)..(1128518): n is a or c or g or t.
  misc_feature (1128539)..(1128540): n is a or c or g or t.
  misc_feature (1561400)..(1561400): n is a or c or g or t.
  misc_feature (1561477)..(1561477): n is a or c or g or t.
  misc_feature (1561545)..(1561545): n is a or c or g or t.
  misc_feature (1767941)..(1767941): n is a or c or g or t.
MLREILETIEARGGGLVLVEYSSLDHPELVFAEIITGWREKGIIPLIVDIGDTLHIFTSKLRMMGVNIEVEDFPVVKEIGNTRVGNIVGEVHEIEDFDYHMAKYAQIAKKVPEESKKHTIVLGMEKFSFTFMDNPPKLERYFEKINRRYLKYPDVKDVIFLNTSVASEYLTKSLEQDYDYVLRLRGTDLSLVKTPGGESVEVR

SEQ ID NO: 1048 - protein, 22 aa, Thermococcus kodakaraensis KOD1
  misc_feature (414542)..(414542): n is a or c or g or t.
  misc_feature (786890)..(786890): n is a or c or g or t.
  misc_feature (786907)..(786907): n is a or c or g or t.
  misc_feature (786944)..(786946): n is a or c or g or t.
  misc_feature (839139)..(839139): n is a or c or g or t.
  misc_feature (1128488)..(1128488): n is a or c or g or t.
  misc_feature (1128499)..(1128499): n is a or c or g or t.
  misc_feature (1128505)..(1128506): n is a or c or g or t.
  misc_feature (1128517)..(1128518): n is a or c or g or t.
  misc_feature (1128539)..(1128540): n is a or c or g or t.
  misc_feature (1561400)..(1561400): n is a or c or g or t.
  misc_feature (1561477)..(1561477): n is a or c or g or t.
  misc_feature (1561545)..(1561545): n is a or c or g or t.
  misc_feature (1767941)..(1767941): n is a or c or g or t.
MITRHYKFYLFFETLHFMDGDR

SEQ ID NO: 1049 - protein, 176 aa, Thermococcus kodakaraensis KOD1
  misc_feature (414542)..(414542): n is a or c or g or t.
  misc_feature (786890)..(786890): n is a or c or g or t.
  misc_feature (786907)..(786907): n is a or c or g or t.
  misc_feature (786944)..(786946): n is a or c or g or t.
  misc_feature (839139)..(839139): n is a or c or g or t.
  misc_feature (1128488)..(1128488): n is a or c or g or t.
  misc_feature (1128499)..(1128499): n is a or c or g or t.
  misc_feature (1128505)..(1128506): n is a or c or g or t.
  misc_feature (1128517)..(1128518): n is a or c or g or t.
  misc_feature (1128539)..(1128540): n is a or c or g or t.
  misc_feature (1561400)..(1561400): n is a or c or g or t.
  misc_feature (1561477)..(1561477): n is a or c or g or t.
  misc_feature (1561545)..(1561545): n is a or c or g or t.
  misc_feature (1767941)..(1767941): n is a or c or g or t.
VADGEVREMTRRILHVDYSLCIGCETCEGVCDFIHGGRPNIKVYYTITGIPVPINCRHCEKAPCMDVCPAGAIYRDSDGAVIINPNKCIGCLMCLAACPFGVPTFDVKLKAVTKCDMCADRRRLGTAPACAEMCPAGAIFFGKPEEVEEKVRRRTAEKIARERLAAVNLEGVGRML

SEQ ID NO: 1050 - protein, 397 aa, Thermococcus kodakaraensis KOD1
  misc_feature (414542)..(414542): n is a or c or g or t.
  misc_feature (786890)..(786890): n is a or c or g or t.
  misc_feature (786907)..(786907): n is a or c or g or t.
  misc_feature (786944)..(786946): n is a or c or g or t.
  misc_feature (839139)..(839139): n is a or c or g or t.
  misc_feature (1128488)..(1128488): n is a or c or g or t.
  misc_feature (1128499)..(1128499): n is a or c or g or t.
  misc_feature (1128505)..(1128506): n is a or c or g or t.
  misc_feature (1128517)..(1128518): n is a or c or g or t.
  misc_feature (1128539)..(1128540): n is a or c or g or t.
  misc_feature (1561400)..(1561400): n is a or c or g or t.
  misc_feature (1561477)..(1561477): n is a or c or g or t.
  misc_feature (1561545)..(1561545): n is a or c or g or t.
  misc_feature (1767941)..(1767941): n is a or c or g or t.
MMYSAMMEVLRMDEKLVPVVCPYCGVGCRLYIRSSDGHPLGIEYANDIPGISNENGKLCPKGNAVLEYVLARDRLKKPLKAKEQGKFVEISWSQAIKEVAERLKEYSKDDPNSMMFFGSAKTFNEPNYLIQKLARMLGTNNVDHCARLCHASTVSGLKAVFGAGAMTNTYRDIEEANVIFIIGHNFAETHPVGFRYVLKAKERGAKVIVADPRFTRTAWFADIYLQHYPGTDIALINGLIHVIIEERLYDEKFVRERCTGFDELAKTVEKFTPGYVEKITGVPADLIVQAARTFATGGKGVITWAMGITQHTHGHDNVRLLATLSAICGYQGREGCGVSPMRGQNNVQGACDLGVLPNVFPGYKAVSDPEGRKFFEEFWGTELSGEVGLTVIEAATP

SEQ ID NO: 1051 - protein, 342 aa, Thermococcus kodakaraensis KOD1
  misc_feature (414542)..(414542): n is a or c or g or t.
  misc_feature (786890)..(786890): n is a or c or g or t.
  misc_feature (786907)..(786907): n is a or c or g or t.
  misc_feature (786944)..(786946): n is a or c or g or t.
  misc_feature (839139)..(839139): n is a or c or g or t.
  misc_feature (1128488)..(1128488): n is a or c or g or t.
  misc_feature (1128499)..(1128499): n is a or c or g or t.
  misc_feature (1128505)..(1128506): n is a or c or g or t.
  misc_feature (1128517)..(1128518): n is a or c or g or t.
  misc_feature (1128539)..(1128540): n is a or c or g or t.
  misc_feature (1561400)..(1561400): n is a or c or g or t.
  misc_feature (1561477)..(1561477): n is a or c or g or t.
  misc_feature (1561545)..(1561545): n is a or c or g or t.
  misc_feature (1767941)..(1767941): n is a or c or g or t.
MVDPKEQILYGVDTTFEGIAKKATPKFRTTPGRLLFAGFMAGAFIAFGFLLAVVAASGYSPKLFPDKGNISAFKLLLGAVFPVGLIGVVIGGADLWTGNVQFLSSAKVKGYADFKCVLYNWFGSYGGNFIGSIFLALLATTLTGLFGHVGDPNTFGKVTVSIATGKVSKDMLALFFLGIGCNWLVNLAIWQSARVQDGAGKILAIWFPIFAFVAIGFEHAIANMWAIPTGILLSNYTITWTKFFHNLIPVTFGNAVGGFLFVAFYYWYLSHPELTAERLIKEIVDFLVVFIAFWIVATLVPAGIAMALDSALGSGAMYAVPLALSIYYIAGTFFLAKIAKPA

SEQ ID NO: 1052 - protein, 180 aa, Thermococcus kodakaraensis KOD1
  misc_feature (414542)..(414542): n is a or c or g or t.
  misc_feature (786890)..(786890): n is a or c or g or t.
  misc_feature (786907)..(786907): n is a or c or g or t.
  misc_feature (786944)..(786946): n is a or c or g or t.
  misc_feature (839139)..(839139): n is a or c or g or t.
  misc_feature (1128488)..(1128488): n is a or c or g or t.
  misc_feature (1128499)..(1128499): n is a or c or g or t.
  misc_feature (1128505)..(1128506): n is a or c or g or t.
  misc_feature (1128517)..(1128518): n is a or c or g or t.
  misc_feature (1128539)..(1128540): n is a or c or g or t.
  misc_feature (1561400)..(1561400): n is a or c or g or t.
  misc_feature (1561477)..(1561477): n is a or c or g or t.
  misc_feature (1561545)..(1561545): n is a or c or g or t.
  misc_feature (1767941)..(1767941): n is a or c or g or t.
VRGAENVSSGGGSLPFIVAFLFAYIVWLVLTAGSNGLLWSTEELVAGLIFAAIIGYATKDVVGENSTRFLNPVKWLGFIAYAPVLFWGMVKANFDVAYRVITGKIRPGIVRVPVDLNNDAQYTILSNSITLTPGTLTVEADPEEKALYVHWINVPEGLERPESSEPVAGPFEKWARRLGR

SEQ ID NO: 1053 - protein, 88 aa, Thermococcus kodakaraensis KOD1
  misc_feature (414542)..(414542): n is a or c or g or t.
  misc_feature (786890)..(786890): n is a or c or g or t.
  misc_feature (786907)..(786907): n is a or c or g or t.
  misc_feature (786944)..(786946): n is a or c or g or t.
  misc_feature (839139)..(839139): n is a or c or g or t.
  misc_feature (1128488)..(1128488): n is a or c or g or t.
  misc_feature (1128499)..(1128499): n is a or c or g or t.
  misc_feature (1128505)..(1128506): n is a or c or g or t.
  misc_feature (1128517)..(1128518): n is a or c or g or t.
  misc_feature (1128539)..(1128540): n is a or c or g or t.
  misc_feature (1561400)..(1561400): n is a or c or g or t.
  misc_feature (1561477)..(1561477): n is a or c or g or t.
  misc_feature (1561545)..(1561545): n is a or c or g or t.
  misc_feature (1767941)..(1767941): n is a or c or g or t.
MNAVDLDMLIQAIILVGVLITAYLTIRYRDLLSAALASAAMSLLLSLEFYTLHAPDVAIAEAAVGAGVVTAVVVYGIAKTERWEREVP

SEQ ID NO: 1054 - protein, 122 aa, Thermococcus kodakaraensis KOD1
  misc_feature (414542)..(414542): n is a or c or g or t.
  misc_feature (786890)..(786890): n is a or c or g or t.
  misc_feature (786907)..(786907): n is a or c or g or t.
  misc_feature (786944)..(786946): n is a or c or g or t.
  misc_feature (839139)..(839139): n is a or c or g or t.
  misc_feature (1128488)..(1128488): n is a or c or g or t.
  misc_feature (1128499)..(1128499): n is a or c or g or t.
  misc_feature (1128505)..(1128506): n is a or c or g or t.
  misc_feature (1128517)..(1128518): n is a or c or g or t.
  misc_feature (1128539)..(1128540): n is a or c or g or t.
  misc_feature (1561400)..(1561400): n is a or c or g or t.
  misc_feature (1561477)..(1561477): n is a or c or g or t.
  misc_feature (1561545)..(1561545): n is a or c or g or t.
  misc_feature (1767941)..(1767941): n is a or c or g or t.
VEVLIQFQFIVAFLMIALGIYAFLAKRNLLKLVLALNIIDAGIHLLLISLGYRMELNEVPTAPIYTGYETLKSPMVGPLPQALVLTSIVIGVCVLSLAVALTINAYRHYGTLDVRALRRLRG

SEQ ID NO: 1055 - protein, 118 aa, Thermococcus kodakaraensis KOD1
  misc_feature (414542)..(414542): n is a or c or g or t.
  misc_feature (786890)..(786890): n is a or c or g or t.
  misc_feature (786907)..(786907): n is a or c or g or t.
  misc_feature (786944)..(786946): n is a or c or g or t.
  misc_feature (839139)..(839139): n is a or c or g or t.
  misc_feature (1128488)..(1128488): n is a or c or g or t.
  misc_feature (1128499)..(1128499): n is a or c or g or t.
  misc_feature (1128505)..(1128506): n is a or c or g or t.
  misc_feature (1128517)..(1128518): n is a or c or g or t.
  misc_feature (1128539)..(1128540): n is a or c or g or t.
  misc_feature (1561400)..(1561400): n is a or c or g or t.
  misc_feature (1561477)..(1561477): n is a or c or g or t.
  misc_feature (1561545)..(1561545): n is a or c or g or t.
  misc_feature (1767941)..(1767941): n is a or c or g or t.
VPEMFGYWDAIYFVFVFIIGLILAYLLDKWAKRSGMGTRETGDGTKIFISGEDPDRIIPGFEHLEGHYTGRNVMWGLTYALKNFFTVLRRDHTGLLTDYASYLVITTAFVLGVLLIWG

SEQ ID NO: 1056 - protein, 189 aa, Thermococcus kodakaraensis KOD1
  misc_feature (414542)..(414542): n is a or c or g or t.
  misc_feature (786890)..(786890): n is a or c or g or t.
  misc_feature (786907)..(786907): n is a or c or g or t.
  misc_feature (786944)..(786946): n is a or c or g or t.
  misc_feature (839139)..(839139): n is a or c or g or t.
  misc_feature (1128488)..(1128488): n is a or c or g or t.
  misc_feature (1128499)..(1128499): n is a or c or g or t.
  misc_feature (1128505)..(1128506): n is a or c or g or t.
  misc_feature (1128517)..(1128518): n is a or c or g or t.
  misc_feature (1128539)..(1128540): n is a or c or g or t.
  misc_feature (1561400)..(1561400): n is a or c or g or t.
  misc_feature (1561477)..(1561477): n is a or c or g or t.
  misc_feature (1561545)..(1561545): n is a or c or g or t.
  misc_feature (1767941)..(1767941): n is a or c or g or t.
MSEANPITEVNEVKEPTKAEDVARKIAERFPSASVEVKTNKWGRQRVWVRVPREDYKALMSFIKGLDPEAHYSIGIEQDWGEELGFLSHILIHYRDAPAVSLIVDVHAPKDDPVLPDISDVFPIALQFEREGMEMVGLDFEGAPDKRRLFLPDDFPEGIYPLRLDDKGISEEMVHNAGHPYYIKGGAKK

SEQ ID NO: 1057 - protein, 330 aa, Thermococcus kodakaraensis KOD1
  misc_feature (414542)..(414542): n is a or c or g or t.
  misc_feature (786890)..(786890): n is a or c or g or t.
  misc_feature (786907)..(786907): n is a or c or g or t.
  misc_feature (786944)..(786946): n is a or c or g or t.
  misc_feature (839139)..(839139): n is a or c or g or t.
  misc_feature (1128488)..(1128488): n is a or c or g or t.
  misc_feature (1128499)..(1128499): n is a or c or g or t.
  misc_feature (1128505)..(1128506): n is a or c or g or t.
  misc_feature (1128517)..(1128518): n is a or c or g or t.
  misc_feature (1128539)..(1128540): n is a or c or g or t.
  misc_feature (1561400)..(1561400): n is a or c or g or t.
  misc_feature (1561477)..(1561477): n is a or c or g or t.
  misc_feature (1561545)..(1561545): n is a or c or g or t.
  misc_feature (1767941)..(1767941): n is a or c or g or t.
MDVVSNVVYPIAGLLGLYTFVSLASLVWEGIDRKLVARMQRRIGPPILQPIYDFLKLASKETIIPNTANYMFRAAPVLALATAIALLAYTPMGFTPILASKGDVIVFIYLLTLISFFKMLGAISSGNPYAKIGAAREATIMVSREPAMMLAIFTIMWRIGKLGVEEPFSMGTFYQHNIWEIGTPMSFVGALILLYVFAVWLASEIEVGFFNIPDAEEEIAEGLLVEYSGRYLALLKLTHSIKAFISASLVVAIFFPWGISGYFGLSGLSANVVDLLFHTLKVFVVLFVVQSVFRAVTGRLKITQAVDFLWKNVFLASLIGSLLIAMEVIM

SEQ ID NO: 1058 - protein, 448 aa, Thermococcus kodakaraensis KOD1
  misc_feature (414542)..(414542): n is a or c or g or t.
  misc_feature (786890)..(786890): n is a or c or g or t.
  misc_feature (786907)..(786907): n is a or c or g or t.
  misc_feature (786944)..(786946): n is a or c or g or t.
  misc_feature (839139)..(839139): n is a or c or g or t.
  misc_feature (1128488)..(1128488): n is a or c or g or t.
  misc_feature (1128499)..(1128499): n is a or c or g or t.
  misc_feature (1128505)..(1128506): n is a or c or g or t.
  misc_feature (1128517)..(1128518): n is a or c or g or t.
  misc_feature (1128539)..(1128540): n is a or c or g or t.
  misc_feature (1561400)..(1561400): n is a or c or g or t.
  misc_feature (1561477)..(1561477): n is a or c or g or t.
  misc_feature (1561545)..(1561545): n is a or c or g or t.
  misc_feature (1767941)..(1767941): n is a or c or g or t.
VMRMVVRPNVKELPGPKAKEVIERNFKYLAMTTQDPENLPIVIERGEGIRVYDVDGNVFYDFASGVGVINVGHSHPRVVEAIKKQAEKFTHYSLTDFFYENAIILAEKLIELAPGDIERKVVYGNSGAEANEAAMKLVKYGTGRKQFLAFYHAFHGRTQAVLSLTASKWVQQDGFFPTMPGVTHIPYPNPYRNTWGIDGYEEPDELTNRVLDFIEEYVFRHVPPHEIGAIFFEPIQGEGGYVVPPKGFFKALKKFADEYGILLADDEVQMGIGRTGKFWAIEHFGVEPDLIQFGKAIGGGLPLAGVIHRADITFDKPGRHATTFGGNPVAIAAGIEVVEIVKELLPHVQEVGDYLHKYLEEFKEKYEVIGDARGLGLAQAVEIVKSKETKEKYPELRDRIVKESAKRGLVLLGCGDNSIRFIPPLIVTKEEIDVAMEIFEEALKAALK

SEQ ID NO: 1059 - protein, 289 aa, Thermococcus kodakaraensis KOD1
  misc_feature (414542)..(414542): n is a or c or g or t.
  misc_feature (786890)..(786890): n is a or c or g or t.
  misc_feature (786907)..(786907): n is a or c or g or t.
  misc_feature (786944)..(786946): n is a or c or g or t.
  misc_feature (839139)..(839139): n is a or c or g or t.
  misc_feature (1128488)..(1128488): n is a or c or g or t.
  misc_feature (1128499)..(1128499): n is a or c or g or t.
  misc_feature (1128505)..(1128506): n is a or c or g or t.
  misc_feature (1128517)..(1128518): n is a or c or g or t.
  misc_feature (1128539)..(1128540): n is a or c or g or t.
  misc_feature (1561400)..(1561400): n is a or c or g or t.
  misc_feature (1561477)..(1561477): n is a or c or g or t.
  misc_feature (1561545)..(1561545): n is a or c or g or t.
  misc_feature (1767941)..(1767941): n is a or c or g or t.
MEIRIQGVKSMNGKRVLGLLIAILIVASAGCLGGETTTDTKPETADSMHTSGINSTKTNTGIDSSSSNRETGDVDLESIVGKIETYSYHQDALMKLDVTTTEGNITMNTNVSMLIIENGYVDTVGRKALVNSTITILPDNLTENMLQIVIGNKTYIKTSFGVNEINFTTLWDSHPLRLVEAIIQEEPLAKYTENGTTVFVYSLSEDVILPLAEAYLSPGDSNVTITDAVLEIHVANGTIIQIKLAYSLVAKMSSDDAFGHIEVIETGTWKSTVRITSINEKREVEPPTT

SEQ ID NO: 1060 - protein, 278 aa, Thermococcus kodakaraensis KOD1
  misc_feature (414542)..(414542): n is a or c or g or t.
  misc_feature (786890)..(786890): n is a or c or g or t.
  misc_feature (786907)..(786907): n is a or c or g or t.
  misc_feature (786944)..(786946): n is a or c or g or t.
  misc_feature (839139)..(839139): n is a or c or g or t.
  misc_feature (1128488)..(1128488): n is a or c or g or t.
  misc_feature (1128499)..(1128499): n is a or c or g or t.
  misc_feature (1128505)..(1128506): n is a or c or g or t.
  misc_feature (1128517)..(1128518): n is a or c or g or t.
  misc_feature (1128539)..(1128540): n is a or c or g or t.
  misc_feature (1561400)..(1561400): n is a or c or g or t.
  misc_feature (1561477)..(1561477): n is a or c or g or t.
  misc_feature (1561545)..(1561545): n is a or c or g or t.
  misc_feature (1767941)..(1767941): n is a or c or g or t.
MKFGVVARRDKLEALKLAYRVYDFLKVSGFDVVVDEDTYRYLGEFSEDDVLPLEEFDVDIIVVIGGDGTILRVEHKTKKEIPILGINMGTLGFLTEVEPHETFFALSRVIEGDYHIDERIKLRTFLDGENRVPDALNEVAVLTGIPGKIIHLKYYIDGGLADEVRADGLIISTPTGSTGYAMSAGGPFVDPRLDVVVIAPLAPIALSSRPMVVPSSSRIDVRNVAMTREVILSVDGQFYTYLSPETEITIVRSPRKTKFVRFNREIYPKYTMKIKSRF

SEQ ID NO: 1061 - protein, 164 aa, Thermococcus kodakaraensis KOD1
  misc_feature (414542)..(414542): n is a or c or g or t.
  misc_feature (786890)..(786890): n is a or c or g or t.
  misc_feature (786907)..(786907): n is a or c or g or t.
  misc_feature (786944)..(786946): n is a or c or g or t.
  misc_feature (839139)..(839139): n is a or c or g or t.
  misc_feature (1128488)..(1128488): n is a or c or g or t.
  misc_feature (1128499)..(1128499): n is a or c or g or t.
  misc_feature (1128505)..(1128506): n is a or c or g or t.
  misc_feature (1128517)..(1128518): n is a or c or g or t.
  misc_feature (1128539)..(1128540): n is a or c or g or t.
  misc_feature (1561400)..(1561400): n is a or c or g or t.
  misc_feature (1561477)..(1561477): n is a or c or g or t.
  misc_feature (1561545)..(1561545): n is a or c or g or t.
  misc_feature (1767941)..(1767941): n is a or c or g or t.
VKLFPYLRGGDELYRWRLTVKVALIFAVIEAVLYGVTLFFSGNILGALLRVVVVMYHVSFTAIALEMALRGSLLSGYLKAALLHTLYDAPVFVTLAASDLSLLASILGIVAIVYTYYRVDEAFELAHRKAREALEERKRKAREFWEGKGISLAEDEGGEFTSSP

SEQ ID NO: 1062 - protein, 104 aa, Thermococcus kodakaraensis KOD1
  misc_feature (414542)..(414542): n is a or c or g or t.
  misc_feature (786890)..(786890): n is a or c or g or t.
  misc_feature (786907)..(786907): n is a or c or g or t.
  misc_feature (786944)..(786946): n is a or c or g or t.
  misc_feature (839139)..(839139): n is a or c or g or t.
  misc_feature (1128488)..(1128488): n is a or c or g or t.
  misc_feature (1128499)..(1128499): n is a or c or g or t.
  misc_feature (1128505)..(1128506): n is a or c or g or t.
  misc_feature (1128517)..(1128518): n is a or c or g or t.
  misc_feature (1128539)..(1128540): n is a or c or g or t.
  misc_feature (1561400)..(1561400): n is a or c or g or t.
  misc_feature (1561477)..(1561477): n is a or c or g or t.
  misc_feature (1561545)..(1561545): n is a or c or g or t.
  misc_feature (1767941)..(1767941): n is a or c or g or t.
VVEMTTERVFNKKLTRLDLKFGDINWEKATIKQYELEKDERVWRIFLNGYARNGFVIFDEELFPREELLKALEELKPEVVGEKTLTVQELIEESMSWNNVFSHS

SEQ ID NO: 1063 - protein, 223 aa, Thermococcus kodakaraensis KOD1
  misc_feature (414542)..(414542): n is a or c or g or t.
  misc_feature (786890)..(786890): n is a or c or g or t.
  misc_feature (786907)..(786907): n is a or c or g or t.
  misc_feature (786944)..(786946): n is a or c or g or t.
  misc_feature (839139)..(839139): n is a or c or g or t.
  misc_feature (1128488)..(1128488): n is a or c or g or t.
  misc_feature (1128499)..(1128499): n is a or c or g or t.
  misc_feature (1128505)..(1128506): n is a or c or g or t.
  misc_feature (1128517)..(1128518): n is a or c or g or t.
  misc_feature (1128539)..(1128540): n is a or c or g or t.
  misc_feature (1561400)..(1561400): n is a or c or g or t.
  misc_feature (1561477)..(1561477): n is a or c or g or t.
  misc_feature (1561545)..(1561545): n is a or c or g or t.
  misc_feature (1767941)..(1767941): n is a or c or g or t.
VNPYGMAITLVVFYVFSELHARRKAFYTNPVLLSIATIAAFLWFGGFSYDSYMESAGILKFLLGPAVVSLAVPVYRGLDTIKAYWKEIAAGITVGGTVAILSAFYTAEVLGGSSNVLLSIAPKSVTTAIAIGISEKIGGIPSLTAVLVILTGILGNAVGPELLNVFRVRDRVARGLAMGVTSHGLGTARILLEDEIAGGVSGLAMALNGVFTALVLPYLIKIL

SEQ ID NO: 1064 - protein, 126 aa, Thermococcus kodakaraensis KOD1
  misc_feature (414542)..(414542): n is a or c or g or t.
  misc_feature (786890)..(786890): n is a or c or g or t.
  misc_feature (786907)..(786907): n is a or c or g or t.
  misc_feature (786944)..(786946): n is a or c or g or t.
  misc_feature (839139)..(839139): n is a or c or g or t.
  misc_feature (1128488)..(1128488): n is a or c or g or t.
  misc_feature (1128499)..(1128499): n is a or c or g or t.
  misc_feature (1128505)..(1128506): n is a or c or g or t.
  misc_feature (1128517)..(1128518): n is a or c or g or t.
  misc_feature (1128539)..(1128540): n is a or c or g or t.
  misc_feature (1561400)..(1561400): n is a or c or g or t.
  misc_feature (1561477)..(1561477): n is a or c or g or t.
  misc_feature (1561545)..(1561545): n is a or c or g or t.
  misc_feature (1767941)..(1767941): n is a or c or g or t.
VMEEFEVGIKRGKYPNLEIPLNVIELTEEERELYTLLNQSLGKGEASCIAVAKFRGGIMLSDDYDARKKARLLGVKVSGTIGVLVLGVRKGVLELEDANGLLNEMIKKGFYSPIKRLEEVIPSSSP

SEQ ID NO: 1065 - protein, 161 aa, Thermococcus kodakaraensis KOD1
  misc_feature (414542)..(414542): n is a or c or g or t.
  misc_feature (786890)..(786890): n is a or c or g or t.
  misc_feature (786907)..(786907): n is a or c or g or t.
  misc_feature (786944)..(786946): n is a or c or g or t.
  misc_feature (839139)..(839139): n is a or c or g or t.
  misc_feature (1128488)..(1128488): n is a or c or g or t.
  misc_feature (1128499)..(1128499): n is a or c or g or t.
  misc_feature (1128505)..(1128506): n is a or c or g or t.
  misc_feature (1128517)..(1128518): n is a or c or g or t.
  misc_feature (1128539)..(1128540): n is a or c or g or t.
  misc_feature (1561400)..(1561400): n is a or c or g or t.
  misc_feature (1561477)..(1561477): n is a or c or g or t.
  misc_feature (1561545)..(1561545): n is a or c or g or t.
  misc_feature (1767941)..(1767941): n is a or c or g or t.
MKKSLLLAMAIIQELPVLVLDEPTSMVDIVTKHRLWDVIRNSNREGILLASHDMNEVKALCDRVYLLVYGKIVTSGTPADIVSMVKMPTEVRLIPGREIPQSILPKEHKKRGDLYELAFDTLEDALRTVDAILKSAGVSYLEIESPSFENLVINLIGRDGE

SEQ ID NO: 1066 - protein, 488 aa, Thermococcus kodakaraensis KOD1
  misc_feature (414542)..(414542): n is a or c or g or t.
  misc_feature (786890)..(786890): n is a or c or g or t.
  misc_feature (786907)..(786907): n is a or c or g or t.
  misc_feature (786944)..(786946): n is a or c or g or t.
  misc_feature (839139)..(839139): n is a or c or g or t.
  misc_feature (1128488)..(1128488): n is a or c or g or t.
  misc_feature (1128499)..(1128499): n is a or c or g or t.
  misc_feature (1128505)..(1128506): n is a or c or g or t.
  misc_feature (1128517)..(1128518): n is a or c or g or t.
  misc_feature (1128539)..(1128540): n is a or c or g or t.
  misc_feature (1561400)..(1561400): n is a or c or g or t.
  misc_feature (1561477)..(1561477): n is a or c or g or t.
  misc_feature (1561545)..(1561545): n is a or c or g or t.
  misc_feature (1767941)..(1767941): n is a or c or g or t.
VGQCLFRQEGQGNLSALPKGFGWPQISRSPHRSGQGVLLIGQSLLSSPLLNSTMFTIVARARKDAKALQYINERNYGGFLEVKSLGGGRSFEEIEDGLNEVLGEPYIPIFLFGEKEKALMEDILEVVKESEKPFYARLLRTKKVRNMRVDELYANLEEIKARFRLGIEWKNAYSLNPENPFGVEVHPDYDIYLAVGDGFRKAMKSLLDVDLGENSLVLRKLMNQEVYFSGPNKVAEVSKKLGFPTEVLWRCPCTEDVSLEDLMAANRDYIEAFANASKEFLRRFKGYDIVVPWSGGKDSTAALILAKEAFGEVNAVYVRMEYEMPETEEYIEKLAGKLGVNLIRVDVPMPIEKFGMPTHRNRWCTKMKVEALYNAVSEFENPLLVVGDRDGESARRRLKPPVVERKTDFGQILEVMPIKFWSGMMVQLFILMRGFDLHPLYYEGFYRLGCTVCPSLAEWEVELLKRKGVKDLPLTHASSGAGEVRGRE

SEQ ID NO: 1067 - protein, 429 aa, Thermococcus kodakaraensis KOD1
  misc_feature (414542)..(414542): n is a or c or g or t.
  misc_feature (786890)..(786890): n is a or c or g or t.
  misc_feature (786907)..(786907): n is a or c or g or t.
  misc_feature (786944)..(786946): n is a or c or g or t.
  misc_feature (839139)..(839139): n is a or c or g or t.
  misc_feature (1128488)..(1128488): n is a or c or g or t.
  misc_feature (1128499)..(1128499): n is a or c or g or t.
  misc_feature (1128505)..(1128506): n is a or c or g or t.
  misc_feature (1128517)..(1128518): n is a or c or g or t.
  misc_feature (1128539)..(1128540): n is a or c or g or t.
  misc_feature (1561400)..(1561400): n is a or c or g or t.
  misc_feature (1561477)..(1561477): n is a or c or g or t.
  misc_feature (1561545)..(1561545): n is a or c or g or t.
  misc_feature (1767941)..(1767941): n is a or c or g or t.
MIDVIESLAEILNSKDVEWEIYWESGRSGSFRIERETLDRSQRKFYSGIGLRVGLNGKLGFSYITGIHHSRSELEKFVERTIKLAKVSEVPFRGFPVPSKVPEVKGIYDRKIEEIPFEDAHALALQYAEKMRELKEKETLSGSISLAFERYGVVNSNGVELEASSTYMGVSAYAVREDTPGNGSFYQSYRSLQGIEALEEAIMKAKEDAELSARAKRLEPYEGEVVLEPEAVLSIVEVLLENFYGDEVYYGRSRFSSFGDRVASEDFTLLDDSTLEGLPGSYPFDGEGTPGQRTTLIENGILKGFLLDHTYASLLGLKSTGNAVRSFRTVPSIGSSNLVVEPGKEGLEDFEGIIIKNVFGEHTANPVSGDFSLPVGLGYVVRDGELVPFKDNMLVGNVFDLLKTAEPGKAIKRISSFMAPRVKVHAKIV

SEQ ID NO: 1068 - protein, 713 aa, Thermococcus kodakaraensis KOD1
  misc_feature (414542)..(414542): n is a or c or g or t.
  misc_feature (786890)..(786890): n is a or c or g or t.
  misc_feature (786907)..(786907): n is a or c or g or t.
  misc_feature (786944)..(786946): n is a or c or g or t.
  misc_feature (839139)..(839139): n is a or c or g or t.
  misc_feature (1128488)..(1128488): n is a or c or g or t.
  misc_feature (1128499)..(1128499): n is a or c or g or t.
  misc_feature (1128505)..(1128506): n is a or c or g or t.
  misc_feature (1128517)..(1128518): n is a or c or g or t.
  misc_feature (1128539)..(1128540): n is a or c or g or t.
  misc_feature (1561400)..(1561400): n is a or c or g or t.
  misc_feature (1561477)..(1561477): n is a or c or g or t.
  misc_feature (1561545)..(1561545): n is a or c or g or t.
  misc_feature (1767941)..(1767941): n is a or c or g or t.
MGRLVSVVLIVLLLTPIASAWEVPERGIIYQVMVDRFYDGNTSNNEPFYDPTHSNYRLYWGGDLEGLIEKLDYIKSLGVSMIWVSPLNDNINSLAYGSAPYHGYWTRDYKRIEEHFGGWEDFRRLVKEAKKRGICIIVDYVPNHSNPVNYGEYGALYDNGTFLTDYFKDTKNAEVNPITGIRENVYHHNGNIYTWSGIPLKYANLYGLADFNQLNPWVDSYLTEGAMLFVDSGACGLRIDAVKHMELGWLETFYLRLYSKGPLFIYGEYFTPSLQKGDDLYEFYRYSNVSPVLSIPIREDIVRIFAFFGGLDKLSEELGDYYSHFVYPTKAVNFLDSHDLVRFLNAGDRKDEIQRFHMALALTLTLPGIPVIYYGDESYLVSKDGKGDPYNRPTMVFDNTTEASRIIRTLGGLRKTNDALVFGDFMTVTASYETWAFERTFGNHSLLVVMNKGPAVNLTFSVDWPDGNYRDALYGGEMVVSGGKASVYLPRDSVYVFHIEGEQKKPLIGSITPYAARPGQEIVIGGAGFGKGGKVIIGGREAKVLSWEDGKIVVEVPRLETSAAWVNVTVVSDGGRSPPRPLRYYSGNDVPALIALNASLVGEVSGTLWLSGDLPELGEPRPLLKSSMGYYFTVAPLPEGVPFSVRLYEGKAWGALRPLNLTLYGVGNRTVTLTEKPPGVSEGQKAGQKDVALYALSVVMIAALIAVVWKRKG

SEQ ID NO: 1069 - protein, 261 aa, Thermococcus kodakaraensis KOD1
  misc_feature (414542)..(414542): n is a or c or g or t.
  misc_feature (786890)..(786890): n is a or c or g or t.
  misc_feature (786907)..(786907): n is a or c or g or t.
  misc_feature (786944)..(786946): n is a or c or g or t.
  misc_feature (839139)..(839139): n is a or c or g or t.
  misc_feature (1128488)..(1128488): n is a or c or g or t.
  misc_feature (1128499)..(1128499): n is a or c or g or t.
  misc_feature (1128505)..(1128506): n is a or c or g or t.
  misc_feature (1128517)..(1128518): n is a or c or g or t.
  misc_feature (1128539)..(1128540): n is a or c or g or t.
  misc_feature (1561400)..(1561400): n is a or c or g or t.
  misc_feature (1561477)..(1561477): n is a or c or g or t.
  misc_feature (1561545)..(1561545): n is a or c or g or t.
  misc_feature (1767941)..(1767941): n is a or c or g or t.
MDFERKPLIGMVHLKPLPGSYLYNGDFDSVIEAALRDAVTLEEAGFDAVMVENFGDVPFPKYADKTTVASLAVVAKAIRDEVSLPLGVNVLRNDGIAAYSIAYAVKADFIRVNVLSGVAYTDQGIIEGIAHELAMLRKRLPSEIKVFADVHVKHAVHFGDFEDAFLDTVERGLADAVVVSGKATGRPVDVDKLALAKEISPVPVIVGSGTSYDNLPELWKYADGFIVGTWIKRDGRVENEVSLERARKLVELAKELRQSSI

SEQ ID NO: 1070 - protein, 834 aa, Thermococcus kodakaraensis KOD1
  misc_feature (414542)..(414542): n is a or c or g or t.
  misc_feature (786890)..(786890): n is a or c or g or t.
  misc_feature (786907)..(786907): n is a or c or g or t.
  misc_feature (786944)..(786946): n is a or c or g or t.
  misc_feature (839139)..(839139): n is a or c or g or t.
  misc_feature (1128488)..(1128488): n is a or c or g or t.
  misc_feature (1128499)..(1128499): n is a or c or g or t.
  misc_feature (1128505)..(1128506): n is a or c or g or t.
  misc_feature (1128517)..(1128518): n is a or c or g or t.
  misc_feature (1128539)..(1128540): n is a or c or g or t.
  misc_feature (1561400)..(1561400): n is a or c or g or t.
  misc_feature (1561477)..(1561477): n is a or c or g or t.
  misc_feature (1561545)..(1561545): n is a or c or g or t.
  misc_feature (1767941)..(1767941): n is a or c or g or t.
VNVRVFVGVMIVILFLAPFTTGAVSPPTGALQGLGINIVQTSSIQENGANSVVLRGRIVKDGVNYTVLVTITEYPIRTSEDLTAVEIGDVPEPGVSIAPALSKVLQNSGGSENGGDVSFLLGYNVYEASFYPTTLDGKPVEDNVTVSVNTGLTSFYALDFPFGDLRISIQLLGKYLNFQRDPDSFLSTACNLNQNNQTECHTEFMEDEYNSYLSSMLSMKAYAYSQASSLGKSVRNAVLASLKSQSYPAKLLSDFQLCVPGSGCVKISPGYLGTLTFNETDVENGARLMFTTAVFDRNSDVSGIQAYYIDPSGQYGGEAIKLHSAQEFYTYMATPKNSTVAYAWINRSSTTIPVVLDVAIKPGQLKEGKVRVVFVVSDGSGSRSKEISWDFVFAGNFTDYSLDVLTPKDGASLKQIIDGLFSVPLYAEVRGSGAKDLYALVTLPDGSSKRLPVEGGEILDVLYISDPTVKEGALTIGLYGKVKGEEKLLAKRSVHVTLASVEVPGDEIDNDMDGLVDCDDPDIATCDACIMQKKLEWAESLMERHIDYINKMIETDPGMKSVYDLYIEHLRELHDRYKDDPDRMAKEMNAYMEEKVYRNQEIKGYISIFADDPEKRHQLRQIAEKYRYDPIMRRIKMRSFIYENSKSEAEREATMNAILTGILEPPKWLVGGQYGSGGALDWANFVASNFETVGDTVKLKGTSTVKMLRTPANIFIVAQDARALMKQAEELKKMNLPESTKVSIIVLDGATKIGKLLDPTGYFGNMADATIGAVVNLRKKIEERNQGWFTWNGYVLHETAKPGIYEDYETGKKFKRISGGWLSPPTFVEVKENE

SEQ ID NO: 1071 - protein, 440 aa, Thermococcus kodakaraensis KOD1
  misc_feature (414542)..(414542): n is a or c or g or t.
  misc_feature (786890)..(786890): n is a or c or g or t.
  misc_feature (786907)..(786907): n is a or c or g or t.
  misc_feature (786944)..(786946): n is a or c or g or t.
  misc_feature (839139)..(839139): n is a or c or g or t.
  misc_feature (1128488)..(1128488): n is a or c or g or t.
  misc_feature (1128499)..(1128499): n is a or c or g or t.
  misc_feature (1128505)..(1128506): n is a or c or g or t.
  misc_feature (1128517)..(1128518): n is a or c or g or t.
  misc_feature (1128539)..(1128540): n is a or c or g or t.
  misc_feature (1561400)..(1561400): n is a or c or g or t.
  misc_feature (1561477)..(1561477): n is a or c or g or t.
  misc_feature (1561545)..(1561545): n is a or c or g or t.
  misc_feature (1767941)..(1767941): n is a or c or g or t.
VSEMKEALQRLREYFTRTTEGRYLVVVLAMALIVFTAVLALPVKLIEPDDATYYAAMKAFAQGKLIITRSELMDFQREIIEKGLAVGNFRAIQYVSVGTGYALEKAPGYPFILAAFYRLGIERFVNLFFGLLALIVFYRMMSKAFSPRTALFSSIILLSNATFLAMFYRIYMSDFVSMALVLIGLGLYYLGLEDGDWKKGIISSLSLGASVLVRYTNVVAYVALAIYVLWLLRKGEKRALRYSAIAVGASVPMLLALMAYNWAVFGSPFTVGYSKTIGYTNFAFQYILAGKVGEGLSLIWRNLLTHPKLLFEGFPSLILLPAGAYIARRSKITPLLLLWFLAYFGLYFQYEWLRTGLYIFMTRFYLPMAPAVAGLAGIAIERLMEGEDGKAVALTLLAFILLVDISSLAGFFSFALSGVGALGGRPTSVPGRGAPPGPGR

SEQ ID NO: 1072 - protein, 303 aa, Thermococcus kodakaraensis KOD1
  misc_feature (414542)..(414542): n is a or c or g or t.
  misc_feature (786890)..(786890): n is a or c or g or t.
  misc_feature (786907)..(786907): n is a or c or g or t.
  misc_feature (786944)..(786946): n is a or c or g or t.
  misc_feature (839139)..(839139): n is a or c or g or t.
  misc_feature (1128488)..(1128488): n is a or c or g or t.
  misc_feature (1128499)..(1128499): n is a or c or g or t.
  misc_feature (1128505)..(1128506): n is a or c or g or t.
  misc_feature (1128517)..(1128518): n is a or c or g or t.
  misc_feature (1128539)..(1128540): n is a or c or g or t.
  misc_feature (1561400)..(1561400): n is a or c or g or t.
  misc_feature (1561477)..(1561477): n is a or c or g or t.
  misc_feature (1561545)..(1561545): n is a or c or g or t.
  misc_feature (1767941)..(1767941): n is a or c or g or t.
VRAMRVPSVYIAEELMPYLRARVSKILYSKGFTQAQIAAWLGTTQAMVSKYLSGKVKAPPREVEELLNVLAEEIARLIEEGAVKEELILFTTRRIIGLFRDKTFCEHYSRYAGVSTEVCSQFFSSTPEKDVLSELGIALRELLALEGFGDLIPEVRSNFAYALPGAKNPSDVASVPGRITLVKGRPFALPPEFGASKFTAGLLLEVMKRRPGIRSVINIRYGKNVERALKMVRFKTAKVKTGGMNEGDAMRAIAAPFEKGVYDAIIDEGGEGVEPLVYIFGGTPFEVLRKVEKLIEVLRGDVS

SEQ ID NO: 1073 - protein, 191 aa, Thermococcus kodakaraensis KOD1
  misc_feature (414542)..(414542): n is a or c or g or t.
  misc_feature (786890)..(786890): n is a or c or g or t.
  misc_feature (786907)..(786907): n is a or c or g or t.
  misc_feature (786944)..(786946): n is a or c or g or t.
  misc_feature (839139)..(839139): n is a or c or g or t.
  misc_feature (1128488)..(1128488): n is a or c or g or t.
  misc_feature (1128499)..(1128499): n is a or c or g or t.
  misc_feature (1128505)..(1128506): n is a or c or g or t.
  misc_feature (1128517)..(1128518): n is a or c or g or t.
  misc_feature (1128539)..(1128540): n is a or c or g or t.
  misc_feature (1561400)..(1561400): n is a or c or g or t.
  misc_feature (1561477)..(1561477): n is a or c or g or t.
  misc_feature (1561545)..(1561545): n is a or c or g or t.
  misc_feature (1767941)..(1767941): n is a or c or g or t.
VLITLGGHPSRALLNPFKALEGVCNMSTSAREASRRIPLAMVVIRPAKLFDIPEVMRIERESFREAYPRGIFLMFLENNPETFLVAEYNGKVVGYVMGYLRPDLEGHIMSIAVDKEYRGNGIGSALLSEAIERLIKRGARYIGLEVRVSNENAIRLYERFGFRKVKRIIGYYSDGEDAYYMLLPAEEWRGS

SEQ ID NO: 1074 - protein, 502 aa, Thermococcus kodakaraensis KOD1
  misc_feature (414542)..(414542): n is a or c or g or t.
  misc_feature (786890)..(786890): n is a or c or g or t.
  misc_feature (786907)..(786907): n is a or c or g or t.
  misc_feature (786944)..(786946): n is a or c or g or t.
  misc_feature (839139)..(839139): n is a or c or g or t.
  misc_feature (1128488)..(1128488): n is a or c or g or t.
  misc_feature (1128499)..(1128499): n is a or c or g or t.
  misc_feature (1128505)..(1128506): n is a or c or g or t.
  misc_feature (1128517)..(1128518): n is a or c or g or t.
  misc_feature (1128539)..(1128540): n is a or c or g or t.
  misc_feature (1561400)..(1561400): n is a or c or g or t.
  misc_feature (1561477)..(1561477): n is a or c or g or t.
  misc_feature (1561545)..(1561545): n is a or c or g or t.
  misc_feature (1767941)..(1767941): n is a or c or g or t.
VIPMTEVPWVEKYRPRKLSEIVNQEKALEQVRAWVEAWLHGNPPKKKALLLAGPPGVGKTTTVYALANEYGFEVIELNASDERTYEKIERYVQAAYTMDILGKRRKLIFLDEADNIEPSGAREIAKLIDKARNPIIMSANHYWEVPREIRNKAQIVEYKRLTQRDIIKALVRILKREGLEVPKEVLYEIAKRANGDLRAAVNDLQTVVTGGVEDAVEVLAYRDTEKSVFQALAQLFATDNAKRAKLAVLGVDMMPNELLQWIDENVPYVYYRPEDIARAYEALSRADIYLGRAQRTGNYGLWKYATDMMTAGVAVAGIKKKGFVKIYPPKTIKLLTESKEERSLRDSVIKKIMSEMHMAKLEAIETLRYLRVIFENNPDLAAHFVVFLDLSEKEVEFITGDKEKAKTIWAKSMNIEKKLKKEGELEARAKEAERRVEAAEEEETMEAGEPEEELEEVEEEELTEEELEEAEEEIETVGKKEKPEKEKTKKGKQATLFDFLKK

SEQ ID NO: 1075 - protein, 245 aa, Thermococcus kodakaraensis KOD1
  misc_feature (414542)..(414542): n is a or c or g or t.
  misc_feature (786890)..(786890): n is a or c or g or t.
  misc_feature (786907)..(786907): n is a or c or g or t.
  misc_feature (786944)..(786946): n is a or c or g or t.
  misc_feature (839139)..(839139): n is a or c or g or t.
  misc_feature (1128488)..(1128488): n is a or c or g or t.
  misc_feature (1128499)..(1128499): n is a or c or g or t.
  misc_feature (1128505)..(1128506): n is a or c or g or t.
  misc_feature (1128517)..(1128518): n is a or c or g or t.
  misc_feature (1128539)..(1128540): n is a or c or g or t.
  misc_feature (1561400)..(1561400): n is a or c or g or t.
  misc_feature (1561477)..(1561477): n is a or c or g or t.
  misc_feature (1561545)..(1561545): n is a or c or g or t.
  misc_feature (1767941)..(1767941): n is a or c or g or t.
VPMDVDELKARLGDFEGMHSSFEEVFSRLYEPEEEPTEVVRKLHSLSAKKLELASHLYKELSAIGGRVEDLAKELYKNEHQMKFRLEEVMSLLGRDDYEGRARLKAALDRLVQFHRLYDYAIRKALSELSAEVEGLTLLGENQKKVPVSILEELRKTKAIESQLETLKRFLYRLYVHPSDVHRVEQALREWHAKGLLWVEARNVEKASGVREAGEILEGLALIGVIEKKDRGGESVYRHKAYSQN

SEQ ID NO: 1076 - protein, 121 aa, Thermococcus kodakaraensis KOD1
  misc_feature (414542)..(414542): n is a or c or g or t.
  misc_feature (786890)..(786890): n is a or c or g or t.
  misc_feature (786907)..(786907): n is a or c or g or t.
  misc_feature (786944)..(786946): n is a or c or g or t.
  misc_feature (839139)..(839139): n is a or c or g or t.
  misc_feature (1128488)..(1128488): n is a or c or g or t.
  misc_feature (1128499)..(1128499): n is a or c or g or t.
  misc_feature (1128505)..(1128506): n is a or c or g or t.
  misc_feature (1128517)..(1128518): n is a or c or g or t.
  misc_feature (1128539)..(1128540): n is a or c or g or t.
  misc_feature (1561400)..(1561400): n is a or c or g or t.
  misc_feature (1561477)..(1561477): n is a or c or g or t.
  misc_feature (1561545)..(1561545): n is a or c or g or t.
  misc_feature (1767941)..(1767941): n is a or c or g or t.
MMTEKKKGLIVREPYATLIVEGEKVWEIRKSRTKIRGEVLIISNGKAIGKAELVDVLGPFSPEELAEHFDKHRAEPEFLKEYSNGKPLYAWVFKNAEKFEKPKEVEMAKGVQIWANVVLKD

SEQ ID NO: 1077 - protein, 529 aa, Thermococcus kodakaraensis KOD1
  misc_feature (414542)..(414542): n is a or c or g or t.
  misc_feature (786890)..(786890): n is a or c or g or t.
  misc_feature (786907)..(786907): n is a or c or g or t.
  misc_feature (786944)..(786946): n is a or c or g or t.
  misc_feature (839139)..(839139): n is a or c or g or t.
  misc_feature (1128488)..(1128488): n is a or c or g or t.
  misc_feature (1128499)..(1128499): n is a or c or g or t.
  misc_feature (1128505)..(1128506): n is a or c or g or t.
  misc_feature (1128517)..(1128518): n is a or c or g or t.
  misc_feature (1128539)..(1128540): n is a or c or g or t.
  misc_feature (1561400)..(1561400): n is a or c or g or t.
  misc_feature (1561477)..(1561477): n is a or c or g or t.
  misc_feature (1561545)..(1561545): n is a or c or g or t.
  misc_feature (1767941)..(1767941): n is a or c or g or t.
VVKMVHWADYMAEKIIRERGDKEEYVVESGITPSGYVHIGNFREFFTAYIVGHALRDRGKRVRHIHMWDDYDRFRKVPKNVPPEWKEHLTKPVREVPDPWGCHESYADHFMSLFEEEISKLGIEADFLHASELYKSGEYAKEIRLALEKRDEIKAILDKYRERAKQPPLEDSWQPVMIYCPHCRKEAEFVSWDGEWKVSYKCPHCGAEGETDIREGNVKLRWRVDWPMRWAHFKVDFEPAGKDHLAAGSSYDTGKEIVEKVFGWKAPLTLMYEFVGIKGQKGKMSGSKGNVILLSDLYEVLEPGIIRFIYAKARPNKELRIDLGLGLLNLYDEFDRVERIYFGLEHAKNPEEEEELKRTYELSMPKLPERLVAQAPFRFLVTLVQMPHLDEDGIIRILQEQGHVPENLTDDDIERIKLRIRLAKNWVEKYAPDDVKFSLLERPPEIELRPEIREAMLEVAEWLEEHERFSVDELNNVIFDAAKKRGIPSKEWFKALYNIFIGKDRGPRLAPFLASLNREFVIKRLRLEG

SEQ ID NO: 1078 - protein, 426 aa, Thermococcus kodakaraensis KOD1
  misc_feature (414542)..(414542): n is a or c or g or t.
  misc_feature (786890)..(786890): n is a or c or g or t.
  misc_feature (786907)..(786907): n is a or c or g or t.
  misc_feature (786944)..(786946): n is a or c or g or t.
  misc_feature (839139)..(839139): n is a or c or g or t.
  misc_feature (1128488)..(1128488): n is a or c or g or t.
  misc_feature (1128499)..(1128499): n is a or c or g or t.
  misc_feature (1128505)..(1128506): n is a or c or g or t.
  misc_feature (1128517)..(1128518): n is a or c or g or t.
  misc_feature (1128539)..(1128540): n is a or c or g or t.
  misc_feature (1561400)..(1561400): n is a or c or g or t.
  misc_feature (1561477)..(1561477): n is a or c or g or t.
  misc_feature (1561545)..(1561545): n is a or c or g or t.
  misc_feature (1767941)..(1767941): n is a or c or g or t.
MASLMVLNMLKGSGPRLRPSSGRTETVVRSSSRRPTTGEWWCWMVKAVGIDSGTKSMDIFGFDDETGEVIVDASVDRNRVTENPGIIIELLREVQEEHGKIDAIVGPCGYGIPLKPAREATDAEIALATFITEADVGRRLKIVGLRELMLMMREADDLNIYFTPGVIHLPTVPEWRKANRIDLGTADKVFTAALSIVREAERKGVPYSETNLIAVEIGFAYTSAMAVKNGQIVDGMAGTAGFPGYLGMGFMDGELAYALANALEDFGKMVLFQGGAAYVAGIDPFSVSPEEFVGLAKEDEEVRKGYEAMIEAIVKDVFALLPSVTPDSIYLSGRFSRIPEFFRDVKEALENAFETYGFSVDVLKLESRARAKEAAEGSSIIANGIAGGKYRELVETLRLGESSGSIFDWVKLKEREKLRIFEKLIV

SEQ ID NO: 1079 - protein, 87 aa, Thermococcus kodakaraensis KOD1
  misc_feature (414542)..(414542): n is a or c or g or t.
  misc_feature (786890)..(786890): n is a or c or g or t.
  misc_feature (786907)..(786907): n is a or c or g or t.
  misc_feature (786944)..(786946): n is a or c or g or t.
  misc_feature (839139)..(839139): n is a or c or g or t.
  misc_feature (1128488)..(1128488): n is a or c or g or t.
  misc_feature (1128499)..(1128499): n is a or c or g or t.
  misc_feature (1128505)..(1128506): n is a or c or g or t.
  misc_feature (1128517)..(1128518): n is a or c or g or t.
  misc_feature (1128539)..(1128540): n is a or c or g or t.
  misc_feature (1561400)..(1561400): n is a or c or g or t.
  misc_feature (1561477)..(1561477): n is a or c or g or t.
  misc_feature (1561545)..(1561545): n is a or c or g or t.
  misc_feature (1767941)..(1767941): n is a or c or g or t.
MEFRKIQFTGRSSYIISLPKKWVKMNNLKQGDAVPLVVNPDGSITIFPKEVKEVSEKKILTISKKYSPDMAIRLVISAYIQATTFLR

SEQ ID NO: 1080 - protein, 110 aa, Thermococcus kodakaraensis KOD1
  misc_feature (414542)..(414542): n is a or c or g or t.
  misc_feature (786890)..(786890): n is a or c or g or t.
  misc_feature (786907)..(786907): n is a or c or g or t.
  misc_feature (786944)..(786946): n is a or c or g or t.
  misc_feature (839139)..(839139): n is a or c or g or t.
  misc_feature (1128488)..(1128488): n is a or c or g or t.
  misc_feature (1128499)..(1128499): n is a or c or g or t.
  misc_feature (1128505)..(1128506): n is a or c or g or t.
  misc_feature (1128517)..(1128518): n is a or c or g or t.
  misc_feature (1128539)..(1128540): n is a or c or g or t.
  misc_feature (1561400)..(1561400): n is a or c or g or t.
  misc_feature (1561477)..(1561477): n is a or c or g or t.
  misc_feature (1561545)..(1561545): n is a or c or g or t.
  misc_feature (1767941)..(1767941): n is a or c or g or t.
MFPYIAFTPIKGTRLENREPPSLEHYRKIQLAKYLVSIGKEDAIVFDGDSIKGFALSKDEVAKIPTTVFMTHGCPGCNRPYYNERPGKEPYNYPLAPKREDFERTLRLIL

SEQ ID NO: 1081 - protein, 78 aa, Thermococcus kodakaraensis KOD1
  misc_feature (414542)..(414542): n is a or c or g or t.
  misc_feature (786890)..(786890): n is a or c or g or t.
  misc_feature (786907)..(786907): n is a or c or g or t.
  misc_feature (786944)..(786946): n is a or c or g or t.
  misc_feature (839139)..(839139): n is a or c or g or t.
  misc_feature (1128488)..(1128488): n is a or c or g or t.
  misc_feature (1128499)..(1128499): n is a or c or g or t.
  misc_feature (1128505)..(1128506): n is a or c or g or t.
  misc_feature (1128517)..(1128518): n is a or c or g or t.
  misc_feature (1128539)..(1128540): n is a or c or g or t.
  misc_feature (1561400)..(1561400): n is a or c or g or t.
  misc_feature (1561477)..(1561477): n is a or c or g or t.
  misc_feature (1561545)..(1561545): n is a or c or g or t.
  misc_feature (1767941)..(1767941): n is a or c or g or t.
MPLTKVTRNYQITIPAEIRKALGIKEGEYLDVELRGDEIVIKRAKRKWKTFRLGRKITEEELERLEEEAMEEEMAWRP

SEQ ID NO: 1082 - protein, 21 aa, Thermococcus kodakaraensis KOD1
  misc_feature (414542)..(414542): n is a or c or g or t.
  misc_feature (786890)..(786890): n is a or c or g or t.
  misc_feature (786907)..(786907): n is a or c or g or t.
  misc_feature (786944)..(786946): n is a or c or g or t.
  misc_feature (839139)..(839139): n is a or c or g or t.
  misc_feature (1128488)..(1128488): n is a or c or g or t.
  misc_feature (1128499)..(1128499): n is a or c or g or t.
  misc_feature (1128505)..(1128506): n is a or c or g or t.
  misc_feature (1128517)..(1128518): n is a or c or g or t.
  misc_feature (1128539)..(1128540): n is a or c or g or t.
  misc_feature (1561400)..(1561400): n is a or c or g or t.
  misc_feature (1561477)..(1561477): n is a or c or g or t.
  misc_feature (1561545)..(1561545): n is a or c or g or t.
  misc_feature (1767941)..(1767941): n is a or c or g or t.
MTRRIFGTVIVVIPSDTVVGT

SEQ ID NO: 1083 - protein, 413 aa, Thermococcus kodakaraensis KOD1
  misc_feature (414542)..(414542): n is a or c or g or t.
  misc_feature (786890)..(786890): n is a or c or g or t.
  misc_feature (786907)..(786907): n is a or c or g or t.
  misc_feature (786944)..(786946): n is a or c or g or t.
  misc_feature (839139)..(839139): n is a or c or g or t.
  misc_feature (1128488)..(1128488): n is a or c or g or t.
  misc_feature (1128499)..(1128499): n is a or c or g or t.
  misc_feature (1128505)..(1128506): n is a or c or g or t.
  misc_feature (1128517)..(1128518): n is a or c or g or t.
  misc_feature (1128539)..(1128540): n is a or c or g or t.
  misc_feature (1561400)..(1561400): n is a or c or g or t.
  misc_feature (1561477)..(1561477): n is a or c or g or t.
  misc_feature (1561545)..(1561545): n is a or c or g or t.
  misc_feature (1767941)..(1767941): n is a or c or g or t.
MVFKLLEQAGIKIDLDDEPKKVQTAPQFDDDDENEIRIVIVGVGGSGNNTITRLYDLGVQGAELIAMNTDAQALKHAKAHKKLLLGKDLTQGKGSGGDPEVGYRAAEASAHEIAETIGDADLVFITAGMGNGTGTGAAPVVARVIKERARHNGRFREPLVISVVTYPFKNEGKIREEKAKAGIKALLYYSDTVVIIENDKLLQLVPKLPINAAFRFADEIIARMVKGITETIKLPSMVNIDFADVYSIMHNGGAALIGIGESDSSNRAVDAVKNALQNKLLDVEYGSGEKALVHFTVGPDVSLGEINEAMNIVYEKLGEKSEIKWGARIDEDMGKMVRAMVIMTGVKSPHILGGETALQLPVKESLLPAEPKAGFNSFEDKIYKVISRKSDEKPGSDMRGYINKLLADFDDLS

SEQ ID NO: 1084 - protein, 136 aa, Thermococcus kodakaraensis KOD1
  misc_feature (414542)..(414542): n is a or c or g or t.
  misc_feature (786890)..(786890): n is a or c or g or t.
  misc_feature (786907)..(786907): n is a or c or g or t.
  misc_feature (786944)..(786946): n is a or c or g or t.
  misc_feature (839139)..(839139): n is a or c or g or t.
  misc_feature (1128488)..(1128488): n is a or c or g or t.
  misc_feature (1128499)..(1128499): n is a or c or g or t.
  misc_feature (1128505)..(1128506): n is a or c or g or t.
  misc_feature (1128517)..(1128518): n is a or c or g or t.
  misc_feature (1128539)..(1128540): n is a or c or g or t.
  misc_feature (1561400)..(1561400): n is a or c or g or t.
  misc_feature (1561477)..(1561477): n is a or c or g or t.
  misc_feature (1561545)..(1561545): n is a or c or g or t.
  misc_feature (1767941)..(1767941): n is a or c or g or t.
VRVRAYLSLSRTVGLLRPSKSLPKRWLKLSKDKLPRLFDGSINELTRPSKPKKEKTTDLKKDKMQKTLYITKDMNRKLIELYGEEGRRQSIIVEDAVNLYYYLKRALGEKKFEELMSAVKREDPEFLRDYLSRFKL

SEQ ID NO: 1085 - protein, 115 aa, Thermococcus kodakaraensis KOD1
  misc_feature (414542)..(414542): n is a or c or g or t.
  misc_feature (786890)..(786890): n is a or c or g or t.
  misc_feature (786907)..(786907): n is a or c or g or t.
  misc_feature (786944)..(786946): n is a or c or g or t.
  misc_feature (839139)..(839139): n is a or c or g or t.
  misc_feature (1128488)..(1128488): n is a or c or g or t.
  misc_feature (1128499)..(1128499): n is a or c or g or t.
  misc_feature (1128505)..(1128506): n is a or c or g or t.
  misc_feature (1128517)..(1128518): n is a or c or g or t.
  misc_feature (1128539)..(1128540): n is a or c or g or t.
  misc_feature (1561400)..(1561400): n is a or c or g or t.
  misc_feature (1561477)..(1561477): n is a or c or g or t.
  misc_feature (1561545)..(1561545): n is a or c or g or t.
  misc_feature (1767941)..(1767941): n is a or c or g or t.
MKRLGVVSHYAKQGFLIVRTNWVPSLNDPVVDKELKPVGVVKDVFGPVNYPYVAVKPRVKDPEKYVGALLYVGRREKGGKKAPQKGKTSGKNRSPKKARKGKTGKRSGPTPRRRG

SEQ ID NO: 1086 - protein, 143 aa, Thermococcus kodakaraensis KOD1
  misc_feature (414542)..(414542): n is a or c or g or t.
  misc_feature (786890)..(786890): n is a or c or g or t.
  misc_feature (786907)..(786907): n is a or c or g or t.
  misc_feature (786944)..(786946): n is a or c or g or t.
  misc_feature (839139)..(839139): n is a or c or g or t.
  misc_feature (1128488)..(1128488): n is a or c or g or t.
  misc_feature (1128499)..(1128499): n is a or c or g or t.
  misc_feature (1128505)..(1128506): n is a or c or g or t.
  misc_feature (1128517)..(1128518): n is a or c or g or t.
  misc_feature (1128539)..(1128540): n is a or c or g or t.
  misc_feature (1561400)..(1561400): n is a or c or g or t.
  misc_feature (1561477)..(1561477): n is a or c or g or t.
  misc_feature (1561545)..(1561545): n is a or c or g or t.
  misc_feature (1767941)..(1767941): n is a or c or g or t.
MLREVIHCHGHENVKATHRSTLEFTKEDFLTPRGDCIICIGADKAINDLNDEFKNALREGKKLLIRIKVGDLVDEVVAWGSPELILDHDVSMVVRKSTYIDARTLAIRANKAARDVDRRIIELLKNPGQRAIIELIIEDNENL

SEQ ID NO: 1087 - DNA, 2089378 bp, Thermococcus kodakaraensis KOD1 (residues 1-1,044,689 of 2,089,378)
  CDS (5371)..(6090): Predicted hydrolases of the HAD superfamily
  CDS (6094)..(6459): Uncharacterized ACR
  CDS (9352)..(10377): TPR-repeat-containing proteins
  CDS (10414)..(11214): DNA repair photolyase
  CDS (12967)..(13179): Ribosomal protein S17E
  CDS (17779)..(18600): Sugar kinases
  CDS (22600)..(23907): Predicted sugar nucleotidyltransferases
  CDS (23950)..(25098): Myo-inositol-1-phosphate synthase
  CDS (25771)..(26412): Orotidine-5'-phosphate decarboxylase
  CDS (26932)..(27381): Cytidylyltransferase COG0615 TagD
  CDS (30229)..(30636): Uncharacterized ACR
  CDS (39907)..(40272): Predicted transcriptional regulator
  CDS (40279)..(41058): Zn-dependent protease with chaperone function
  CDS (41065)..(41601): Deoxycytidylate deaminase
  CDS (45175)..(46368): ATP-dependent 26S proteasome regulatory subunit
  CDS (48562)..(49062): TPR-repeat-containing proteins
  CDS (59284)..(59895): Dolichol kinase
  CDS (68302)..(68943): Predicted Zn-dependent hydrolases of the beta-lactamase fold
  CDS (68953)..(69615): RecA/RadA recombinase
  CDS (72814)..(73746): Molybdenum cofactor biosynthesis enzyme
  CDS (73810)..(74853): ABC-type transport system involved in multi-copper enzyme maturat ion
  CDS (76864)..(77067): Predicted ATPase of the AAA superfamily
  CDS (84802)..(85158): Transcriptional regulator
  CDS (89665)..(92316): ATPase involved in DNA repair
  CDS (96055)..(97200): Deoxyguanosine/deoxyadenosine kinase
  CDS (98677)..(99666): ATPase components of various ABC-type transport systems
  CDS (103654)..(105009): Uncharacterized ACR
  CDS (107500)..(108432): Aspartate carbamoyltransferase
  CDS (108436)..(108894): Aspartate carbamoyltransferase regulatory subunit
  CDS (109609)..(110412): Uncharacterized ATPases of the PP-loop superfamily
  CDS (111979)..(112407)
  CDS (123688)..(127467): Pseudouridylate synthases
  CDS (129169)..(129381): Chromosome segregation ATPases
  CDS (137503)..(139590): Archaeal serine proteases
  CDS (143029)..(143385): Beta-glucosidase-related glycosidases
  CDS (144802)..(146760): Aldehyde:ferredoxin oxidoreductase
  CDS (150073)..(151413): Protoporphyrinogen oxidase
  CDS (151543)..(152490): Carbamate kinase
  CDS (152728)..(153633): Uncharacterized archaeal coiled-coil domain
  CDS (153643)..(155349): Queuine tRNA-ribosyltransferases
  CDS (156142)..(156450): Phenylalanyl-tRNA synthetase alpha subunit
  CDS (158887)..(160341): Lysyl-tRNA synthetase class II
  CDS (165061)..(165411): Predicted transcriptional regulators
  CDS (168988)..(170685): ATP-dependent DNA ligase
  CDS (171499)..(172068): Orotate phosphoribosyltransferase
  CDS (175789)..(176457): Ribulose-5-phosphate 4-epimerase and related epimerases and aldol ases
  CDS (179917)..(181251): Acyl-CoA synthetase (NDP forming)
  CDS (181312)..(182289): Metal-dependent proteases with possible chaperone activity
  CDS (188497)..(189207): Dinucleotide-utilizing enzymes involved in molybdopterin and thia mine biosynthesis family 2
  CDS (190123)..(190548): Molybdopterin converting factor
  CDS (201160)..(201834): Deoxyribose-phosphate aldolase
  CDS (207106)..(207588): Uncharacterized protein sharing a conserved domain with thiamine biosynthesis protein ThiI
  CDS (207619)..(208107): Uncharacterized ACR
  CDS (225592)..(226476): 2-polyprenylphenol hydroxylase and related flavodoxin oxidoreduct ases~ COG0543 UbiB
  CDS (227278)..(228564): Coenzyme F420-reducing hydrogenase
  CDS (228637)..(228822)
  CDS (229237)..(229683): Ni
  CDS (229771)..(229998): Uncharacterized ArCR
  CDS (235636)..(235941): ATP-dependent Lon protease
  CDS (241267)..(242187): ABC-type transport system involved in multi-copper enzyme maturat ion
  CDS (242194)..(243111): ABC-type multidrug transport system
  CDS (243436)..(244137): Predicted Ser/Thr protein kinase
  CDS (249532)..(250863): Predicted membrane protein
  CDS (250870)..(252270): Uncharacterized ACR
  CDS (255220)..(255672): Predicted transcriptional regulators
  CDS (269602)..(269808): Uncharacterized BCR
  CDS (282721)..(283467): ATPases involved in chromosome partitioning
  CDS (283525)..(283857): Superfamily II DNA and RNA helicases COG0513 SrmB
  CDS (286015)..(287133): Hydrogenase maturation factor
  CDS (291262)..(291504)
  CDS (291817)..(292143): Predicted nucleotidyltransferases
  CDS (307759)..(309399): Archaeal/vacuolar-type H+-ATPase subunit C
  CDS (312838)..(313305)
  CDS (314233)..(314889): Phosphate transport regulator (distant homolog of PhoU)
  CDS (314893)..(315807): Phosphoglycerate dehydrogenase and related dehydrogenases
  CDS (316075)..(316725): Tartrate dehydratase alpha subunit/Fumarate hydratase class I
  CDS (321109)..(321459): Uncharacterized protein involved in chromosome partitioning
  misc_feature (321437)..(321437): n is a or c or g or t.
  CDS (321493)..(322299): Uncharacterized ArCR
  CDS (324769)..(325242): Transcriptional regulators
  CDS (325885)..(326535): Chromosome segregation ATPases
  CDS (330643)..(331884): GTPases - translation elongation factors COG0050 TufB
  CDS (331918)..(332349): Uncharacterized proteins of PilT N-term./Vapc superfamily
  CDS (334087)..(335910): Transcription-repair coupling factor - superfamily II helicase CO G1197 Mfd
  CDS (345421)..(345684): DNA-directed RNA polymerase specialized sigma subunits
  CDS (348829)..(349443): Carbamoylphosphate synthase small subunit COG0505 CarA
  CDS (349873)..(350601): Chromate transport protein ChrA
  CDS (351955)..(352485): ABC-type transport system involved in cytochrome c biogenesis
  CDS (378664)..(381210): RecA/RadA recombinase
  CDS (404800)..(405810): Aminopeptidase N
  CDS (405883)..(406560): 2-keto-4-pentenoate hydratase/2-oxohepta-3-ene-1
  CDS (414379)..(415413): ABC-type dipeptide/oligopeptide/nickel transport systems
  CDS (416692)..(416736)
  CDS (416833)..(417522): ABC-type transport systems
  CDS (436687)..(438186): Zn-dependent carboxypeptidases
  CDS (449623)..(450708): Uncharacterized ACR
  CDS (453013)..(454329): Beta-glucosidase/6-phospho-beta-glucosidase/beta- galactosidase
  CDS (461764)..(462369): DNA-directed RNA polymerase beta subunit/140 kD subunit (split ge ne in Mjan
  CDS (468151)..(470115): Alpha-amylase/alpha-mannosidase
  CDS (479188)..(480147): ABC-type dipeptide/oligopeptide/nickel transport system
  CDS (481693)..(482466): NAD synthase
  CDS (482476)..(483339): Permeases of the drug/metabolite transporter (DMT) superfamily CO G0697 RhaT
  CDS (494494)..(495696): Predicted SAM-dependent methyltransferases
  CDS (523606)..(524418): Uncharacterized proteins
  misc_feature (527833)..(527833): n is a or c or g or t.
  misc_feature (527901)..(527901): n is a or c or g or t.
  misc_feature (527978)..(527978): n is a or c or g or t.
  CDS (528367)..(528996): ABC-type dipeptide/oligopeptide/nickel transport systems
  CDS (530044)..(530988): ABC-type dipeptide/oligopeptide/nickel transport systems
  CDS (531940)..(532923): ABC-type dipeptide/oligopeptide/nickel transport system
  CDS (533083)..(533904): Predicted phosphosugar isomerases
  CDS (537370)..(537741): Predicted nucleic acid-binding protein
  CDS (588424)..(589485): Nucleoside-diphosphate-sugar epimerases COG0451 WcaG
  CDS (590872)..(591363): C4-dicarboxylate transporter
  CDS (592162)..(592701): Isopropylmalate/homocitrate/citramalate synthases
  CDS (593818)..(594765): GAF domain-containing proteins
  CDS (596947)..(597156): DNA-directed RNA polymerase subunit E''
  CDS (597640)..(597972): Ribosomal protein S24E
  CDS (600070)..(601125): Predicted methyltransferases
  CDS (606598)..(607329): Predicted transcriptional regulators
  CDS (607597)..(608418): Cysteine synthase
  CDS (620359)..(620880): Conserved protein/domain typically associated with flavoprotein o xygenases
  CDS (621769)..(622779): Fe-S oxidoreductases
  CDS (627652)..(628035): Excinuclease ATPase subunit
  CDS (630862)..(631005)
  CDS (642634)..(642957): Uncharacterized ACR
  CDS (647194)..(647490): Phosphoserine aminotransferase COG1932 SerC
  CDS (649396)..(650106): Uncharacterized ACR
  CDS (650851)..(651609): RNase PH
  CDS (668455)..(668928): NADH:ubiquinone oxidoreductase 24 kD subunit
  CDS (670720)..(673578): NADPH-dependent glutamate synthase beta chain and related oxidore ductases COG0493 GltD
  CDS (701800)..(703317): Predicted membrane protein
  CDS (708094)..(708846): Uncharacterized ACR
  CDS (723913)..(725406): Uncharacterized FAD-dependent dehydrogenases
  CDS (732976)..(733557): Predicted ATPases involved in pili and flagella biosynthesis
  CDS (740890)..(741930): Ribosomal protein L3
  CDS (745972)..(746325): Ribosomal protein S17
  CDS (746329)..(746754): Ribosomal protein L14
  CDS (748429)..(748599): Ribosomal protein S14
  CDS (749005)..(749568): Ribosomal protein L6
  CDS (750424)..(751038): Ribosomal protein L18
  CDS (752233)..(752679): Ribosomal protein L15
  CDS (754828)..(755358): Uncharacterized membrane protein
  CDS (756625)..(757335): Dehydrogenases with different specificities (related to short-cha in alcohol dehydrogenases) COG1028 FabG
  CDS (757813)..(758838): Pseudouridine synthase
  CDS (764551)..(765576): Enolase
  CDS (769300)..(769758): Transcriptional regulators
  CDS (773227)..(773337)
  CDS (780325)..(781389): Threonine synthase
  CDS (782656)..(783132): Uncharacterized ACR
  CDS (784924)..(785688): Predicted nucleotide-utilizing enzyme related to molybdopterin-bi osynthesis enzyme MoeA
  CDS (785761)..(786447): Aspartate racemase
  CDS (806344)..(806994): Uncharacterized ACR
  CDS (812689)..(813258): Uncharacterized ArCR
  CDS (827122)..(829149): Uncharacterized ACR
  CDS (832942)..(833796): Glutamate dehydrogenase/leucine dehydrogenase
  CDS (837817)..(838185): Sulfate permease and related transporters (MFS superfamily)
  CDS (843253)..(844374): Cell division GTPase
  CDS (844405)..(844590): Protein translocase subunit Sss1
  CDS (846364)..(847395): Ribosomal protein L10
  CDS (848482)..(848577)
  CDS (851002)..(851403): Small primase-like proteins (Toprim domain)
  CDS (861676)..(862302): Thymidylate kinase
  CDS (867865)..(868638): Glycerophosphoryl diester phosphodiesterase
  CDS (873517)..(874128): Predicted dehydrogenase
  CDS (876274)..(876618): NADH dehydrogenase/NADH:ubiquinone oxidoreductase 75 kD subunit ( chain G)
  CDS (890983)..(891249): 3-Methyladenine DNA glycosylase
  CDS (891262)..(891519): SH3 domain protein
  CDS (892048)..(892257): ABC-type Fe3+-siderophores transport systems
  CDS (900472)..(901128): DNA gyrase (topoisomerase II) A subunit
  CDS (902854)..(903114)
  CDS (907462)..(907659): Predicted transcriptional regulators
  CDS (908017)..(908775): ABC-type multidrug transport system
  CDS (915742)..(916356): NADH:flavin oxidoreductases
  CDS (917473)..(918357): 2-polyprenylphenol hydroxylase and related flavodoxin oxidoreduct ases~ COG0543 UbiB
  CDS (919906)..(920700): 4-hydroxybenzoate polyprenyltransferase
  CDS (929824)..(931017): RecA-superfamily ATPases implicated in signal transduction
  CDS (933379)..(933912): Nucleoside diphosphate kinase
  CDS (951637)..(954123): Uncharacterized membrane protein
  CDS (954253)..(956634): Phosphoenolpyruvate synthase/pyruvate phosphate dikinase
  CDS (956719)..(956946): Regulators of stationary/sporulation gene expression
  CDS (956956)..(957372): Predicted nucleic acid-binding protein
  CDS (960406)..(960843): Uracil phosphoribosyltransferase
  misc_feature (960838)..(960839): n is a or c or g or t.
  misc_feature (960860)..(960861): n is a or c or g or t.
  misc_feature (960872)..(960873): n is a or c or g or t.
  misc_feature (960879)..(960879): n is a or c or g or t.
  CDS (960883)..(961116): Uracil phosphoribosyltransferase
  misc_feature (960890)..(960890): n is a or c or g or t.
  CDS (964264)..(964809): Putative intracellular protease/amidase
  CDS (965632)..(966861): Molybdopterin biosynthesis enzyme
  CDS (969640)..(971292): Predicted metal-dependent RNase
  CDS (982114)..(982692): Predicted transcriptional regulator with C-terminal CBS domains
  CDS (986197)..(986592): Predicted transcriptional regulators
  CDS (987052)..(987510): Transcriptional regulators
  CDS (987868)..(988305): Predicted membrane protein
  CDS (999739)..(999894): Fructose/tagatose bisphosphate aldolase
  CDS (999994)..(1000563): Uncharacterized ArCR
  CDS (1013518)..(1014018): Predicted regulator of amino acid metabolism (contains the ACT do main)
  CDS (1014784)..(1015038): Multisubunit Na+/H+ antiporter
  CDS (1015690)..(1016418): Multisubunit Na+/H+ antiporter
  CDS (1018240)..(1020090): Formate hydrogenlyase subunit 3/Multisubunit Na+/H+ antiporter
  CDS (1020091)..(1020984): Formate hydrogenlyase subunit 4
  CDS (1021567)..(1022163): NADH:ubiquinone oxidoreductase 27 kD subunit
  CDS (1023355)..(1024008): Formate hydrogenlyase subunit 6/NADH:ubiquinone oxidoreductase 23 kD subunit (chain I)
  CDS (1024378)..(1024722)
  CDS (1037383)..(1037670): Uncharacterized ArCR
  CDS (1038103)..(1039782): CTP synthase (UTP-ammonia lyase)
  CDS (1040617)..(1040694)
  CDS (1049674)..(1051152): Trk-type K+ transport systems
  CDS (1058428)..(1059102): Nuclease subunit of the excinuclease complex
  CDS (1059310)..(1059861): Type I restriction-modification system methyltransferase subunit
  CDS (1064593)..(1065597): Periplasmic serine proteases (ClpP class) COG0616 SppA
  CDS (1065598)..(1066077): Predicted Zn-dependent proteases and their inactivated homologs
  CDS (1074967)..(1075383): Flagellar hook capping protein
  CDS (1092820)..(1093500): ATPases of the AAA+ class
  CDS (1100995)..(1101861): Pyruvate:ferredoxin oxidoreductase and related 2-oxoacid:ferredox in oxidoreductases
  CDS (1102132)..(1102527): Uncharacterized ACR
  CDS (1103026)..(1104174): Pyruvate:ferredoxin oxidoreductase and related 2-oxoacid:ferredox in oxidoreductases
  CDS (1106425)..(1106898): Uncharacterized ACR
  CDS (1112575)..(1113144): Thermophilic glucose-6-phosphate isomerase and related metalloenz ymes COG2140 -
  CDS (1114606)..(1116012): Mannose-1-phosphate guanylyltransferase
  CDS (1123948)..(1124547): ATPase involved in DNA repair
  CDS (1125574)..(1126785): PLP-dependent aminotransferases
  CDS (1128049)..(1131738): Topoisomerase IA
  CDS (1139716)..(1141299): DNA-directed RNA polymerase beta' subunit/160 kD subunit (split g ene in archaea and Syn)
  CDS (1143637)..(1143945): Ribosomal protein L30E
  CDS (1144384)..(1144836): Ribosomal protein S12
  CDS (1145833)..(1146021): Orotate phosphoribosyltransferase
  CDS (1154986)..(1155459): Uncharacterized ACR
  CDS (1170673)..(1170723)
  CDS (1181161)..(1181403): Uncharacterized ACR
  CDS (1186804)..(1187682): Putative transcription activator
  CDS (1193281)..(1193703): Acylphosphatases
  CDS (1202200)..(1202811)
  CDS (1202839)..(1203684)
  CDS (1210720)..(1211169): Predicted prefoldin
  CDS (1224559)..(1225257): Biotin-(acetyl-CoA carboxylase) ligase
  CDS (1225357)..(1226649): Na+/H+-dicarboxylate symporters
  CDS (1226833)..(1228245): ABC-type dipeptide/oligopeptide/nickel transport systems
  CDS (1228294)..(1228974): Predicted metal-dependent hydrolases related to alanyl-tRNA synth etase HxxxH domain
  CDS (1237495)..(1237560)
  CDS (1238053)..(1238244): Ribosomal protein L37E
  CDS (1243726)..(1244781): Xaa-Pro aminopeptidase
  CDS (1245319)..(1246392): Predicted RNA-binding proteins
  misc_feature (1250239)..(1250239): n is a or c or g or t.
  CDS (1259650)..(1260393): GTPases
  CDS (1266808)..(1268232): Acyl-CoA synthetase (NDP forming)
  CDS (1278112)..(1278531): Predicted transposase
  CDS (1298320)..(1298940): Translin (RNA-binding protein
  misc_feature (1302432)..(1302434): n is a or c or g or t.
  misc_feature (1302471)..(1302471): n is a or c or g or t.
  misc_feature (1302488)..(1302488): n is a or c or g or t.
  CDS (1317571)..(1318095): Cation transport ATPases
  CDS (1331749)..(1332420): Predicted amidohydrolase
  CDS (1338664)..(1339170): Predicted ATPases of PP-loop superfamily
  CDS (1339501)..(1339938): Uncharacterized ACR
  CDS (1341025)..(1341612): GTP:adenosylcobinamide-phosphate guanylyltransferase
  CDS (1344775)..(1345791): NaMN:DMB phosphoribosyltransferase
  CDS (1348855)..(1349691): Aldo/keto reductases
  CDS (1359592)..(1360296): Transcriptional regulators
  CDS (1365064)..(1366236)
  CDS (1366897)..(1367034): Exoribonucleases
  CDS (1372951)..(1373835): Pyruvate:ferredoxin oxidoreductase and related 2-oxoacid:ferredox in oxidoreductases
  CDS (1373908)..(1374354): Peroxiredoxin
  CDS (1384129)..(1385541): Dolichyl-phosphate-mannose--protein O-mannosyl transferase PMT1
  CDS (1388374)..(1389150): Predicted serine/threonine protein kinases
  CDS (1389868)..(1391577): DNA topoisomerase VI
  CDS (1392724)..(1393968): Uncharacterized ArCR
  CDS (1396558)..(1397991): Periplasmic serine proteases (ClpP class) COG0616 SppA
  CDS (1398025)..(1398828): Uncharacterized ACR
  CDS (1398865)..(1399062): Dihydrolipoamide acyltransferases
  CDS (1401745)..(1402515): Archaeal fructose-1
  CDS (1411228)..(1412076): Integrase
  CDS (1446280)..(1446867): Molybdopterin-guanine dinucleotide biosynthesis protein A
  CDS (1448197)..(1448985): ABC-type cobalt transport system
  CDS (1450378)..(1451244): Predicted membrane proteins
  CDS (1457539)..(1458357): Iron-regulated ABC transporter ATPase subunit SufC
  CDS (1460389)..(1461546): Uncharacterized proteins of WD40-like repeat family
  CDS (1464868)..(1465077): Putative protein-S-isoprenylcysteine methyltransferase
  CDS (1469032)..(1469262): Protein
  CDS (1469263)..(1469490): Protein
  CDS (1472752)..(1473261): Uncharacterized ACR
  CDS (1480753)..(1481700): Fe-S oxidoreductases
  CDS (1483972)..(1485402): Predicted Zn-dependent proteases and their inactivated homologs
  CDS (1486807)..(1487466): Predicted DNA binding domain
  CDS (1488379)..(1488420)
  CDS (1488433)..(1489284): ABC-type multidrug transport system
  CDS (1491580)..(1491858): Fatty acid/phospholipid biosynthesis enzyme
  CDS (1494583)..(1494639)
  CDS (1498339)..(1499349): Lactate dehydrogenase and related dehydrogenases COG1052 LdhA
  CDS (1499410)..(1501158): MutS-like ATPases involved in mismatch repair
  CDS (1501711)..(1501995): Aspartate/aromatic aminotransferase
  CDS (1504150)..(1505796): Chaperonin GroEL (HSP60 family)
  CDS (1514722)..(1517229): ATPases of the AAA+ class
  CDS (1517308)..(1517643): Uncharacterized ACR
  CDS (1518649)..(1519206): Uncharacterized protein involved in cation transport
  CDS (1520866)..(1521513): Predicted phosphoribosyltransferases
  CDS (1521592)..(1521822): Uncharacterized stress-induced protein
  CDS (1524067)..(1525068): ABC-type Mn/Zn transport system
  CDS (1531273)..(1532499): Predicted transposases
  CDS (1552507)..(1552560)
  CDS (1552684)..(1554012): Methyl-accepting chemotaxis protein
  CDS (1556848)..(1557255): Acetolactate synthase
  CDS (1563793)..(1563981): Predicted nucleic acid-binding protein
  CDS (1564336)..(1564650): Uncharacterized protein involved in cysteine biosynthesis
  CDS (1570618)..(1571100): Predicted hydrolase of alkaline phosphatase superfamily
  CDS (1571575)..(1572375): Chromosome segregation ATPases
  CDS (1574155)..(1574535): Uncharacterized proteins of the AP superfamily
  CDS (1578499)..(1579215): Uncharacterized ACR
  CDS (1582714)..(1583136): Thymidine phosphorylase
  CDS (1586914)..(1587720): DNA polymerase III beta subunit
  CDS (1588126)..(1588440): rRNA methylases
  CDS (1598734)..(1599861): Tyrosyl-tRNA synthetase
  CDS (1600399)..(1602897): Specific archaeal helicases
  CDS (1609216)..(1609749): CBS domains
  CDS (1624957)..(1625112): Ribosomal protein L23
  CDS (1639084)..(1640433): Predicted hydrolase of the alpha/beta superfamily
  CDS (1640479)..(1643181): Distinct helicase family with a unique C-terminal domain includin g a metal-binding cysteine cluster
  CDS (1648975)..(1649682): Predicted Zn-dependent proteases
  CDS (1652566)..(1653078): Transcriptional regulators
  CDS (1658593)..(1658760): Amidases related to nicotinamidase
  misc_feature (1674836)..(1674836): n is a or c or g or t.
  CDS (1683415)..(1683750): Uncharacterized Zn-finger containing protein
  CDS (1696057)..(1696764): Acyl-CoA synthetase (NDP forming)
  CDS (1697191)..(1697808): Uncharacterized ACR
  CDS (1699246)..(1700322): Uncharacterized ACR
  CDS (1703239)..(1704348): Predicted ATPase of the AAA superfamily
  CDS (1704907)..(1705134): Regulators of stationary/sporulation gene expression
  CDS (1709068)..(1710201): Methyl-accepting chemotaxis protein
  CDS (1713070)..(1713843): Uncharacterized ACR
  CDS (1713844)..(1714545): Predicted transposase
  CDS (1731997)..(1732929): ATP-utilizing enzymes of ATP-grasp superfamily (probably carbolig ases)
  CDS (1742710)..(1742772)
  CDS (1751083)..(1751667): MutS-like ATPases involved in mismatch repair
  CDS (1769527)..(1769571)
  CDS (1770139)..(1771113): Uncharacterized ACR
  CDS (1777753)..(1778361): Nitroreductase
  CDS (1778362)..(1778736): ABC-type thiamine transport system
  CDS (1780492)..(1781067): Thiamine biosynthesis ATP pyrophosphatase
  CDS (1800331)..(1800873): Predicted nucleotidyltransferases
  CDS (1801225)..(1801620): DNA-directed RNA polymerase sigma subunits (sigma70/sigma32)
  CDS (1804279)..(1804965): Allophanate hydrolase subunit 1
  CDS (1806106)..(1806834): Histone acetyltransferase HPA2 and related acetyltransferases COG 0454 WecD
  CDS (1808857)..(1809519): Histidinol phosphatase and related hydrolases of the PHP family C OG1387 HIS2
  CDS (1818100)..(1819077): Uncharacterized ACR
  CDS (1823116)..(1824483): Translation elongation and release factors (GTPases)
  CDS (1830145)..(1830822): Uridylate kinase
  CDS (1834216)..(1834725): Uncharacterized ACR
  CDS (1839772)..(1841181): Aspartate oxidase
  CDS (1848952)..(1849701): Metal-dependent hydrolases of the beta-lactamase superfamily I
  CDS (1854172)..(1854663): 3-isopropylmalate dehydratase small subunit
  CDS (1855789)..(1855950): Uncharacterized paraquat-inducible protein A
  CDS (1858558)..(1859646): PLP-dependent aminotransferases
  CDS (1863574)..(1864488): 3-Deoxy-D-arabino-heptulosonate 7-phosphate (DAHP) synthase
  CDS (1865455)..(1866096): 3-dehydroquinate dehydratase
  CDS (1866526)..(1866906): Shikimate 5-dehydrogenase
  CDS (1867660)..(1868907): 5-enolpyruvylshikimate-3-phosphate synthase
  CDS (1870264)..(1871358): PLP-dependent aminotransferases
  CDS (1891753)..(1892346): Acetyltransferases
  CDS (1892419)..(1893240): Histone acetyltransferase HPA2 and related acetyltransferases COG 0454 WecD
  CDS (1893532)..(1893636)
  CDS (1895020)..(1895226): Acetyltransferases
  CDS (1897579)..(1898748)
  CDS (1901425)..(1902267): Nicotinate-nucleotide pyrophosphorylase
  CDS (1903423)..(1904016): Predicted glutamine amidotransferase involved in pyridoxine biosy nthesis
  CDS (1904443)..(1905942): Sugar permeases
  CDS (1906054)..(1908033): Anaerobic dehydrogenases
  CDS (1915393)..(1915482)
  CDS (1917997)..(1918248): Phosphoribosylformylglycinamidine (FGAM) synthase
  CDS (1923985)..(1924980): ATP-utilizing enzymes of ATP-grasp superfamily (probably carbolig ases)
  CDS (1929295)..(1929861): GMP synthase - Glutamine amidotransferase domain
  CDS (1930360)..(1931220): DNA repair photolyase
  CDS (1934626)..(1935891): Protein implicated in ribosomal biogenesis
  CDS (1939681)..(1940085): Predicted nucleic-acid-binding protein containing a Zn-ribbon
  CDS (1945585)..(1946646): ATPase involved in DNA repair
  CDS (1946671)..(1947525): Endonuclease IV
  CDS (1954831)..(1955493): ABC-type multidrug transport system
  CDS (1958224)..(1959228): ABC-type sugar/spermidine/putrescine/iron/thiamine transport syst ems
  CDS (1971136)..(1971903): Predicted membrane protein
  CDS (1972744)..(1972896): Predicted nucleic-acid-binding protein containing a Zn-ribbon
  CDS (1976359)..(1977735): Acyl-CoA synthetase (NDP forming)
  CDS (1987645)..(1988154): Histone acetyltransferase HPA2 and related acetyltransferases COG 0454 WecD
  CDS (1988173)..(1988463): Uncharacterized ACR
  CDS (1998322)..(1998795): Histone acetyltransferase HPA2 and related acetyltransferases COG 0454 WecD
  CDS (2029510)..(2029674): Dehydrogenases with different specificities (related to short-cha in alcohol dehydrogenases) COG1028 FabG
  CDS (2036773)..(2037315): Uncharacterized ArCR
  CDS (2038819)..(2039100): STAS domain protein
  CDS (2040049)..(2040225)
  CDS (2060044)..(2060787): 5'-nucleotidase/2'
  CDS (2061982)..(2063565): Predicted ATPase involved in replication control
  CDS (2065183)..(2066781): S-adenosylhomocysteine hydrolase
  CDS (2066809)..(2067465): Uncharacterized ACR
  CDS (2081764)..(2081979): DNA-directed RNA polymerase subunit K/omega
  CDS (2082835)..(2083299): Carbamoylphosphate synthase large subunit (split gene in MJ) COG0 458 CarB
ctttcatcccccataatcttgtagaacaatccaggctttattctaaaccccacatcaaggagagatcgtaatagctccccatttttctccgttataaaaccggcatctttgagtaggcgcaaaactgcaaccgtccccataacccgcaggccctcaagccttgcggcttttctggcttttagatcatccaggatagctaccgcgttgagcctcttagccagaccaataacttcaatttctcctgcatggagtccaggatattcgaatggagacgtatcctcgacagtttctaaggatattttgccctctgcaatgagccgggagagcagtgaagtaacttcatcttctctcacgttgatttcatcggccactgctttggggatgaaaacctcgccaaaaagttcaactgccttctcaaggtagccaagttttccgaggacaataatcggagaggaattaaagacgaccctcacgcttcagctcctcccttactcttcttatttcctcgatctcaagctcggcctcttcttcgtcaaggaaagagtattcgactccgagcttgtcgaggagaaacgagagctcctcaagcttaatcccgagcagttgggcggctttctcaaaggttatctgatgacttaccagaagaccaactaccttgaggaaccgctccttttcgcgataatccttgaacaggggaaagctgaacacaatgcggtctatctcctccatactctcacctacaataggtagacttttaacctaataaacttcaccgccacctttttaagccaactttcaaaggccctctcatggagctgttttaccgcgtgagctttcaggaagttgtggctgatgcgctcatgcttgtggaggagcgtgagctgtcatcgaagcacgcccttgagagggtctttaagaaggtagccgggagagaccgcgagaaggcgcgcggtttggcccatgcctacgtcttcgagatcgagaagtggcgcgcgaaaatagacttcataataaactcagttctcaagggttcaaaggttgaagaccttgacccctatcttgcgaaccttctccgtatagggactttcgaaatacacttccgcaaagtgccgcccgccctggcgacggactcgatagtcagggttgtaaaggagaagttcgacttctccagagccaagttcgtaaacgccctaatgcacgagatagagaagttcgacgtagagagggccttaaagagactcaaagagaaggacagaattgagtggctctccgttcgcttttcccacccccgctggtatgtggagtacgttataaacctcttcggctacgacgaggccgtaaggctcctcctcagcaacaaccggccccagaggtattacgtgagggccaacacgctaaagacggacattgattccctccgcgactaccttgaggagaacggcgttaggactgcactaaccccagttccagacgttttaaaggttcttgagtacaaaacacccgtcacgaggcttgactggtacaaagagggcaagttcgtgattcaggatttagcttcggcttacgtcgctcatgtcctttctccagagcctggggagaggttgctcgatctggcggcagctcctggctcaaagaccttccacgccgcggcgctgatggagaacaagggagaaattgtggccgttgactactcctacgaccggcttatgcgcatgaaggagaaggcgaaggttcttggcgttaagaacgtccgcttcgtccacgccgacggccagagcttcagagataaagagaagttcgataagataatcctcgacgccccttgctcgtcatcaggaacataccgccagtttccagaggtgaagtggcgcttcgacgaggcgaagataaagaagattatcagcgtccagaggaacatgctgaggaacgcctacgagaacctcagagaaggaggtgagatgacttattctacctgttcaataaggattgatgaggatgaggagaacgttctctttgctattaacagggtcggcctcgaactgttggattatcccttcagctggggcgataggggctttctggatataggggataaggttttcagggcctggacgcacaggcacgactgcaacagcttcttcatagcgaagctgaagaggtaaaacgactttaacatcccactaaccacagccctgaactacctgaccagagaagagcagattctcaaataagaacacaaatttgaagagaaaagaaatcaaagggcttcagtcaaggtcgcttccgaaatcctcgctaccgcccttgccgccctccttgtccttctcgagcttgctggcggcgatgacgtcgtcgatcctgaggatcattatggcagcctcgctggcgctcttgatggcctgcttcggaaccctgaccggggcgataacgccgcgctcgagcatgtcggccggctcgccctcgaagacgtcaacaccgatggtcggtcccttctccttgtgggcggcgatgaccttaacgagggtctcgatcgggtcgagaccggcgttctcggcgagggtcctcgggatgaccttgagggcctcggcaaaggcctcgatggcgagctgctccttgccgccgacctccttcgcgtactcgtcgagcctgatggcgagctcgatctccggagcaccaccggcggcgacgatcttgccgtcctcgacgatgtccttgacgaccttgacggcgtcctcaagggccctctcgacctcatcaacgacgtgctcggtgccgcccctgatgagtattgtgacggccttcgggttcttgcagccctcgacgaagatcatgttctcgccggcgaccttcctctgctcgacgagctcggcctcaccgaggtcctccggagtgaggtcgcggacgttggtgacgatcttggcgccggtggccttggcgagcttctccatgtcgctcttcttgacccttctaacggccattatgccgtacttggcaaggtagtgctgggcgaggtcgtcaatgcccttctggacgaagacgacattcgcgccgacctccttgatcttgtcgaccatctccctgagcatcttctcctcctgctcaaggaaggcctggagctgctccgggctggtgatcctgatctcggcgtcggtctcggtctccttgacctcgagggcctcgttgatgagggcgatcttagcaccctcgaccctcttcggcatgcctgggtggacgacctccttgtcgatgacgacaccctttatgagctgggtgtccttgacgcttccaccttccttcttctcgaacttgatgttgtcgaggtcgaccttgtaggtctcgccaaccttctcggcaacctgcttgacggcctcaactgctatctcagcgaggtactccctctcctcctcggcagcctttccggtgatggaggtgaccgcggccttcttgagaatctccctgtcctcgacgtcaacgtccttggctatctcgtcgagtatttcctgggctttctctgccgcgagggcgtaacccttgatgattatgctcgggtgaatgttctggtcgagaagctcctcagccttcctcagaagctcaccggcgatgacaacggcagtggtggttccgtcaccggcctccttgtcctgagtcttagcaacctcaaccatcatcttagcagcagggtgctggatgtccatctcgtcgagaatggttgcaccgtcgttggtgatgacgatgtcgccgaggctgtcaacgagcatcttgtccattccctttggaccgagggtggttctaaccgtctcggctataatcctggcagcaagaatgttgagcctctgggcgtcccttccaacatacctctgggttccctcgggcagaataacaactggctggcctgcgagctgggccatctcccctcacccccacccttttttgtttttgagggtggatgagttttagttacaattcgtgttttccgcgctattgttcttttgtgctatttataaagttttcggtaatgattaaaagccaaccaccgcaatggcaacgggaacgatagagcggtgatagggatggactaccgcgagttcttctcccaattcaagcacctcagcgagaagcctgggataggcgggaagataaaaatttaccccgaggacttcattgtaatagaagagcctatcccttcaatctttgaaggaaggaagtacgccatcttcctcctcaagaagcggaactgggagacgatggcggcagtgaaggaaatagccaagagggcagggataaactacagggaaatcggcttcgctggaacgaaggacaggcacgcggtcacctaccagtacataagcgtgccggccgaggccagggaaagggttgagcaggtgagtatcagggacattgaactgcgcttcgtctcctacggcaggttcatcaagctcggacatcttctcggcaacaggttcaggataatagttagagatgtcagcgaagatgcctttgataggactaaggaaatagtgcgggagctcagggagaagggcggcttccccaactacttcggctaccagaggttcggagaaaggagggtagtaaaccacataataggcaaactgctccttcagggggactttgaaggagctgcgaggctcttcttaggggcgcacgatggaagcatggaaggagatgaagccagaaagaacttctgggagaccggagacgttgagagggcgcttgaggagttcccgggctttctgaggtatgaaagaacgctcctccacaggtacaaagatactgggaactggaagagggcctttctcagccttccgctcccaataatgcgcatattcatccacgcctaccagagctacctcttcaacctctacctctcgaggaggattgaagagggcctgcccctgaacgaacccctcgtcggtgacatagtggtgcaggtcaagggaggaattccatacagggacaggacttaccgcgtaactgagaccaaccttgagttcgtgagggaaaaggtaaggaagaaccaagctatggtttcaggtccgctctttgggttcgcgatgaggagggcaaagggccttccaggagagcttgagaaagaaatacttgaggaagagggcctaagcctcgaaaccttcaggaggctgccgaagcctatggccgaacctggcgggagaagagagctcctactgaggcccatggggatggcctatgggtacatccaggaggagggaatgtgcttccgcttcttcctgccgaagggaacatacgccacgagcgttctcagggaaatcatgaaagatcactgatgggaacccttttattgggagcttctccctcattttccgggtgagataaatgacaataaaggcaatatctgtcgacatagacggcacgataacctatcccgaccggcgtcttcacgagaaggccctcgaggcaataaggctcgcagaaagccttggagtacccgtaatgctggttacaggaaacacagtccaattcggggaggcggcggcgatactaatagggacgagcggacccgttgttggagaggacgggggagcgctctcgattaaggaaggaaagctcagaaagagggtctacctgaccaacatggacgaggagtggatactctggggcgagctgaaaaagaggtatcccgaggctctcttgagcttctcaatgcccgagaggaaagccggcctcgtcgtgctcaggactgttcctgtgaaagccgtgagggagctcataaaggaacttggactcaatctcatcgccgttgattctggttttgcaatccacataaagaagccctggataaacaaggggaccgggatagagaaggcctgcgagtatttgggcatctcgccaaaggaagtcgcccacatcggtgacggggaaaacgacctcgacgcatttggagtcgttggttatcgggttgcagttgcacaggccccagaaagcctcaaggaaaaagctgactacgtgacgactaagccctatggggaaggaggtgcggaggccatagagcacatcttgagaaagttcggatatctccccgaagaaaagacctgaagggtggttgtcatgttcaagtacaagcaggttatagtggctagaaaagacctcaagctcagcaaggggaagttcgccgtccaggttgcccacggggccgttactgccgcgataaaagcccagaaggaaaagcccgagtggttcaaggcatggttccacgagggacagaagaaggtcgtcgtcaaggctgaaaacctggaggagctgtttaagctgaaagcggaggcagagaagctcggacttccaacggccctgataaaggacgcagggctgacggaaattccacccgggactgtaacggttctcgccatcgggcccgggccagaagaggtcgtggacaaggtgactgggcacttaaagctcctgtgactcaaaaaggaaatgaaaaagtcaagcaaagcggttcacgtaggttctaatcccaatttctcccagcctctccttcagaccttccacttctctctcaggccagcagtgctccgagcaccaggctccatttctggggctggtcaaaggtgggcccacgagggggttcaggacagcgtaaaagtccgtgtcaacgtgcttaagcccctcctctatccacggccactggtcgagccctctggccacgggtatccttagctccaaggggatgccgtagtccgagattaactcaaggcccataaggaaaagctcccagaggcgctttgatgcttcccctgggaggccgtagagctcagcaggaggggccttcaggtcggtcgctatgtggtcaaccagctccgccttcaggagtctctccaggggtttcaagagcgtgaggttggtgttgagactgatggggaggagttccttggcttccgcgagcagggatgacagctcggcccactgcatcagtggctcgccgccggttatgtggaagtagtccactaggaaggagcttgaggacaagtcgccgaggagagcacctctatcgagggggaagcactccttaccctccgctatcagccagttgtggcagaaagggcacttcagattgcagccgcagagccagagggtaaaggtcaccttcccgtgtacatcgaccatgctgacgctcttccagccgcttgtgagcacggaaccacctccaaaaatcaggaggagtagtgcctcctgctccagaactccctcttcctgtaggggttccagttcttgagcgggcggtagtagcctatgattctgctccagacctcgacgtcctcgctcccgcagtgggggcaagccgtgtggagtcccgttgatgacctcccgcaggcattgcagaccgttactgcaggtgtgtagctccagtagaccagcttcgtcctcaggagccttttggtgagcttcgccagcgcctctgggtcgggctcctctccaaggaagatgtgcatcatgactcctcccgtgaagctcccctggacttcttcctcgatcctaatcctgtcggccagctcaatcggcccgtagtagggggcgatgctcgttgagtatatcgggttctcggggtcgtcgaggtaatccctcagctccgggaactcgcgcaggtctttaatggcgagctttgccgcggcgctctctccggggacttcctcaacgttccagggaattccgctctccctcatccactccctagctttttcgactgcgaactccaccatcctcttcatcagcttcgcggccttcatccactcggcccttgagccctctttccacagatcgggctcgttgaggtataccgccgctgcctcgggaaggccgaggattccgatggtgttgaagtggcttgacgggaactcctcaaggtatgtgtgtatcatgctgtacatctcgcggtagttcgtcagcagcttcacgtacctttccctgaaccagtcggtagtctttctgacggtttcgaggattctggcgtactcctcccagaacctatcgtcgtcccccgccttcagcgcgagcctcggcaggttaaccgttgtgacgttcacagaaccggttacgtctggcatcgcccagaggccaccaaagcgctgtctctcaagcatctccatcgcctcctcctcggcgctctttggggaagcgctgaaggcgaatgcgaactccctcttgtctatgtttatcctgcagcacatcgagtagctcgcatctgggtcaaccacgttcgtgttgagccagtagaagctccccctcttcgcagccgtcgtgaaaacgggctcgaacacctcgggatcgtcccagagcatcttcgcggttcccattatcgttggtatcgggaaggtgaagggctggcccttagcatcgccctccctgagaacgtcaaccagagccaggaagaactcctttgcttccctctcgtagcccccgagcgggccaacctccttcccgtcgtagacagccatatcgcccgtgagcatctccttgggagcgtcgagggtcacggtgaagtttgtaaaaggcgtctgcatcccgaccctgctcgggtagttgaggttgtagacgagcctctgaacgtgctggcgtatcttctccctgctcagaccgtcctttcttatgaagggccccgcgtaccactcgacgcttgagagagcctgagcgccgctgaagtagtgctgcatggttatgaggtagttcgctatgtggtcaacgtaggtgtcgaagtgcctggctggtctagaagttatcgtcggagttctcagcccctttttgagcagccttgaggtgctgtggccagagcagtagggtatgtacaggctgtaagggagcttgtggatgtagacctcccccgagaagtgcgccttcctcccgtcctctggaaccaaggccgtgctctccttcagggcctcctccatgacgtaggcgaagaaccccgtcggacctggatagcggttggcgttttcgagcacgtccagacttttccagccagcgtattcttggatcacgtccttcttcactgcctccattttcaacacctggataatttatccaaatagggtgaatgagaagggagttaataacgattacctttgaaccgatggtcactgttccataaatgtggcaagttttggataaattatccaaattggccacccaattattgacgttcttacaggtcaaaacgtcaggagaaccccacatccaaataaaatgcgtcagaattttgacatttattcaaaaatacaagaatttttctagcaaaatgctccgaatctggacggcatacctttttaacccctcaaccaagataaggcccggtgatcagaaatgagtgaaattaaactcgaatggaaaaaggcccttgaagagaaggactgcgagaagctccttgagctctttgacgattatatcgactcaatcgaggacgaagagaccctcagaaaggagcttgaacgtctcaaagaagttgccctccagtgcgaagacccctacgacctggcccatgagatagcccatgtttattcccacctcggcgatgttgaggcgggaattgaactctacaagaagctcgtcgagatgaaaaaggacgatcccgaagagtacgcgacggcactctattacctcgccgacgcctacgagcactttggaatgcctgagaaagctatagagacctaccagaagctccttgagcatgaagagaaagtcctgaagaacgagaaggagatagccctgaccctcgccaaccttgcggtgaactacgacgagataggcgagaccgagaaggccatagagctcatggagaaggccagagagatattcgagaggctgaacgaggagaagaactacctcataagccttctcgatttggcccacttcaagtacgagctgggcgaatacgacgaagccgaggccctgataaaggaagtcctcaggaaccctagggacgacgaaatagagattaacgccaagctcattgaggccgaaatctgggctgggaggggagactacgataaagccttcaaggccctgcgcgaggccctcgtcaaagcgatagacgtgagcgatgacatcttcggaatcgtcttcgacaccttgatagacttcataagtggactctttgaggaaggctcctacgaggccgttgcaaagaacatggaggcctttgccgagcttttcgaggacgacacagcatacttcttcagggccataggggagctcgccaggtggaaggcgggagacgacgaggccaagaagcgctttgatgaactttacgagaaagtcgagaacgaagaactgaaagaaatcctcgacgagtggaagaagcccaagctggctctcggtttgagtctctgacttttcttttccaacctttactcccggtgcgttgagatggaagtgaatatcataaagacccggataaagagcatctacactccctccaggataccaagagttgactggacggtcaaccagtacgtcggctgcgccttcgcctgctcctactgctacgccaagttcctcacgaagtggaaggactacggtaagtggggaagctgggttgaggttaaggtcaacgcacccgagcttgcaagaaagagggtgaagggaagcgtcgtcatgtcaacggtcagcgacccctaccagccaatagaggccaagttgaagcttacgaggcgggttctccagtacatggacaagaggaacgagctctcaatactaacgaagtcgccgctcgtcacccgggacatagaccttttcaggctctttgacaggatagaggtcggactgacaataaacgggtttagagggagggagaaaaggctctttgagcccctaacgccagttcaggaagcccggattaacgccctgaaggagcttaaagaagccggcctgaaaacctacgttttcgtgagccctataataccggaagttactgacatctcttccatagtggaagaaacacgggacttcgccgactactacttcttcgaagtcctcaacctccgcgcttccggcagggagtttcaaagactccttcaggaggggtatccggagatttacgaaatcctaaccgacgacggaaagttcgggaagttcgtagagaagctcaggagagaaatcaaagagcttggagtgaaaaccgagggaatagagacgcacaagcggggttgggagcttgttaaagtttgaaacaacatcaattaattcccattcccactcggcccagcttcaatctttgcattcctgacatcgcagcccgccaactggagggaagcaatgacccttctggcttcttcctcggttatcctaccctcctcaacggccttttcaaggaggtacagagtcgtaaagcactgggctgggaggagtgggttcctggtcagggcgtagctctgctccctcttgtacatgaagtgccagtcgagctgggccagaactataaacccgacaatcgccaaggcgtaggctatacccacgaactccctgaatgagaacctctcagctatccatggaaccgaatagagctccttaacgaaaacgaagagtatcatgaagctgttggcgatgctgaggtaactcgccgccctcgttatcttcagcttccacaaaaccagcaggtccctcgtccgtacgagccttctgatgtccatattcccacccgaagaaaattgaaaacggcttaaagcccttcagtcgagcatagcgagtatcttgtcgacctcgttggagacctcaacgtcgaagaggtgtatcgtcggcaggagccaccagaggcggtactggtgggtcttgtcttcctctccaaagtactggaagacgaaccttccaaagcccgtcaggtctctgtggacgtcccttacctcccttaagacccttctaaccttcggcgggtactcctcgtagggaaggggaatgctcttgacgaagaccctgtccttgaagaagtccgtcgtcaggccgacgcttcccacgtgcttctcgagctggttgaacttcttctcggtccagaagcggtggagtatgagcctcgggtcttcctttgccagcgggaagttgccgtcctctgtgtcgagccagaactccaggtaaggctgacccttctcgatgactattctcgccaagagtctcgcgttctttggtatctctttctgggtctcgctgatgtggtactcctttcctccttccgtgtatgtctctccctcttccctggtgccagcctttgagacgaagtaggcttccctgccgtctatcgtcccaaggtggaggtcgtagccccaggccttgaggtccttaaacttgaacctcctctcggccgggacaacaccggtgttctcgactatgtagtatccctcgagcattttcatcaccaaaggttagtaaaaatgttgagcttttaaaggttttcgttgtcctcgatgataagctcaatgatggccctctgcccgggatttttcaggagttcgatgatacgcctgtccacatctctggcggccttgttggcccttatagcgagcgttctcgcatctatgtaggtgctttttctgacgaccatggatacatcatggtcaagaataagctcgggactcccccacgcaacgacctcatccacgaggtcaccgacctttatccttatcaggagctttttaccttccctaagtgcatttttgaactcatcgttgaggtcgttgattgctttgtctgccccaatgcatattatgcagtctcctctcggtgtcagaaagtcctctttggtgaattcaagggttgagcggtgcgtggctttgacgttctcgtgcccgtggcagtggattacttccctcaacatggtctcacgttcccggaggcggttaataacgtttgcttctttgaagaaccagccggacgggaaaacctttaaaaggacactcctgattttggttacggctgaagattatccgagaggtggtgagaatgggaaacatcaagcagacgttcattaagaggactgcccgtgagctctttgacaggtaccctgacaagttcaccagggactttgagcacaacaagaagatggtggccgagctcaccaacgttaccagcaagacgataaggaacaggatcgccggctacataacgaggctcgtaagaatgaaggaagagggcaaaatactctaaagtctctctttttcagctttctcctttaacgacttcctaaaagctctctaggtcttccagtatcttctttggaagtttaggtctgagctctttcagtaatctctcgaactccgcctcgttttcctgggcaatccttcgcataaggttctctatgtaagtctcaacaagcaggcggacttcctcaagctcctgcttcattctcatggcctcatcaatgcgcctctgcacctcatcgaggaactgaaccagctcgtccaccttagtctcaattggctccgttgactttatcagctccctagcctgctggtactcggccgtcgccctcggtttcttcggttcgtatatgtctgtgccgaatgtgtatggagtgagcagtacctcaagcctgaagccgcgctttatcgtgtagtactttctgggtctgcccctgggtatcttttctgtcctcccctcgatcagccctgcactctcgagtattctaaggtgctccagcaccgccttctgcccaacgccaagctcttgactcagctcgctgacgaagtatggcctctttgtgagcaggaggagtattctcctcctcgtctcattacccaggatatcgaggagtctcccaaggtctcgatttgactccatagctctcaccccctttccctaacccaaagttagtaaaaagtatttaaacctttttcggtttgagctggtggtaatgtcaaacacacatggagataaaggacagatagaaaaggaagaaaagaacactaaccctgaaacagctcagactggagtaacgtgaccccacttctccagggccctcgcaagctccttgtgagtcttcgcgtactcgtcgagcggtattccctgcattatggcatcgattgcctgcctgactgcccgtgcacctgcggcaggcccgtccggatggccgagggttccacctccgagctggaggactatgtcggttccgagggcctctataacgggctggatgttgcccggatgtaatccaccagagcttgtcgggaacgcggcctttatgctgtagaacttctgctcaaggtggaagacgtcgttttcatcgggcttgtagtggctctccctgagaatcctggcgttctgaatgacgtcccacttgccgccctcaagcttgccagctccagcggttccaacgtggagctggtcaatgcctatgagcctgtaaagcttcgcaagaacgaacatcgagatgccgtggtacgggttcctcgtgaaggccgcgtgcattgccctgtggccgtggatggcaagcccgtaatcggccgcgaggtccctgatgtaccttagcgctccccagccggttataacaacatcaaccatcgcatgcttgagaccaaggtcagcaagaacctcaagcctctgctccatttcgaggaggtcagcggttatgttcgcgaaccatgtcttcttctcacccgtctcgttctctaccttgtcaattatcttcgccattatctcggccctctcctcgaagcggttgtaccacgggctcgtgaggttctcgtcgtccttcatgtagtcggcaccgtttgagagaaggtcgtaggccagcttctcgaactcctccggagaataaccgacctttggctttggaacgacaccatagataggcctgtccttaatctcgagcatcttccttacgccctcgataccgaaggccgggccgtcgaactcccttatgagcttctccgggaagtaaagatcctcaaggcggagcccctttacgcgcttcattccgaaaatgtttccggctatgctcgcgagaaggcccggaaggttggcctcctcaaaggcgtggaacgggtaggctattctgactatccagctgccgtcgcccatgtcgtggaagtcgtaggccttggccgagaggtcggcccatctctcctgctcgtaccagggatagagtgtcgtccaggttccagttgagctctcagctgccacggctccagccgcctgctcgatagtgtagccctctgccggcgtcacacggaatacagctatgatgtccctcttcttgctgggctcgtagcccttgtcaacatagtagtcgtatatcgtatcaaacttctcaaccatgcctttcaccccaggtaaatttaacgttacattgacacacataaaaagttttctggacagatttggccacctaagcacacaattttacagaaaagatattggacagcggagcttaatgagagtttattaggccaatcggggcgttttcatgtctaaatcagatgacggttaaaaactctcagtttttgaccttataagtcaataagttttcccggccaaatttctaactatcccacccaaaatcgccagaaagctggccccataaccgtccttttccgaaagatttatataggcctttgctcctaatttagaacgcagaactctgcagacaaccataaaggaggtgttgtgaatggccgagcttccgattgccccggttgacaggcttataaggaaggccggtgccgcccgcgtcagcgaggaggccgccaaggttctcgccgagcaccttgaggagaaggccctggagatcgccaagaaggccgtcgccctcgcccagcacgccggcagaaagaccgtcaaggctgaggacatcaagcttgccatcaagagctgatggcgctttttgcctctttgccttttcacaacctttctgaagcctaccagaacgttattctctcaacacccacgttttctccggagaacttgagaacagcaaagcctggggaatccatcctgggaaacaccggcgaccccggattgagcagaataacttttttgccataaagggagtgtatatcataatagtatctatgagtgtgaccgaaaacaagaacgtcaacgtccatctcgagggccttgagagttaggaagtgggcgttcagagagagcagctgatggccgtggatcatgcctatctttacgtcttcggcctcgacgacctcttcctcgggaaggttaagcctgtcaacgtttcccctgacggcgagtgttggggcgatctcctcaagcttctcaagaagctcagggctggttatgtcgcctgcatggagaataagctctggctggattttcatgaggtgttcaaataaaagagtagggaggtttctcgtcttgtccccgtagtgagtgtcacttactactgccaccttcaagggtatccctcatatcgggacgtttatgccgagcttttcaacgagctccttatagcggttcctgacggttacttcggttacgtgagcaacttcagcgacttccctctgcgtcttcttttcgccctcaaggagagccgctatgtagagagccgccgcggcgagacccgttgggcccttaccgctggttatcccgcgctttatagcctcgttcaggatttccttggccctcttcttagtcctggcactcactccaagggcgtcgccaaagcggtcaacgtactctattgggctggttggcctgaggttcaaacctaaccccctggccataaagcggtagctcctcccaatttccttctttgagaccttggataccgatgcaatctcgtccagcgttcttggaatgccctccatcctgcaggcggcgtagagtgcggcagagaccataccctctattgaacggccgcggatgagcttcttcatgaccgccttcctgtagagggaagcggcgacctccttaaggtgcctcggcaggcggagctgggcggccatcctgtcaagctcgctgagggcgaatgcaaggtttctctcggcggcgtcgttgatgcgcatcctgcgctgccacatgcggagccttctaagcttgttcctgtacatgccggttatctggttcccgtgtatatccttgtcgcgccagtctatatccgtagaaaggcctttgtcgtggatcatcaacgtcatgggcgcccctgttctggcgcgcttttccctctgacctggctcgaacgccctccactccggcccctcatccactacgttctcctcaattacgtagccgcacttggcacagactatctctccccttcgcgggtcgtatataaattcggtcgaaccgcaaatagggcataccctcttcgggctaatccctctcacccccttctcctgggggtggggccggaacgcttgccagtcttaccttttctagccttctttggagatctgtttttaccgctagtctttcctttctggggggccttcttgccacctttttcccgcctgccaacgtagagaagggcaccaacgtacttctcgggatctttaacccgaggcttaacggcgacatagggataattaaccggaccaaaaacatccttgactactccgacgggcttcagttccttgtcgacaactgggtcattaagcgacggcacccagttcgtcctaactatgagaaagccctgcttcgcgtagtgagaaacaactcccaggcgtttcatagccccaccccaaaaccaggtttccttttaaacttttcgcttttcccctttataaagctttcgataatcagagaaagatttttaacagagagtgccgaatagtaagatttgggaagggtaaaatgaagtgtcttgttgttggccatgttgtcagggacatagttaaaaaaggcaacaaggttcttgaaaggctcggtggcggtgcttattattctgcactcgccctttcaagattctgcgatgttgagatactcacttctttctcaaatctcccagaggagtggatcaaagaattggagtcaatggcgaaactgcaggtagttccctctgagacaacgacgacttacgaactaacgtacctcgacggcaacaggaggaggctaaaacttctagagagggcgtctccaattgaagagcttccagatggagaatacgatgtcctcctcatgaatcccgttgcaagagaagtgccccctgccctggttaccagtgctctcaaaaagttcccatttgttgcggttgacatacaggggtttatccgttcctcaagtccaggagaaattcagtaccagcccatcgacggttcattcttaaagggggtaaagattcttcacgcagaccttggggaataccaatatctgcaggggttctcccccgaattcgttgacgttcttctcctctccaacgggccagagccggggaaggcatttctgcacggaagggagtacacgtttgagccagtccacgtgggagtggacgaatcgactggggcgggagatgtttttcttggagcctttactggattctactcacagtgtcccttcgtgcaggcccttaaacgagcagccgcctttacggcgctgttcctcaagaacaggagcgttgatttttccatggatgacgtgaacgagcttgcgatgaaagtcgaggtgaaaagggtataaaccccctcttccaactcccaacaccgatgatgaaacgtcagcacgctgaatgatgatgagaagggacttccctgaggtggtttcaatggacaggtacgttcttctggttaaggccccgagaggggccgacttatcttcctttagagacgaagcaaaggcgctggcagagaaatacggctttgaagcagagacccacaggtgtatcggccttacggtcgatgccgtgatagtgtacaacaatggaatcgtcctgataaagcggaaaaacgagcccttcaaagaccactacgcccttccaggaggcttcgtcgaatacggcgagaccgttgaggaggcccttctgcgtgaggttaaggaagagacgggacttgacgtgaagccagtgaagctagtgggcgtttattcaaggcccgacagggaccccagaggacacacggtaacggttgctttcctctgcatcggggagggagagctgaaggcaggcgacgacgccaaggaagtcttcgtgttcccgatagaggaagccctgaacctcccactggcatttgaccacggggagatactcagggacgcgctcagtctgaggtgagagcatgaggctcgaataccccgctttcgggaagataatcgttgatggagccacctacgagcacgacatcgtcctctatccaagcggaaaggtcgagcgcaggaagaagaaaataagcaagcaaaaacacgggacgagccacaagctcgaccccgaggaactgaaagaatacctaaccgaggactttgacgttctcgttgtgggaactgggatgtacggaaagctgtcactcctacctgagagcagagaactcataaaagggaaagaagtccttgaactcccaaccaaaaaggccgtcgaagtcttcaacgaactctatggaaagaaaaaagtgctgggaatattccacatcacctgttaaggctccagagaaggagggcatctattgcagccgtcaggagaagggcgattggatacgagaggtaccaagaaccggctatgatgccgactaccaccgcgtttaggatccacactgccaggctcttcaaaatgccgccctgaggcagggccaggccctctgtgccgtggtagtacacatggagggcgatgccgcacgttgccagcgggacgaggacggccattggaaggtagatcggggatgaaaaacccttaagggacaggccgagcagcgccaagacccccaccgccgatggaatcgccgccatagtcaggagcttgcctctgaggaaccgaccccgctcaagcggaagggaaaggaggagctcgaaagacttcacctctattttggtgagggtttccacggacaccgcagagacccagccgagcgccgccacgaaagttatggttgcgagcctgcccccgaacgccccgatatctggattcgaaaaaattcccgccacgtttatgatggggataactatgggcaccagcaggcccgtaaggacgggtgtgttcctcagcgcggtcttgaaatccttcaccatcagagccagctcaggcggatacaccccgagtccgcccgctctcctccttcttccacttgtgtaagaaccctcgcttatcctcacccagaggcgggagataaggacatagtaggcaacccccaggatagcgatgtagattccagcgagcggtgccgaaaacgacggcctgtccacggaaagtacggagagcgggtagataaactcgtaaccgccgagggactccttgatggaggtgtagttctggaggacgtaatcctggaagtagctgaagccgtagaagaggccgaatattaggatgactcccagtgccttagccagactcttgaggtccgcgaaccttccggaggaggtcttcccaaaggagtagtaaacgagcagcccaaaaacgtggccgagcatcaggcctacggcagaccaaaggagtactaacaacccggatgtagccgaaacgaccatcccaatcctgacggcccctggaaccatgaaagccatcactgggagcgattcgaggagcaggagaacgctcatatacctcccgccgagtttaatcgggagcggaaggaggggcttgaaaaggtcgagcgaagctatgtaactagaattcgtaaccgtggcatagaaagctattatgaacggcaggatggcgtacgtggaggccatcacaagcactgcatcacgctctcctttgagcgaagggaagagcatcaggccgaaaacggcatacatagctgtctgaaacaggagcgtctttttcaggtctccggaagagccgagaccgagggaaatcttgcccgccgaacgcgggttgtccttcatcctcctgtaaacgacctcgcggtagaggacttcaaggactttcatcagaacgcctcccttagggcttttactatgccctccacctcgctcttgccctcggtgagcttcaggaatacctcttcaaggctctcctcctttgtgaattccttaagctcctttggagtcccctcggcgacgatctcgccgcggtagatgatccctatcctgtcgcagagcgcctccgcgacctctaatacatgggtcgagaagagtatgctcctcccccgtttcttgaagtcaaggagtagctccttcagaatccttgcgctctttgggtcgagcccgtttacagcctcatcgagaacgagaacctcaggatcgtggaggagggcggagattatcgaaaccttctgcttcgtaccaaagctgagcgtccctattagctccccgaggaaggaatctatcccaaaggccctggagagcttttcaaccctctcttcaagctcctccttgggaactcgtcttatgcttccgacgaatgagaagaactccattggagtgaggctttcgtaaagtgctggagtctcagggatgtatcctgcgatttccttaactttgagaggattagcagaaacgtcaattccatttaccgttacctttcccgacgtgggcggtattattccagccactatcttcatcgtcgtcgatttaccgctcccgttaggtccaagaaggccgtatatctcgccatcgttcacggagaagcttattcccctcactgctgtcgtcggtccgaagctcttaacaaggtcttctatgattatcataaacaaccacccaacgtaaaaaggagaagaagattataaatattttcatgaattggcaactgtactaccaagaactgcctttcggctctaagtgtgcactccttacctctagaactcccgaataactgcactcgttccacttcttctcgacctcgtcaaagacaacccttgccctaaagaacggcgcgtccctcacgaaggtctcaaactcaccgccttccccagcaacgtggaccttgtacttttcgttgagctttatcagctcttccagggccttctcatctatccttcttccgagccagttctggtcaagaccgtaagccgctgttccgactatgaccacgtcaaagatgcctatgatctccctcatgtagtccacagggtctctgtgccatgcgggggcaaaactctctattccaagctctttggcgaccctatctactctctgcttctggtactcgctcgccaaagcgcctacaacgactccatcaatcttcagcccctcaaggacggccttcatgtcctcgacttccttctccttctctccggaggtgaaacccttgacgaggggaatccctattgcccttgcctgaagttcagtgaggtgtatgtttgggacgtggtacatgtagctctcgtcgctctcgctcaccattgagacgaggtacttcacctcaaacccctgcttcagcgcccagtagagggcgtagttcgagtctttcccgcctgagtagaggaccgcaacgcgcattttgctcacccgaaaatttttaaatactaagggttaatttaatctcgagcgtttgagtccttctgacggctcttggagagggccgttaaaaaggtgatggccatggttccagagagggcagtaatcctagcggctggcctcgggacaaggatgggtagaaagcccaagggacttgtcagagtagccgggagggagattctgtacaggacaataaggctgctccaggaaaacggtgttaaaaagttcattgtggtcaccaacgagaggtacgcacccctttatcaggagttcatagagaggcacggctttgacgctgaaatcatcataaaccccgagccggagaagggcaacggccattcccttcaccttgccaaggagaaagtctcagggaagttcgcactgacaatgagcgaccatgtctattccagggacttcatcgagagggcagtaagagggcgaggactaatagcggacagggagccgagatgggttgatattggggaggcaacgaaagttcaggtaaaggacgaaaaggtctggaaaatcgggaaaaggctcaaggaatgggatgcaattgatactgggttcttcgtcctcgatgatgagattttcaaggttacagagatcctcgaaaatgagaagaacggcgactactccctgagcgaggttatggaacgggcaaaggtttcagtgaccttcgttgacggactcggctggacggacgttgacacccccgaagagatcaagagggcaaggaggatgctcgtcagaaccgcagtaaagggaacgggggacgggttcgtcagcagacacctgaacaggaggatttcaacgagggtcagtgaactgctggtagagaaagttacgccgaaccagatgacggttgtaacgttcttactcggcattatctcggcgttgacgacactggtaagccttccgctggcgggaatactctaccagctcagctcaatccttgacggcattgatggagagctcgcaagggcacagttgaggacaagtaagctcggcggctacgttgattcaatcctcgaccgctacgttgacggaagcttcctggcactgctggcctatgcgacgataaacgagccaatctggtacttcgtggcactgctagccctcctcggctcggtgatggtcagctactcaacggagagattcaggggagccttctgcagggacgcctacaaggaggtaccggccctcagaaaactgcccggaaaaagggacgagagagtattcctgacgatgctcttcctgctgtatcagattgcggcctcgataaaggcactcttcctgacccttgccgtactgacgaactttagggttgcactaaccctgtatttcgtcgtcaagaaagtttcacatccgaaaactatttaactactgtaaaatatcttacagcactaaaggaggtgaaggaagatggtgagggttgtcatactcggacagggatacgttgccagcatcttcgcgagcgggcttgagaagataaaggcagggaagatggagccctacggagtcccgctggcagatgagcttccgattaagataaaggacatcgagatcgtgggttcatacgacgttgactccaacaaggttggaaaggacctctatgaagtcgttaagagctacgaccccgatgccccggagagcctcaggggaataaccataaggaagggcgtccacctcggaagcctcaggaaccttccgctcacccctaccggcctcgacgacgagatgacgcttaaggaggctgttgaccacctcgttaacgagtggaaggagcttaagcctgatgttttcgtgaacgtctgcacaacagaggcattcgtcccgttcgagagcagggaggagcttgagaaggccatcgaggagaacaacaaggagaggctcacagcgacacagttctacgtgtatgcagccgccaagtatgccaaggaagtcggtggagcggccttcgtcaatgccattccaaccctcatagcgaacgacccggtcttcgttgagcttgcgaaggagagcaacctagttatcttcggtgacgacggtgcaacaggtgcaacaccgcttaccgcagacattctcagccacctcgcccagaggaaccgctacgtcctcgacatagcccagttcaacataggtggaaaccaggacttcctggctttaaccgatgaggagaggaacagaagcaaggagttcaccaagagctcggtcgttgaggacctgctcggctacaacgccccgcactacatcaagccgaccggcttcctcgaaccgctcggcgacaagaagttcatagccatgcacatcgagtacgtcagcttcaacggtgcccacgacgagctcgtcatcaccggcaggataaacgacagccctgccctcgctggcctgctcgttgacctcgtcaggctcggaaagatagctatcgagaagaaggagttcggaaccgtctacgaggtcaacgccttctacatgaagaaccccggacctaaggaggccaggaacataccgaggataatcgcccacgagaagatgaggatgtgggccgggctgaagcccaggtggctctgagggctttttctccctttcggcaacttttttaataacttcctcccacttcttctggagggaaaccaatgagctggaagaggggagcttatcccgagtttactcttgaagacgtcattgcaacgatttttcttctgagggaaccgattgggagaaaggcaatcgccgaaactctcgacatcggcgaaggcagcgtcaggactctactcaaaaagctcaactggattgatgtcatagattcggcccagcgtgggcactttctaagcaaaacagggaaaaaactccttgagaggcttaaggggctattctcggaggcacacttcgttgggaaagtcgatggaatgcccgcctatgctatcgtcgttaaaaacccgcctcagttcaagagcatcgagctgagggacgaggcaataaggttcttcgcaaagggggccatgatactgatcgttaaaaacggagaacctgtcttccccgaggacgagaggccgctgagagatacaatggaagaacttgcaatgaacattgaggaagtcctgaacttctcagatggagacctaatcgtcgtgacatgggcagaaaacccgtcagatgccatgaagagcgcctatcacgttgccctgaccttaaagaatgacgaaatccccgaagaactcaagtctctcgtgaggtgaggagatggaggagagcaggctcattctggcgctcgacgtttatgatagggagagggcacttgagatagcggagtgcacagcagattacctctgggcaattaaggtaaactggcccctcatcatcggttccggattgaagataatcaccgagctcaagcaggtcacagggcttccgataatagccgacctcaaactcgctgatatccccaacacgaacagactgatagcgagtaaagtattcgaggctggggcagactacataattgcccacggcttcgtaggcagggacagcgttgaggccgttatggagcttggaaaaacgatcatcgttgtcgagatgagccatcccggagctaaagagttcattcagcccgtcaccgacaagctgatcgaacttgcaaacgagctggaacccttcggcgtaatagctcctgcgaccaggccggagcgggtctcgtacatccgttcaaggctcgagagggggataaggattttgactcccggagtgggtgcccagggtgggaaagccagtgatgccatcaaggccggtgctgactacgtgatagtcgggcgctcgatctacggcagtaataacccgcgcgaggcagcaaggagactctatgaggaaattctggaggtggtttgatggagttgaaagtcaaacaccccctcagcaagaaggaaataaaggagataatccgcgagatgagcgagatcttcggcgaggagatagcgaagaaaatgctgaacaagaaggacagggtggaagtggctgagttcgacaagaccaccgaaattctcctcgtgaacgggaagcccttcttcataaggagaaaggagcttgtttttcccctcgtcatagcgctctacgagctctctaacgaagaagacctgaggaagtggccgaggagggtcgttgtggatgagggcgcagttccatacatcctgaacggtgccgacgttatggcggctggcatagttgacgcagacgagaacatcaacgagggcgacttcgtcttcgtggtcgaggagaactacggaaggcccctggcgatagggatagccctcatggacggcaggaagatgaaggagaagccaaagggcaaggccgtgaagaacatccaccacgcgaaggataaaatctggcaggtcacggtgggatgaaatggaagagaagcggaagaagatcagggtcctagttgggggagtctttgacatcctccacgtcggccacatccattttttgaagcaggccaaggagcttggtgacgagctggtcgttatagttgcacacgacgagaccgtgaggatgcagaagaggagagagcccataaacccagcagaagacagggccgaacttctaagggcgataaggtatgtggatgaagtttacataggaacgcccgggacgatagacatggagctagtgaagagaatagaccctgacgtcatagcaatcggcccagaccagttcttcaactgtgaaaagctgaaggaggaactgagaaagcacgggataaacgccgaagtgatacggataccctacctctacaagagcgacagggcgaagacgagcaaaataatccaaaggattgtggaaaccttctgtgaatgattgaactccctgatttcagcagtttagtgattttcagggtttgattttaaagagttttattaaacctctaaattgaagcgtctgattagagcttaaacctgctcagataatcgcgaaggaattcggggtcttcccttttgaccgcgctcattagctcctcgaacttcttctcgccgagggcccgcttgaggtagtagtacaggttgaccgcatcctcgactattatgctctgtctcctcccctcctcaccgtagagctcgatgagctttctgttcatatctttggtgatgtagagagtcttctgcattttatccttcttcaaatcggtggttttctctttcttgggcttagaagggcgggtcaactcgtttattgagccgtcaaaaagcctcgggagtttatccttcgacaatttcaaccacctctttggcaagcttttggaaggccttagaagccctaccgttcggctcaaactcaaatatgctcttaccctcactctgggccttttctagggctatggcctttggtatcgtggtcagtattggagcgtctggataggcctccttcagctccttgaggcgcatcttcgggacttttgtttgcttggtaaacttattgggaacgaggccgaggagcttgaggttctcgttggtctcctccctgatcattctcatcaggttgaacatgagctgcatgccgattactccgaagtagctaagctcgagcggtatcagaacgtagtccgacgcggtgagagaattcacgaggaatattcccatgctgggcgggttgtcaatgaggacgtagtcgtagtctgggagtaccgggataagggccttttcaagtcgtctctcacggttgtaggcgtttattatctcgatctccttggccgataggttcaaatggcttggaatgagatcaaggttctccttgacagggacaatggtctcctcaatctcgctttcccttgtcatcagcgttccaacgttcctgctggagtgctcaagaaccttcatcccgattagaccaaaggtgaggttgaactgggggtcaacgtcaaccaggagaaccctcttgcccatctcggaaagggcgaagccgaggttcatcgtgagcgttgtcttgcccactccccccttctgattggcaacgctgattacgactgccatcggtttcaccctaaaaggaataaaagtcagctgagatcgtcgaaatcggccaggagcttgtttatgtatcccctcatgtcacttcccggcttttcgtcggacttgcgagatatcaccttgtatatcttgtcctcaaaggagttgaatcctgcttttggctcagctgggagcagggactccttcactgggagctggagggctgtttcaccgccgaggatgtgcgggctcttgacgccggtcattatgaccatggcgcggaccatcttacccatgtcctcgtctatcctggcaccccacttgatttcgctcttttcgccaagcttctcatagacgatgttcatggcctcgttgatttcaccgaggctgacgtcgggaccaactgtgaagtggacgagtgccttctctccactgccgtactccacgtcgaggagcttgttctggagagcgttcttgacggcgtcaacggccctgttgcttgagtcgctttcaccgatacctatgagggcagcaccgccgttgtgcattatgctgtaaacgtcggcgaagtctatgttcaccatggacgggagctttatagtttcggttatgcccttgaccatcctggctataatctcatccgcaaagcggaatgccgcgttgatcggaagcttggggacgagctggaggagcttgtcgttctcaattattacgactgtgtccgaatagtacaggagggcctttattccagctttggctttctcttccctgatctttccttcgttcttaaacgggtaggtaacaacgcttatgacgagaggctctctaaagcggccgttgtggcgggcgcgctcctttataaccctggcaacgacgggagcggcacctgtaccagttccgttacccattccggccgttatgaataccaggtcagcgtccccaattgtctcggctatctcatgtgcactcgcctctgcggcacggtatccaacttctggatcgccgccagaaccctttccctgggtcagatcctttccaaggaggagtttcttgtgagctttggcgtgcttgagggcctgcgcgtctgtgttcatggcaataagctcggcaccctgaacaccgagatcgtaaagccttgttatagtgttgtttccagagccaccgacgcccactataactatccttatttcgttctcatcgtcgtcatcgaactgaggtgcagtttgaactttttttggctcatcgtccaggtctatttttatccccgcctgctcgagcagtttaaacaccattttccaaccccctctcccatcggagattccaacattattttatcactaattttagcacttatttgatgatgtagtccggcgttgagcgttcttcagtctccaggcggtacagttcctttttcagaagttcgcggatggcctcacgaatgacctcactcctgttcggataaacgccttttttgacgagctgatccatggcgtttattagcccctgcgggagctggacgctgatgatcctcattctgctcatccctgcaccacccagttcaccaggccgctgaattagttaatgatttaagtagttaaatactttgtggcttaattttaatattttgatattatgattttcaaaaattttttgaagaactcttttaaggcccatttctgaacgatgagacaggtgattgagggtgatccccgtaaccaaaagcatacatatagcgagagtcgatgtacacaatgttgatgatatactcggttacttaggttcgaatgtgcaactagttagcgttgagtgctggagagcggtggccttcgcggcagtactcgctgagagggcagtaaaaaggggcaccccccacgcaaaaactcttgggggggagctgctcctccgcttggctggaacccaccagataagggaagcaataaaagaggtaggagccaaaaacggccccaactacctcgtagtgtttggggacaactcggaggcagaagagattctaagaagccttggtctcgaagagatcgaaatcaaggactgttccgatgaggaagtgaaaagattctttgaaaaaagcgccttagtcgaagttttataggggtttttacaacatttttggcgattctattggataggtttatataactgcctttatcattcccgaactgcccggggggaacatcgatgaggtataagaagagaaagtacttcatggccggcaggataaacatcctccagaggtcgaagataagggagctttttgagaaggcttccaagatggaaaacgtcatctcactcggcatcggcgagccagattttgacacgcccgaggtcataaaagaagccgccaagagggcgattgatgaaggctacactcattacacccccaacgcaggcatccctgagtttagggaggccatcgccgagtactataaggagttctacaacgttgatgttgatatgaacaacataatagtcaccgcgggtgcgtacgaggctacttacctcgccttcgagagcatcctggaacagggcgacgacgtgataatccccgacccggcctttgtctgctacgtcgaagatgccaaaatagccgaggcagggataatccgcatcccgctcagggaggagaacaagttccgcattgaccctgacgagctccttgaggcgataacaaagaggacaagaatgatagtcatgaactacccaaacaacccgacgggagctataatgaagaaggacgttgcgaaggctatagccgatatagcccaggactacaacatctacatcctcagcgacgagccctatgaacacttcctctacgagggagccagacaccacccaatgataaagtacgccccggacaacacgatactcgccaacagcttctcgaagaccttcgccatgacgggctggcgcctcggcttcgccatagcgcctgagcaggtcatccgcgatatgataaagctccacgcttatgtcatcggcaacgttacgtccttcatccagatagcgggcataacggccctgcgcgacaagaggagctgggaagccgtcgaaaggatgaggcaggtgtacgacgagaggagaaagctcgtcctcaagtacctcaacgatatgccgcacataacacctttcagaccgaagggagctttctacatctgggccaagattgatccggagctcgatatgaccagcgaagacttcgccgagtggctccttgagaacgctggagttgtggttatccctggaactgcctttggaaggcagggcgagggctggataaggataagctacgccacagagaaggaaaagctcatagaggccatggagagaatgaaagaggccctctcgaagctgtgaggtggttccatggaaaacctgcttgccgtcttcgtttctatttttctggcggagctcggggataagacccagctcgcgacaatagccttcgcctcaaagtacgggtggaaaaccgcctttctgggggctatcctggggttagcgaccgttaatctgataggtgcccttattggggataaaattggagatgttctaccgattgaagttattcacaaaggcgctggcgttctgttcatagtctttggcatcttaatgctgcttggaaaaatgtgaggggggatataattggcggataaaaggtggaaaacggtcatactggacacgctcgtcatgacggcgggttttgggacgctgagcatgatgggcgttgcaaagcccgatattatcagccactttggaataagcaactcggcctatgacctacagcacgttgcctacgtctttggtctcttcgtcgctttcctgctcggacacacaaagctctacgaggggagctttaagaggagcgtcgcgatagcactcagctgggccgcgattccacagctcctcataccctacgtgggtaactggtacctcgtcgttgccctccgcttcatccagggttttgtagtcagccttgtcccgctcttcagcacccagatagcacgcttctttgtcgcagaaagacccttcgccaagggcataatcctctctggaatattctggggcggggttttcggaagcattagcgcccgctacctcgtcgaagcggttggctggaagatgggcttcgttgtaactgcaatcataatgtacgccgtcctgctcctctggtggcttctcgttgaggactttgagatcatccatgagaagacgggtagcgacgtgaacatctggaagatgcccttcacgtgggtccttggtctgactttcttcccggccctgtgggtgatattcacgatagtcggcttctccgcgagcctcggctacgacctcggctggacaaaagaccaggtctccaacctcagcacgaccctcaacgtctcaaaggccctctggagcatagccatgggtttcgtcggcttccagctatccaagaagaacaccactccaaggggactcttcaaagccatcgtacaggtcatgatgatatcctacacaatagccttcatcgggcttatcctctactcaaaggcaatgcttgcagggaactatgccatggctctcgcgagcgttgtactcgttggtgcccttcaggggacggggccggctttctggacgagtgcccccgccacctatccaaagcgcatctatccaaaagcttcgttcgcccttggccttatctcaaactctgcaaacgccatagctccatcggtcacagaagccctggcttccatcagcgagaagctcgcccttgctgagctcacattaatgccgctcctcggcatcctgacactggtaacggtctcaagaatgagactcccagtggaggagctcggagaatgaaggccagaacaaccctcttccttgcttttcttttaatcgcccttttcttcagtggattagctctcttaaggggcccggactggatactgctcctcattggtctgatccatggtgttcttgcagtggggatcttcagaggagtaagaaacctgataagattctccgtttatatagcactgcttgactttgtctttggaattatctggacgattgggatgccgtcggcctcgtctattactctgtctctccttgcaggcctaatcctggcggttctcctcgatgaagaggtaagggatgaacttgagagaacatagcccaaaggtattcagctaacccttatccactgaaaagaatacacgggaaactcctaacaagaagtgctggatagaaacgtgataaaaacgttttgtggtgcggtggccgggatttgaacccgggtcaccggcttggaaggccggtgtcctagaccaggctagactaccaccgcactgcaagaaagtggtggggcgagggggatttgaacccccgacacccggatcttcagtccggcgctctcccaggctgagctaccgccccacgctccaaaaatagggagacaaaggggatttataaatcttgcggtaggtttggcccatccaaaattgaacatggcactgctaacaatcagaagataacgtttaacatttacaaaaaatttaaatttgaaattaggtattaacaatcggtgattctgtgacaaaggatggatattctcgaggaagtaaattggcgaggtatctagttgaaatggccgttataatgcttgtttttgtcgcgggggcagccataaaaaacgacgaccatgactccctcagtattgtggaggaactgacaaagtaccacactgatccgtttaatcctgacacggacggggatgggctgactgatggagcagaagttaagttgtatgcaacgagccccacccgaatagacagcgacagtgatgggctcaccgatggagatgaaatctcagagtacaaaacgaatcccctaagccaagacaccgatgatgacggtctttcagatggcgaagaggtcaaaacatacggaaccaaccctctctctggagatagtgatgaggacggacttgacgataaaagcgaggtcgtggtgcacaaaactaatccaacagcaaccgatactgataaggacgggctaatggacactaaagagatacagatatacaaaacaaatccaacgaatccggataccgacaaagatgaagtcaatgatggagacgaaatcaatagatattctacggatccgctgaatccagatagcgacggagatggtctccttgatgggcaagaagtaaccgcttatatgacggatcccctaaatcctgacaccgatggagatggggtttctgattcacttgaggtaaagaagggttctgatcctcacaagacggatacagacaacgatggcttaacagacccagaagaaatactcgaattcagcacaaaccccctctcaaaagatacagacgaagatggactttccgactttgatgaagttaaaacgtacaaaacgagcccattgaccttagataccgacggagacggactatccgatcctgaggagctaccgttgggaacggatccacttaataaagatagcgaccaagatgggcttgtagatggggaagaaatcaatacatacaaaacaaatccattgaaaccagatagcgataatgatggcttagacgatgggcaggaggtaatattatacgggactgaccccttagatcccgacacggacggggattacctacccgatggatatgaggggcaattgggtactgacccattatacgattggaggcacacctataatgaagaagcgtttaaggcaggattaagcaagtatttcagggaaaagctcagaacagttacaaaggatttcacgaagtacagcacaactttggataaagcctgggcaattctggaatggattgatgagaatatcgagtatgagtacactaaagcagattacgttgatgctcttgtgtacaactggtcaaagctaacatcagagcagaaggagctctatgataacctaacgagactttacgccccaaacgatattattgtttacaaaaaaggtatctgcggagattatgcaatattaacagcggcaatgctcttggactcgggagtgtctccggtttacctgttggatatcagtttcgaaaactccaaagttggccatgctgcagtagcagtcaaaatagagggggaactattcgttcttgaccagcatttgcccccaattcctataggtaattactattggacatgggctatcaaaaataattcaaagataatagctaacataaccttctacgaggtgaggctcaacacaagaggagaaccagaagttacagatacttggacatggagcggggaggagctaaaggaaaaagcatacatcttaaacgaagaggccataaggcagattatggaaatagcaaaagaaaaattcctactcctgtacccccagtacaaagaagatccccggttaaaatctctcgcagagcaggacatggaatccacgaaatccactggagagccttccaatgcatacttgcctccaggatttagtaggggatgggggttgtacctatccgacgaatacttctggttatactactcccccattactgcccagaagctcgttgattactcgataatggcagcattctccagtgaaaactgggcagaagtcatacagcaatgcgacagattctaccttttgattgactacgtaccaacaaccgtatccgacggaatgacaacgataacagtgccgaaaatccttctagtcatggagattgcgagttagttcttccttttgcttatttttgtctaaatacctaatccagacttctaacgctgtctgcgaaatccagaaaactaaagacaacagaaacaaaactctaaatctttggctccacagcatagacggttttgtcctcaccgatgccctctatcaagcccctgtgccttctcacgcagctctcacactcgccacagtggatcggcttcccgtcctcggtgaagcccttcggcatgtagcaggagttggagtactcgtacttcgctccgagctccttcaggagttttgctatcccccttttgtccagatttattagaggtgcaaccacccttacctcagccattgtcccatacttgagcatctcgttcattttctcaacgaactctggtgtgttgtccggaaacgtggccccttcctcggcgttgaagccaaccactatgtccccgccgccgagagcatcaaggagagaagctgcaactgctatcagaacgacgttcctagcgggaacccagacgcttttggcagtttcttgagcaacctcaatgttttcaagctcttccccggtaaccttcggcgtctccccgccgacgagcgtcgtcccgcggagcttcgagaactcctcgaggaagtctaacctaactatcttgagcgggacatccagctccttcgagaagaactctgccactttgttggtaaccttctcctcgttgctgccgtagttaactgtcagcattatgacctcgtcgtagttcttctttgcccagtagaggcaggcggtactgtcaagcccaccgctgaagaggacgaccgcgcgcttcattctaccacctctggaagcagtttaatgcccagtttcttagctcttttcctacgcttcttgtcgtaggttgcaagggccccaacttccgtagctattgtcagcaacaccgagtcattgtagtgtgtcaaggaaaggctttggagggtttcaaacgcctttatcaaatacctcctgtcgtctacgagttttgttctctcgtcttcaactatctgctctacgagttccctggcctcttcacttgagaatccgagctttctaaagttccagacgacttcgtaaatgacaatggttggcacgatccatttctccagagagggggagtgcaggagttcaaaggcctccctgtggcggggcatctcctcaaccgccgcgtataggaaaacgttggtgtctatcacggcctccatgccatttcctcctccatggcttcctcttcgagcctctcaagctcctcttcggttatcttcctgccgagcctgaaggttttccacttccttttggcccttttaatcactatctcgtcccccctgagctcaacgtcgaggtactcgccttcctttatcccaagggcctttcttatctcggccggaatcgttatctggtagttgcgggtgaccttcgtcaaaggcatagtagctcaccatagtatagtagactttcctactagataattctttcgattattccagagccaagccgactatctcctctacgctcgaaaacccttcttccctaaggtaacgctcgattccctcatttatctctctgaacaccttccagccccgaagggaaactgcggttccaatctgaagggctgacgctccagccaagagaaactccacagcatcctgccaggtcgttatgccgccgattccgatcacaggaatgtcaagcgtcctcgcgaggtcatagacagccctcagggcaacgggcttaacgccaggtccagagtagccaccgaccttattgctcagtatgggttttctggcgtagatatctatcgcgattgccttcagtgtgtttatagcagagacggcatcggctccagcgttctcagcggctaggccgagcttggttatgtcgtcaatgttgggtgtgagcttcgctatgactggtttatcggtggcgtctttaacggcttttaccacagcatagacgttctctggcttttgacctatctccataccatagcccttggcgtgagggcaggacagattaagctcaaaagcatcggcaacttcgctcagcttttccgctagaaaggcgaactcctccggcgttccgccgaaaatggacacgatgagggggaagtcaaagctgtatccctcaaccatctcaagaaagcccttccatccagggtttgggaggcccatagcgtttattaacccatatgggagttcgacgattgtggggttgtcgtagcccttcctcggctcgattccaattgattttgtaactacgccgccggctccctcttcgtgggcccttatccattgctccgggaccttatcgtttatccccgacgcaaggatgagagggttctcaaactccagacccgagaggtttatagagagctttgccactgtcaccaccgtcactgcttaatgagcaccaatataaaacccttggtcttcagagggcaaagcttataaaagcttcatcgggttaaagattcgggtatgggccggtagctcagcctggttagagcgcggggcttttaaccccgtggccgcgggttcgaatcccgcccggcccgccatagaaactttgctgggcaaagtttcatcaaagatggaatgtcctttttttatactaccgagttttcagtgattctcaatgctcaactagcggttttaagggggtttactcacagtataacgcccgaagggcgttaaaaagaagaaaaaaccaaaattccctgcaaatttatcacgagaatctacttactcagtcaatctcacaaagacattcaaacttttggtgaagcttttcccaaaagcttcagcgctggcggaaaaatagtatgcgtttttaagcaggctcattttataaggggtttactttcaattggcctgattcaaaggattctctcactgtatagtgcccaaagagcactaaaaagaaagccaaaatcacaattagcgggaagatttggaattaaacccgcgcgagcttgccttctataagagcatacacccctaacaggcgagattgaggagaagggaacccttttagtcaagctttttccaaaagcttgctggcgaagtttgatcaaggttcatagctcttttttagaatcccaattcatcgtgattttcccaccaaacagctggtctcgaatgtgagaactctcaaactcatcctgttaacgcgtgtttaactctaaatcaacgtccttcgggcgtcaaagaaagaaaacacctttccaggaaactcccccctaaacatgttctcactacaagaacaggcacgctagcagtggaaaatcctgaataaaaccacctcaaagaaaagctataagcttttggtcaagcttgctggcgaaaagtttcatcaaaggtggaatgtccttttaagcgccctgttttttagtgattcttctcatcaattagcaattttcaggggtttgctcgtagcataacgcccgaaaggcgttaaaaagaagaaaacccacattactccgcctgtgaactaggagaatttctcatttctcagccaatctaacaaagacgttcaaactttttagtgaagcttttcccaaaagcttgctagaaaagtttttatcgtattctttactattccccaataggaggagggatcatcatggaaccccacgaattcaagctcaccgaagagggcataaaggccgttcttccaccgatggaagcggagataatggagcttatgtggcgcttcaaagtcgcgactgctgggcaggtgtatgaagagctgaagaggaaacaccccgaaatcagaagatcaaccgtcagcatactgatgaacagactatgcgagaaaggactgctgaagagaacggtggagcgcggaaggggtggaatgaggtatgtttactcaataacaacgaccagggaggagtttgagcagaaagtcgtcaagagcatactggatgccctaatgaacaacttcagggaggcgacctatgcctacctctcaaggatgaaaaagtgatgatgtatgatacccctcatagtagccctcgaggtgctgttgctgtacctatctctaggagcggtgggaatagcggctacacttctcgccgcactagcccttgtgaccatgtacctaatggcgaacagaggtggggctaatagcgggctcataccgctggatgaaagcgaaatgaagtggctccacgagggcatagtggagatgtcaaaaaaggctggaacaaaagtcccagctgtgtaccttcaggatgactacatccccaacgcatactccttcggtggaaatatcgtcctctcgttggggctctttgaggttctggatgaggatgaaatcctggcagtagccgcacacgagctcggccacataaaaaacggggacacaaagctgttcccaatggtcacgtacggacggtatctaatgctcataacgactattctgctgatgatcggcggaaaccttgcggtcaggataatcgctcccttgctgtacatttcttacgaggcctcaagaataagcctcatgaaaaagagagagtttatggccgacgacactgcactgaggctgctacctactccaatgagcctcaaaagggcgctcgaagagatgaagtactacgaagacctaagagccgatgtaaagatcaacgccctgccgagtattgaacccagtatagagagagaccaagggcctaagtgggtatcctttgtcgagacccatccctcctatgaggagaggataacgagaatcacgatgtatattacaaacctcaacaaacgcctccagtgatgcggtatgtcgaagatagagataatcctcgatcatgaaaaggcagagaggataaagaagatcagaccgaccaaggacgagtacttcatgctgatagcgaagctggtatcccttcgagcgacctgtccgcggcttagagttggagcggtcgcagtgaaagatggctacatcctcgcgacaggatacaacggcgcaccgaggggtatggatcactgcattgatgtggggtgtctcatagttgacggccactgtcacagggcagtccacgccgagcagaacgtcatagcgatggcggcaaggaagggcataagcctagaaggggcaacgctttacgtcactcacttcccctgcgacacctgcttcaagcttctgataaacgcgggcatcagggagatagtctacgaagaaatgtaccccaacgaggccaccgagatactcctgagagaggcacaggaaaagggaatagtgaagatcagacagttcaagctcaaaaaggaaagggtgaggctcttcctggaggaactgtttggggaggacttttagcgctctccaactttttcttccagtgccttgagccgttcgttgatctcttcgagttctatagcaactttcctcgtcagctcggttatctccctctcagtcttgtcgattttcaggtagaggtcaaagacgataaaaaacagtaggcctatggataccacaaaaagggcatcgagccccctcccaagacccagcaaatcctttatcgtctgggatacctgaattgggaagatcgcaacgactacaaacaccagtacaagcagagcccatgatattacgctctgccagtccagccgtccttctgagtagtagcgatatattctaaggagaaggtacgcgagaactaacagtgctatgatctgagccacatacatgatacctcacctcagtttgtcaaacagcagattgagggctatcttaacaccctcaaggacgtttgtccccttcctcatcgagtactcggtatagacggcctttatcggaacctccacgattctgcagccgtttttaactgcttcaattataatctcgcttgaaacagcatacctgtcgcaggtaatcttgatcttcgcggcacactcaccgctgaagcatctgagcccgctctggctgtcgctgacgtacttacgcgcaaacagtgcagttatgaaatcgaggacgaagtttccaaactttttgataaagggcatctgactggtgtctcctttaaggcgggaaccgactgcaaagtccgcttttccctccgcaacgggcttcatgaccttcaatgcatcgcctatcaagtgctgaccgtcggcatcgaaggtaagaatcattttagcgcccttccttaccgcgtaagcgagccccgtaccgagcgccccaccaaggcctctgttcacgagatgggtgagaacgtggacaccgaaggacctcgctatctcttcagttctgtccttcgaaccatcgttgacaacgactatttcttcacgcctgaaataacgcaggaggtcggtgagaaccgagcctattgttttctcctcgttgtaagcgggaacaacgacgtagctcgacagcaaccgccccattaacggaataaagtgttccatagtgggaatttcgaaattgggagtagcctcaaccgagaaactcatccttcctgcatcgtgggacgtcaccaagaggctgagtgcacccgcgtttttcgcggctatgacgtcgtagccgtgatcacccacaaccaaggtcttctcggggggaactccaagggcatccagaacccgctttatttgccccccatttggcttcaactggtctgggggaacatcttctcttgccacaataacgtcaaagtagtcagcaatgccagttttctggagggcaaatagggcggcatcccttgaactcctggttacaaccgccatcctgattcctttctccctcaagaactctagggactcacgaacacctttgaagagaaaggcgtccttcatcctctcggtctcaagctcgacctggattgaatggagttcatcaaaggggatacccgttttctcagagatctcgatcagagtctcgtacatgggcgttaggtctccaataagctcttcgcttatgcccctctccaggagcctttttctaagctcctccttgacttctgagaacgcctttggggcaccgatcagcgtgccgtcgaggtcaaagaccaccagtctgatgtccatactaccaccgaagggtttatttttgcgggttccaacggaatgcggtgtcagtaatggaagcggcggctccccttatagccttaactctctcggcggtactaaccccctacatcgccggactcatgaaaaaggcgaggatagttgggagggatatacacaagctgaccaaacccgaagtccccgaaatgggtggattggcactgctcatatctattggggcagtgtcatctttaatcaaaccagagatcggtctcgtttttctcctgttcgggatagtgggaattattgatgaccttgctgctttaaagcagtcccacaaggttgctctgtccctgatagtcgcttcacctgtaatgttttttgacattccccgatacgttgacgtattcggattcccccttaatctcggagttatctatcccatagtggcacttctgtacgtggtgggctcagcgaacctggtgaacatgctagcgggcttcaacggactggaagtcgggacgagcgcgatagcgctggctttcctgggagtgcttaccgacggaacggccagagagctggcccttatcggaactgctgcagctctaggctttctctggtggaacagatatccagccagggtatttcctggcgatactggaaccctgagcctcggagcacttattggactcgttgccgttgtgggaaaggttgaagcctacggggcggttctcctgataccacactttcttgacttcgttataaaagcagttggggtgaggtttggagtcagaaagcatggaagaaccgaagtcttgcctgacgggacgctaaaggcaccaccttatccaagctttctggggatgataatgagaaaagtgcgcgtgaacgaaccaaagctggtcgcaatagtgtgggccatagagttcattcttggccttcttgcccttgctctgagtcaattactttaaccatgccaaagccgtagcgagtcttttcaccaaaccccgtttcatatcccagccaggccagctcgggtgagccagagtacttgaagaccataagggagctcctgtagtaggtatccctaacgagaatccggacgggcttaaacttgagaacctcaattttgaactccttgttttcgggcattctgccgtaaatgctcgaatagcgcatgagcattatctttctgagcttgtcaaagaacatttcatcgtcgggatagaggtcccacaccttcatcctgccgttgacgaacttaaccgtcctaacgaggatcggactgagcgttgagaagagaacgggacctttaagttcgggctccttcagaaccttaacgtcatctgcaataaaagtggcatccttaatcttcaggagggggtcatcgagaaagccctcggcgatggcatggatgacatcggcggaatgggaggagacgtagagagaaacgtcatcggagagaactctaatgccagcctcgggaatgagctccctcttcctgaccattatccttgagaacgtgaagtagtcaacaccactagattcaacctcctttccaagttcgggagaaaccagatagaccttctcaagcagctgagaatagacctcgtagttgtagttaaacggaagaattgtgcccacctcagcgggtcggagttttatttcaatcctcattattgacccctccattgtagtgccaatatatccaacgtcaaaaaggttaataagtgtttcgaagttgagtttgaagaccattgtgaatcaacggatgataaacttgtgcattagatagaaattgtccaaaacccaaacctgtttctgctgggatggatagagttaaaaagagtcccaacgagacatacatcaggagagaagttagaggtgagataccatgagtattgagaacactgacgttcacccggagggttacgatgactacgtcactttcctcaaaaggagaatcaggcagctggagttacaggtgagaacgctggaggcagacaaggagagacttgagagggagctttcaaggctgagaatggaaatgtcaaggctcagacagccgccggcctttgcggggaacgtcatagaggtgctcgacgacgaaagggctatcgttcagaactacaacgggccgcgcttcgttgtcaggatagcgccttggatagagagggacaagctcaagccaggagccagggtggcactcgaccagaggacgatggcgatagtcgagctcctgccgagcgagaaagacccgagtgtcctcggtttcgaagtcattgaaaggcccaaggtcacctacaacgacataggcggacttgagaagcagctccaggaactcagggaggcaatagagctcccgctcaagcaccctgagctgtttgaacaggtcggcatcgagccgccgaagggagttctcctctacggcccgccgggctgtggaaagaccctgatggcaaaggcagttgccaatcacgtcaacgccactttcatccgcgtcgtcggaagcgagctggtaaggaagttcatcggagagggtgccagactggtccacgaactctttgagcttgccaaggagaaggcacccacgataatattcatagacgaaatagacgccataggcgcaaagaggatggacgaaaccaccggcggcgagagggaagtcaacagaaccctcatgcagctcctcgctgagatggacggcttcgacccgaggggcaacgtgaaggtcatagcggcaaccaacaggcccgatatactcgatccagcattactcaggccgggcaggttcgacaggctcatagaggttccgctcccggactaccagggcaggctcgagatactcaaggttcacacgagaaagatgaacctcaagggcgttgacctgcgcgttatagcggagataaccgagggggcgagcggagcagatctcaaggccatagctaccgaggcaggcatgttcgccatcagggacaggaggacgtacgttacgcaggacgacttcctcaaggccgtggataaagtcattggctcggagaagaggctggcacagcagatagctatgcacgaggtaatgtacggctgaagccattctcttttttcttctacccctgatttaaagcgagtatttacaatactacattcttttcgggcttgttccaagttttttcctttccacaagaccctcaacccacagtattgcccacgcaagcagatacattacgggaatagacaagaaagcaggcctgtatccaaagatatctataagcaggccgacgagataaggcccgaccgtcgcgccgaagaatccaaccatgttgacgaaacccatgaccgaacccaggttttctggacttgctttctcggaggtgtaggcagtaactactggacccacagagtagaacgtaagcccgagggggattataatccagggagatgccgttaccgcaaggaggaacgttagcagtgcgttgagcacgagtatcagcgagacgcttctccttcccgttctatcatagaccaagccaccgaggaaagatcctgctacacccacaaccgaaagcagagagaaaagacccgaggcaatcccgagggagactcctgagtgcaccaggaatgacaccagaaacgttagaaggccgaagaatgcggcgagcgcaaggaaattcgcagcgctcaaggggagaacgttcatcggaatcgagagtgaggccctaaaaggcttcgagacttcccccttgacggcgagggcaagggcgactccaacaagaaggctcatggaagagagcacagcaaaggcgtacctccactggagggagagcgctatgggtacgactatcagaggagcaattccactccctactggcggcccgaccatgaagatccccatagcggagccctttctctcccgatagacctcgcttatgagagccgtcgctggagcatagtacaggccagagaaaatcccatagagagccctaaccgccagaagctcccagtactggcgcgcgaaaactatgagcgcagaagagagggagtatccaacgatgctcaccaccaaaagacgctttctcccgagcctgtctccaagatagcccgcgggtacctggacgagtgcataggggagtagcaacgcagtcatcagcagacctgcctcggcgttggttacgcccagttccgacttgattatggggataaggggtggtatcgccatcctgtgggcgtagttgaatatccagccgagggagagcagcaacaggagtctcttccgcataggttcgagagaagatgaaacgcttaaaagtttgttggatagcaaagtaagtttataaaaggcgcgggcaaccagttacgggagagaacatggtcagcaaactgctcgcactcgaggcttacccatcactcagggacctggacttcaggatacttaggggagtagagctcaacatgcgccaccacaggtgggttcccttagaggacatagcccgctttgccagggtggacgttgagactgcatccttccgccttggaaagctcgacgactggggactagtcgtcaggaggagcgacatcggctacataggctaccagctcacgatacacggctacgacgcgctggcaatcagggcgctcgccaaaaagggagtaatagaggccataagcacgacgcagataggtgttgggaaggacgctgatgtttacgtaggcataactccttctggggagaaggtcgcggtaaagttcaacaggataggagggaggacagcttccagaagggccggctaccacggccacgtcttccaggacaagcaccacaccagctggctctacgtttcaaggctgatagccaagaaggagcacgaggccctcgtcctgctcagcccgatagcgagggttccgcggccggtagcctggaacaggcacgtagtcgtaatggagtttgtggagggaaccgagctggccgaactcagggacactgatttaaccagagaggaagcagagaggatactcgatagggttcttgaggagtacctcaagatcgttaggtttggtatagttcactcggacatgagcgagttcaacatagtcctgactaaagatggagacatcctgataatagactgggcacagtacatcagcacggcccatccggagagctacgaactgcttaagagggacataaccgtccttttgaacgccttcaggagaaggtggggagtaaaaaaggagtttgaaaaggtctggcccgagtttgaatcagcctggaaggagagcaggggtgaggaaggtggtaattaagtacgagcccctcaacaggaaggagaggatagcaaggctcttcagggaggccatagaggccgaaaaccaaaaagacctcgaaactgccaagaaaaagctcgatgagatccttcacgagagcatggaggaagagcccgagctgtacttcgaggcctgcttccgcctcgctgatatcttccttcaggaagacaactacaggggagcggtcaagtgcgcgcttagagctatttacaacgcgccgaacgacgatctcttccgcctcggcttcaagaggctcggggacatactaacgataatcagagatgccggaaaagaactggagctcacggagaacatggattcactcagagttctcctcaaagaggacaaactcctcagcaagttcctcgaagccctaataaaagcggcaaaaggggaagaagtcagcgtggagttcccggtcaaggagatgaacgaagcgctggaagcactcaaaggatgagcctcaatgttctctcaaaatcttccctttttggtgctaacgggtagttgtagggttcctttccaggtctctcgttgtagtaaggccggttgcagcccggacagccgtgggtcatgaaaaccgtcgtgggaatctttgcaacttcgtccttggagagtgcaaagcccttgatggagtccccatcgaagactatggcatcttccttcccgatgctcacgaggtatttagcgagctggatttttcggtaatgttcgaggctcggcggttccctattttcaaggcgggttccctttataggcgtgaaggcaatatatggaaacatcagcgccgatttccctcgcgcgtatgaaggtattcacaagctccccgtcagtctctccaaggccaactataacatgaagtagggcctttccacggccaaaaacatcaatcactctgcccgcaaagtcccacacttcttcccatgacaggtctggctttatctccctaaagagcctctcgctggcaacatcgaggccgacacctatgtagtccacgccgcgctccttgaagcgttcaagggtctccgaatcaacaggggttatcgagactgaaatcggaagattaaggtcggagaaggcttcaaggaggtcaaaaacgtcctcaaccattcccggataatcaatggtctggaggcagattcttgcaaagtttcccttcttcaaaccttcgagtacatcctccagcatgaaagaaggccacacaaccctcgacagcttctcaaggtctgccctgcttgagcgggcctgagcgcagaaagcacagtcgttggagcaccttcctggccaataggtcatgagataagcggtagttggcctcgccaacagcttcgccctgattaggcccatcgctattgcagttccataggagacccttaccatttcaggcattcccttcacccttaaccttcgtgatcaggatgcttataagtgccactcctgcgatgaaggggagcagcgggaaaacagcctcgtatcctctaaggtccgcaacgtagcctagggcgacctgaccacccagtgtaccaagatcaaagaacatcgtgtatatgctcgagcccattgcgcggatttttccgggaaggggagcgagggccatcatctgcatcgcggggactgaaagaccaaagcccgcaccgatgagaacggcacttatgtaggactctggcggaagaattctgtagttgaggaagacgtatccagttatgacgaccaggatgccaccaaaggaaacgggaaccgggccaatcctgtctgcagtcttacccccaactaatctggttgcgaagctcgacgcaccaaccaccatcatgtagaggccgaaagtcctctgcgggaagccgaggtatttgtagaaagccggaaggtaggtcgttatacccgaataagaggcagagaaaaagaggagtgccagtgaagtgaaaacgaacgagactttaagaagtgcccgatagctgacgctccctccggaggattcttcgtcgccggttattctcccgacctctttccacacgggtatcacaaagcccgcgccgaggagagagaagagcgacacgaaggaaaaagctccggcgaagccgaggtagtcggacagatagcctcccagggctggcccgattatgttgccgagcgagaacatcatgccacgccatccgagggtctcacccaccctgccgggcggtgccagatcaacggctgtggagaggcttgaggggaagaatatccccattgaaaagccgtggagtgcccttgaaaacgcgaaaagtacaatgttggatgtgtaggcggaaacgacgtagagaaggccacttatgagagagagcacgtttccggctatcatcatctcaaggcggtagcctctatccccgatgagaccgccaactggctttgaaacgagggaaacaaaggatgtaacaccagccaccaaaccaacaagaaaagggcttgccccgagcgttatcgcaaagggggaaactatggggttggttaagctgatgccgaggaagaagaaaaacgtcgagaggttgaggagccagatgtttctgagcgttttttccactaaacaccagcctccggctcgtccattccgtccttcatgaaggcgtagctcatgtgcttggtgttcttggcgaagccgacgttgccctttgcatcgaccatgataatgcccatcgtatctgggccgaagtacttcgtggcgaggcttatagcggcttcgcttgccgtctgagcgtccatgccaagcctgacgaagtcggcagcactctttgccagtgcgagctttatcgcgacctcgccgaggccggtacaggaagctcccgcaacttcgttcgcgtaagttccgccgccgattattggagtgtctccaacgcggccgaacatcttgaggaaaaccccaccagtggaagttcctgcaacaacttcctcaccgtcgaaggccacagcgccaacagtgctcctcaggacttctggatactccttgatcagctcgttgagcttcttccagtgctttgtttcgcccttctctatgagcttctttctgagctcctcccactgcttgagcctctcctccgttatcgggtcgtactcctcgaagccgagcagtctggcgaactttacagctccctcacctatcaggagaacgtggtcggttttctccatgacctttctggcaacgcttatcgggttcttgacgccccagattccagcaacggcgccagcgtcgagcgttttaccgcgcattatagcggcgtccatctcgaccttcccatcaagggtaagaacgcttccagttcctgcattaaaaatagggttgtcctcgagggctttaactgcctcctcaactgcatccagcgcggaacccctcttcagctctctccagccggcgagaacagcctccctaacaccctcaatgaccttgggtattctctcctctttccttattgttccagccccaccgtggactatgatagcggccatgagaatcaccgagaagagtttcctcgaaaggttaaaagaattatggaaacgaagctaactcaaggccatgtttattatggtctcgccgatgttctcaaggtactcgaggattctgcggtagctctccatagctattgacctgtggtagtctatggactttatctcctccttaagctccagcatgagcttgtccaccttcataaggtcacgttcctcaatctggtcaagcatctggctgaacttctccttgagatagggaacgtttattctgtcgggattctccgcgattcttatgaggtggtccccaatcctctcgatgttgcgcactatgaagagtatgccgattaggtcaaaggttctccttattatgccgctctcctccgtgatgccgcgttttgtcaggagcctgctgacggtccggattatcaggaagtagaacctgtcaagctcgctttcaaggtcgttaatatccctcaggatctcctcgtttccaggggactgtatcaggagctcgatgtcaccgagcattgagagtattagggagcgtatcctgttcaggagctccgccaggttcacctcatcctcatcgagaaggctcttggcgactatcctggtcggctcgtccaggattatctcaactccagggaggctctgaagagttttcctcagcttaaccttgtatatgggcatctcctccgtgaggtttatctcaagaacgtcgtagcctggatataagcagagatgacgagccttattgccatgtcaggcgagtatttctttgaaattgtcaaaattttcttttcgctaacttctttgacctccttcgggaatatcgttatgctgccatcggggttcacaacgaggggaacggcatcaccctgcttgaggttgttcatcttgacccatttttttgggagcgagattatgtaggagctcctcccagtaaactgaatctttctgaactccatattaactcaccccatctatatagcaactacaagaagaagagagaagatataaaggttgtggagaacattgagacgttcattctttcgacagctcaactcccctctcaaaggccctgaagttcatctcccagagcttctccctgagcgtcagcttgatgccctcaaggatgctctccttcctgagcggaatcagtcccttcccataagcgtacccgagcatgagtactcccagggttctagggtttattttatcggcctctttctggaaatcgagcatatccaccggacagatccggcctattgcctcctttatttcattaagctccgggtagcgctcctttccgacgagggtcgtagcggtgtggattgggtaggcgttgattatcgcgtggctcttcctgctcaggaagcgggcgttccttaaagcctcggcaggctcgagggccagcatcaaatccgcttctccctcctcaatgagaggggaatacacttcctcaccgaagcggaggtagctcagaacgctcccataacgctgactcatcccaagggtctcaccgatcctgacgttgtaaccttctaccattgcggcgttcccgactattctcgagagggtcaaaccgccctggccgccgacaccggttatgatgaggttgaactccattcccaccaccagaaaaagtttgggaagaaacataaaaacctaagctcaaaaaggttcggtcaaactatcagtttctcgaatatcctgagcttttccctctccttcagcttgacccagtcaaagatcgaaccggagctctcccccagcctgagtgtctcaacgagctcccggtattttccgcctgcaatgccgttcgctattattgagcttccctccgctgcctccttcgcccttgccctgctctcgagtttgagaacatcaacggagaagccgtaggtttcaaaggcgttttcaagcgcctccttgacgtccctgaagaactccgggatccttgagaagcgaccgctcaggtatatcgaatcgggcgttaccgaggggagcagggcaaagacgtccttgactatggcctctatcatcgcttcgtagcctttcctcacttcctcgtcttcctttgccagcccaacgaactcttctggagaaacgctgaaggggtctattccagccacgtaggccgccccaccctggaagagcaccatcttcccgaagtcctccagggcgttcgccagggcgtaggccagctcgccgtccatgaaccccatcccaaggtagccggggaatccagcggtgcccgccattccatcaacgatctggccgttcttaactgccattgcggaagtgtaggcaaagcctatctcaactgctatgaggttggtctcggaatagggcactcccttcctctcagcctccctaacgatggagagggccgcggtgaacaccttgtccgccgtaccgaggtctatcctgttggccttcctccactctggaaccgttggaaggtgtataacccctggggtgaagtatatgttgagatcgtcggcttctcgcatcatgagcatcagttcccttaggccaactatctttagccttctccccacatcggcctccgttatgaaagtcgccagggctatctcggcatcggtggcttccctggcaggttttaagggaattccatagccgcaggggccgactatggcgtctatcttcccgtgctcctcctgaacctccctgagaagttcgattattatccctgggttctcggtaacgcggttcctgtccacggatgcgtcaactataacctccccagtctcgtcgtcgaagccgaagatgtccatgctcttcgtcccggagtctataccaaccgccttaaccatccagcaccaccattcccctgttgtcggccttcgtgacgaagacctcaccaccgtctccgttctccctgaggaaggcctcaacctcggccctgagcctttcagcatgttcaataccatcaacgaggccatagaaggtcggcccccagctcgtctggcaggcgcagtgggccctttcgagcatcagcttgattccctcgttcacgatgtcacagcagtagacgttctcctggtaatcgctccagaactcgccgaggaggtggttgaactggtacagaccttctccgaaggttctgatgtctctctcaacgaaagctggaaggatcttcatgaggactatccttgagagcctgtcggccagctcagggggcatcttcttcaggtttccgagaatctcgtcctccctcttcctgacctcggtgagggccttcctcggcgtctccggaatggcgaccacgaagagccagtcctcgggcatttcgcccctgaatatcagcggggggactactttttcccgcctatcaaccgggaagccgccctcgtagataaagcctcctactttaacagcgtagaagcccagagcggttatcaaacccctgcgcatggccaaagcaacgtcctcaagggacaagccgagaccgtagagtttggatattgccgcgcccatggtcagtgcaagggtcgtgtggaaacctatcccgacccatttaggaatgtacctgcggactgtaacctcaaccggcggaaagtcgtaggactccctgaaccgccttaaaaacttcaaagcgtcgttgtcgttcgaacggtccctatcagacttcctaacttcaacctccagagaaggggtctcgattgcaaaaccaactgtcccgtagagcctgcccatgtcaccgctgaggtcggggttcccagtgtgaagatgggccggcgctttgattctgatcgaatccattaacctcaccccgacggaatctcaattggagtcattaaaaatctagtgcgcgggttaggtatataaggtctcaaaacaaacctaccaacatggggtttgtagagtactactcagcatttaaagcctacagcgacataaactccgaggagtatcggagaaggatagagaacctggagccgctacttatgaagttcatgaaaacgagaggtagggtccttgacctcgcctgcggtgttgggggcttctcgttccttctagaggacctcggatttgaggtagtcggacttgacaacagcaggttcatgctggaaaaagcgagggagtttgcgaaagagaaggagtctcgtgtagagttcatcgaaggagacgcgagagaactcccgttcgaaaacgacagctttgactacgtgctctttatagacagcctcgtccactttgaacctcaggacttagccaaggttttcaaagaaactgcaagagttctgaagcctggaggaaagtttatccttcagttcacagacctaagggcgctcctgccagttctcatgaacggccaggtagtcggagccgagtactgggtaaacaaggttctaccagaccaagaagaaaagaccgtcgtcatagagtttcagagcgaaaaggactcgttcagggtgaagttcaacgtttggggcaaaatggcagttgaactgctcgcgaagctctacttcaggaaagagggagaagaaaagctgaacgagcactcctacttccaggtctatggaccaaagaaatagaggggtttaaccctctagcctcagcctcttgatgacgaactccctgttcagggaagccaggaacggtgccagcctcggccctctgtccttgcctatgaagatgttatagagtgccttgaaccactccttacttggaataccacgcttctttgccgcgtcgaagataacgttgttcagctcatcgacgctgaacctctcgtgctcctcaagccactctgcaacttcgagcattgcttccctaatttcgggcctgagctctatctcgggaggcctttcgaggagcgagaacttaacgtcgtctggtgcgtacttctcgacccagttcttggccaggcgtatgcgaagctttatcctctcgatgtcatcatcggtgaggttctccgggacatggccctgctcctggagaatccttattatcccgtcctcatcgaggtgcggcatctggacgagggtaaccaggaatcggaagggtgcctgagccaccagcctctccgggagcttcggcatcgaaagctcgtacgtcctcttcagctcttcttcctcttcgggattctttgcatgctcaaggccgaagtagatgcgctcgaccctgtcgaactcgtcgtagaggttgagcagaccgaggccgaggtctatcctcagctccttgttcggtctggcctttgcgtagatgaagcggattattccgggctcaagaacctcgtagaggtcggaaagtaaaatcacgttacccttgctcccgctcatcttgcccttctggccctttatgccgacgaactcatacatgagtgtcagaggtgccttccagccaaagaccttctccactatctcctttccagtgtcgtaggagcttccagcggccaggtgatccttacccgctggctcgaagtcaaccttaaagtgagcccatctcatcggccagtcaacgcgccagcggagcttgacgttgccttctctgatatcagtctcgccctcagcgccgcagtgggggcacttataagacaccttccactcgccgtcccaggagacgaactcagcttccttcctgcagtgtgggcagtagatcatgaccggctgccaggagtcttcgagtggcggctgctttgccctctcgcggtacttgtcgagaatggcctttatctcgtccctcttctcaagggcgagccttatctccttggcatattcgccgctcttgtacaactcgctcgcgtggagaaagtcagcctcaatgccaagctttgagatttcctcctcgaagaggctcatgaagtggtccgcgtagctctcatggcagccccaggggtccggaacctcgcggaccggcttcgtgaggtgctctttccattcgggtgggacgttcttgggaaccttcctaaagcggtcgtagtcgtcccacatgtggatgtgcctgaccctcttgcccctgtccctgagggcgtgtccaacgatgtaagcggtaaagaactcgcggaagttgcctatgtgaacgtaaccgctcggggttattccgctctctaccacgtactcctccttgtcgcccctttccctgatgatcttctcggccatgtagtcagcccagtgaaccattttcaccaccgcgcttagctcgtggaatgcccttttaaggttacggccggttcaaaactacgttattaagggtaaaagttataaagcttaatggtaaaaacaagacgacagaaaaataaaacggtgatcgaagtggaagttgaacttctaaggagccaagttttctttccggcgtcgctggagatacaggaagagctcctgaaggcaggattcaaggtgccgtacgataaagagagcggaagaaaaacacccgttccagttgtcgtaagctcaagagaacacagaaaaattagggaatcgaggttgctgaaggcaagagactatgagggcgatggaaagttcgccctcctcccagaagagcgggcggtgatcgaactagacgtaactgagaagggctttctcgtgctgaagccaaagcccatggagtaccaccttgaggagaggggctttctttccgtgccaccgcggctctggggaacgtgggcgagcttttcgctcccattctcagcgtacgaggacatcgttgaggagttcggggctttcaaagacgaagaggccatgggaattcagctggcttcaaagggctctggaagcagaatagaggtctacgcctacaaggggagaagcaggaaagacctcgggataccagtcttcggatacgccctcggacttcatggattaaccctagcggatgagtacctacgagagaaagcagaggagaatggggttccagaggagaggctccgctacctaaagctcgggctgaagaagaggaaggagacgaaagcgggcttaaaagtcggcgtgatctgggaaaacggaaagccaacggagataacgctgaagctaacgaccacagagcccaggataagaatccagggcctttacggagagctgatcggaaagtcgaggggagagctgacgagaacaagagagtggtatatcgttgtgcacgctggggatttcgtaaacgccctagaggcagtgcataaggccttcggatgagcaaggtatataaccctcctcacgcttttcatctttggtgaaataacgtggacttcagctgggttccctatgccgttattggagcttcaatcatagtcgggacgatctggtttacaaagtacctagggcaggaatgggcctgggtgaacaggaagctcatacacttcagcattgttccagcaatactgatgttctattatgggctcattccgaaagaggtattcgcaccagcggccttcgccttcggcctcacacagctgtggccccacctaaaacggagcgaattctcgtggtatcagctccagaacaactacggtgaagtgttcttcgctctttccgccgctggaataagttacttcatgccaagaaactattcaacggccctgcttttggcgatggcaataagcgacggagttaccgggataatcaggcaccactacttcaggcggaacggcttcaacgtaaagctcaaaaagcactggactgggagtttaggctacctagtaacggcagttataatcgcgattgcccttctcgaagggagcacaataggaaaaatagggtgggcattcgtgctcatgctggctgaataccagccgtgggtggacgacaacctcgcggttcccctcgttgggtctctactctatttcttctactgagcccaccttaccttgaggctgtccctctttaccttgttgaactcctcaacgagggccttaccagtcttctccatgaactcatcaacgtcggttaccccaagctctttcaggcctatcgcgtcaacgccctctggaattcccctggcctcgacgtttatgccgatgtgcatcttcacactgacgggagagaccgtggctatcgagatgctgagcttctttccgttcacatagatgtcgtcgcccttcctttgagtctttactccgtactcacccagaacctcgcacagccttgctatgaagagcttctggagcgtcgaggcaaagagtgtgtttacaaggtcaaaaacctcgatgatgtagtgcaccatgtcgtggctctttatctccttgctctgacggaggtcttcgatgtcaatcatctcctccactttaacgtcgcatttcccgcggaagatcactatcgagtcgccgaggattccaaagtttctgtaggcccagtggctctggattgcagagccgtcgtagtctattcttttgtccttgacgataagaagttccatttcaatcacctcagtccagcttttcaaggagttgtttaagctcctcaaaagactttacatcaacccacatgtggatgaagtcaacatctggcagttcctgtttaatcttgtccacgtggattgccctatcgtcaacgtagatgacgtcgtcgattgtataaccaatcgattcgagctcctcaatggttcttcgtatcatgtccgccttgttggggtgtccctcgattttcgggaacaggaagtagtcccagaggccaaagccttcgaggatgggcctcactttctcctccacgttccagctggctattgagaggagaaagcgttcgctggcccagtcaagaaactcgcggacgcctggaaaaaggtgcagttcctcaccgtaggcatcgacgaggtaatcgccatgaaactcgtagggtggagtaagtcgagaagcgtcttcatgatcccagagagttccatcaaggtcaagaatcaataacctcatgcaaaccaccaaaagatctcaataagcaacaatttaacagttgctatcagaataaacaggaacgcaatcaatacttatcattgcagttaatcacaacgatcacagagaacagaattttcagaaggattattggggcttgagggccgtgcataggcgagctggtctctcagacgtcccgcccggtagcactcgggctgttgggagcggcagactgaacgggtcggtttcccttcccgcttacatccccgccccatcaaccgggtcttcttcccgggccctcgtcctgggcaacggaccggtcgcccaggcccaacgcccaggagtggccgcctgttttcgggggccgcttcggccttagatgctttcaggccttatcggctgcggcgtagctgcccggctatgccctgtaggacaaccggtagaccagaggccgcggctccctgttcctctcgtactgggggagccttcccctcaggcggccaacacctccggtagatagcatccgacctgtctcacgacggtctaaacccagctcacgttcccctttaatgggtgaacacccccacccttggcccctgctgcagggccaggatgggaagagccgacagcgaggtagcaagcctcggggtcgatatgggctctcgcccgagacgactctgttatccccagggtagcttttctgtcatccctggcccccaccggggaggcacaggggttcgctaggccacgctttcgcggctggacccgcctctgttacgggtccagtcaggccggcttttgcccttgcactctacggcggattcctgacccgcctgagccgaccttagggcaccctcgataccttttcgagggtgtgccgccccagccaaactgcccacctaccgctgtccccgcttccgcgggttagccgtacggcagagggtgggcggtgtctcatgggcggctccacccgccccggagggcgggcttcgacgcctcccgcctacgctgcgcaccccccgccgtacggcaacggcaggctgcagtaaagctccatggggtcttcgcttcccaccggaggtcccaggcatatgcgcctggcagaggtttcgccgggccccagccggggacagtggggacctcgttacgccattcatgcaggtcggcatttaaccgacaaggaatttcgctaccttaagagggttatagttacccccgccgtttaccggtgcttcacccggttgtacccgggcttcacataccggcactgggcaggcgtcggccccagtacaaaccctttcgggctagctgggacctgtgtttttactaaacagtcgggcccccctagtcactgcgacctgcgggttacacacccgcaggcaccccttctcccgaagttacggggccaatttgccgagttccctcggctgggtttcccccgacacgccttaggcttctcacccaggggcaccagtgtcggttctcggtacggtcgcggtggatcgttcccgaggggcttttcacgggccccagggatcggcggaaccccccttacgggaggccattcgcgctttcacccggttctcgccattacggcactccccgggcttatacgcttagccggccttgtggaccggtccgcctaccccgaggcgtcacccctcgggcttgcgttgccgcacctaccaccgcggtacgggaatataaacccgtttccctttccccgacgccgagttacgggtcgggttaggaccgactaacccacggctgacgaacattgccgtggaaccctggcccctacggcggccgggattctcacccggctatgctgctactcccggcaggatccgcaataccgacgggtccaccggacctcacggcccggcttccgccccatcggcacgcccgcctacccgatcacggaccaatcggtccgtgcgccggggtctcggcggccggcttaagccccgtccattttcggggcccctgacctcgacgggtgagctgttacgcactctttaaaggatggctgcttctaagcctacctccccgctgtctaaggccagggacaccctttggagtaacacttagccggcactttggggccttaaccccggtctgggttgttcccctctcgggtgacggcttacaccgcccccctactccggccatctacggcggcagtgggttcggagtttgacagggagccggaggctttcgccccctaaacccccaatcagtgctctaccccactgcctacctccggccgggctatcctgggggataattcggcgggaaccagctatcgccggcctcgattggcctttcacccctagcccggggtcacgggagcgaattgcacgtcagcacccctagcgggcctccatccctctgttgagggacttcaccctgccccgggctagatcgaccggcttcgggtctcacccgagcgactccgggcgctttcacaccccgtccctcgcccttacgggctgcggacctgtcggtttccctgcggcttcggggttgacccccttaacctcgccgctcgggtgaactccctgccccgtgatccaagacggacggtgcaaccccggtcacctcccctcgtactccacggtcgcccgtgtttccttcggggagggtcaaccctttcgggccgcaccctcctatcgccgcctggtttcaggctcttttcacccccctcccggggtgcttttcagctttccctcacggtactagttcgctatcggtctcgggacgtatttagggttgggagccgatgcctcccagcttcccgccggatatccgaccgacggtactcagggacaccgcaggagctcgggggcttacgcctacggggctttcaccctctccggcgccgcgttccagcggacttcggcttcgcccccagggctcctccgcgggccctacaacaccacatcccccgaacctttcggcccggggttcagtttgccctgtgccgctttcggtcgcccctactaacggcatcgcttttgctttcttttcctgcgggtactaagatgtttcaattccccgcgttccccctcccgactgggagtgcggcaaaagccgcgggaggtcccattcgggcatccccggttcgacggctgcctgcgcctcgccggggcttatcgcagcttgccacgcccttcgtcggcgccccgagccgagccatccaccaggcggcttagttgccaccgggcgggacgttttctggaccagctcgcctatgcacggccctcatcgtgacccctgttcggggtctcaggcccttccaccccgagccgtgctcgggatgtgcacctcttcgtggtggaccggccgggattcgaacccggggccttcggcttgcaaagccgacgctctcccaggctgagctaccggcccactgatggcaggcccgacatcccttaaaccccccggacgggatttccggcgataggaggtgatcgagccgtaggttcccctacggctaccttgttacgacttctcccccctcacggagcccaggctcgacccggcctccccgaagggagaccaggcctcacccggaccccgctcgggtggagtgacgggcggtgtgtgcaaggagcagggacgtattcgccgcgcgatgatgacacgcgggtactagggattccagcttcacgcgggcgagttgcagcccgcgatccgaactgagggcgggtttaggggattcccttcccctttcggggtcggatcccattgtcccgcccattgtagcgcgcgtgtagcccgggggtttcggggcatactgacctaccgtcgcccgctccttcctccggcttatcgccggcggtccccccagagtgcctcctccccagcggggaggactggcaactgggggcgcgggtctcgctcgttaccacacttaagtggacgcctcacggtacgagctgacggcggccatgcacctcctctcggcgtgtccggcaagaccttcagcctggccttcatcctgccgtcgcccccggtgaggttcccggcgttgaatccaattaaaccgcacgctccaccccttgtagtgctcccccgccaattcctttaagtttcagccttgcggccgtactccccaggcggcgggcttaacggcttccctccggcaccgggcgagctcgaagctcgcccgacacctagcccgcatcctttacagccaggactacccgggtatctaatccggttcgctcccctggccttcgtccctcaccgtcggacccgttccagccgggcgccttcgccactggcggtccccctgggattataggatttcacccctaccccaggggtacccccggcctctcccggtcccaaggcccgcagtatccccagcaagccccacggttgagccgtgggatttcgccagggacttacgggcccggctacggacgctttaggcccaataatagcggccaccactcgggccgccggtattaccgcggcggctgccaccggccttgcccagcccttattcccggagctttttacactccggaaaagccgtggctatgccacggcactgggggtccccccgtcgcggttgcccgcattgcggaggtttcgcgcctgctgcgccccgtagggcctggacccgtgtctcagtgtccatctccgggctcccactctcatggcccgtaccgatcttcggcttggtgggccgttaccccaccaactacctaatcggccgccggcccatcctcgggcgggcagatgcccctttcggcctgaggaccttccagtacctcaggcctatgggggattagccccagtttcccggggttatccccctcccgagggtaggttaccgacgtgttactgagccgtccgccggtgcgcgcagagcgcgccccatgactcgcatggcttagtcggacccccatagcagtggcctccggcaggatcaaccggaattgagcaaggagtacggccggtgggacttcccttagcgggaagtaccataattcccgtccggggtttggtcgggatgtcgggcctgccttacccccgaggggtccgcctttcggcgtttcctcgggagcgcacctttttgtgacccgagctggagggcggggttcatcctgggtgctttgcacccgttccccccgacgccgccgtcttggcgctcgggtttcgtcgcgccctgttcgggcgctccaccctatagggacgaacccctgcagtgaaaaatttttgcaaaaccctggaggagccatatttttgaaaatgaaagcgttaaaaaggagttccaaatgtggaaaaattagcataaaaatgtcaaaacataatgatagaacctagcaagatcactcaagctttagcaactctggcactatgcttatcctcgataccggagttggtatggtgttggtaacggcaagctcatcaacagccctgctgaccctttctattgccccctcggcaaagacaccgtgcgttgcggagacgtaaattttcttggccccgagcttcctcaacagttcagcggccctcaccatagtaccgcccgtgctgattatgtcgtccactatcaggacgtttttgcccttcacatcaacgtcaacgggatgcatctcgacctctgtcggggatatcctgcgcttctcaaagtggctgtactcaagaccaaggacttccgcaacggccctggccctctccaacgcacctttgtcgggtgcgagcacaaggccgtcccccagcttctcacggaagtactcgccaataaccctggcaggtgaaacattaactgccttccctgggaagaacctgagagtctcagggttgtgggtgtcaaagatgtagagctcctcgtagtagatgccgagcgccctcatgaccgccctgacgcttatcggctccccatccttggtcaccctgtcctgcctgctgtaggcgaagtacggaacaaccagcttcagcttttcaaaacctttctctctcagagcatccccaaggagtaacagctcgactatcttctcgtcctgcgggtagaatgttgagcttacgactgttgcttcatccccgttgcccataaccctcacgtacttctcaccatcggggaagcgctttatctcaacctcaagaatcttcgcacctgcattcctgagctcatcctcgaagtgctttccaccgctgcccagaagaaacatccaaccacctcctttgccgaattcctgtcgaatttaccccttataaactcaccgtcataccaggaggacggcaataactcccgctaagaacacaccgtcgaaggtacccgccccaccaatgctgaccatgggagcatcaaggtgcttcagttttttccagttcattatgtccgcaccaagaagcgcgccaagggttccgctgacgtaggcaaccaacgttgggtttccgtccccgagcagccacccgaggaggaccgcaacgagaggtgggacgattgagggcatcgctatacccacgcccctgactggtacagagacagcgttgcatatgagtgccgctatcaggactgcgaggagtgtgttaaagagtagtccgtactgtcccaacattgcaattcggataagctcgtagaggactatgctcagggggacaagcgcgccgccgacgtttatcgagattatcattctccgctcttccaccccaaagtacggaattgggtagaggaacccaaagaagctgacttctctcagcttgatgacgggctcgtaggctctctcctctgctattgggatgtttatgaagctcccaacgagggcaaagacgaacatcgtaagggccacttctggcgggagtcccagccttcgaaaagcaacgagaacagccccggagaagaaagcaaacacaattaccagaaagaggccgaggagcaggagaactggccagcggagggctgggaaaaagagggctaatctttgagaaccacgttggcccatatctgaacccccttggccatctcaacttccttaggcttctcaaacttctcggcgttcttaaagacccacgcgtagagcggctttccattggagtactccttcagaaactcgggctcggcgcggtgcttgtcaaagtgctccgcaagctcctccggagaaaaaggccccagaacgtccacgagctctgcctttcctatggccttcccgttgcttatgatgagcacttctccccttatcttcgtcctggacttgcgtatctcccacaccttctcgccctcgacgatgagggtcgcgtacggctccctaactatcagtcctttcttcttctcagtcatcatggtgaactacccacaacccttaataaagccaacgccgagaaaactttaagttaaccccaccgaaacttcccgaggaggtcatgccgatgaagatcatatggtacggtcattcctgcttctggatagagacgaagggagtgaagttcctcatagacccgtatccagaggttgacgacgacaggataggtgacgtggactacatcctgataacccacgagcacacggaccattatgggaaggtcgaactgctctcaaggcttagggatgcaacagtcatcgggccgaagcaggtgtacctcatggcagtagccgacggtgtcaccaaggcgagggaaattgacgccggagagactatagaactcgagaacggcgttaaggttactgcaatctacgttgagcatccttcaagccagtaccctctcggttatataatcgaaggtgacaaaacggttttccaccctggggacacgtactcaacacccgccttccagaggctgagggggaagatcgacgttctcctggttcctatcagcggccgttccacagcgaacgagagagaggcagctcagataatcgaagatatcagacccaaggttgttatacccatgcactacggagtttacaacgacgaagacccctcaaagcttgagagcgagctgaggaagagaaggatatgggttcgcttcataaagccagaactgtacagagagatcgaagtttgagggaacttcatgctctcgacgggcactaagagcctggacagtcttctcgggggcgggttcgctcccggggtcttaacccaggtttacgggccttatgcgagcggtaagacgaccctggccctgcagaccggcctgcttagtgggaaaaaggtagcatacgtcgataccgaggggggattttctcccgaaagacttgtccagatggctgagacgagaggtctaaaccccgaagaggccctctcgaggttcattctgtttacaccttcagatttcaaggagcagaggcgcgttataggttcgctgaaaaagacggtggacagcaactttgcactagtcgtagttgactcaataaccgctcactatagagcagaggaaaacagaagcggcctgatagctgaactgagcagacagcttcaggttctcctctggatagcccggaagcataacataccggtaatagtcatcaaccaggtccacttcgacagcagaaccgagatgacaaagcccgtcgccgagcagacccttggataccgctgtaaggacatcctccgcctcgataagctgccgaagccagggctaagggttgccgtcctcgaaagacaccgcttcagacccgaagggcttatggcatatttcaggataacggagaggggaatagaggacgttgagtgagtggtatgatgacagttcttcttgttggcagatattacttggtgagtatagtaccaattcagtaatatcaccgattggtttcttttaggataagaaaagaggaaagctcagaacccaggctcgatcttctccagttccctaacgagctctatcgtccgcttgaggatttcgacgactttataaacgtgctcaagctcttctaagctgagcttccttcccttcctgcccttcaggtacttctcgacgacgcggtagccgcctatcgtgtagttccagactttagagcgcaaagggatgctaaggtttccaccgcaacgtttttacgtcccttatttctactataatccggtgagactatggggatcacaaaggtaactaggaactatcagattactatcccaagcgatatcaggaagaagctgggcatcaaggtgggggacgttcttgtcatcgagatcgaagatgggaaagccgtgataaaaaagagcgacctcgaacttcccctgctacccggcggaaagggactgaagatcgaggacatcgaggaagccataagaaagggccagggtgaggatgagtgacggtaatagacaccaacgtcttcatatacgccaccctacgggactcagagttcaacgcagaggcgaggaaactgctggcagggctggaaagatggatagttccgagcattgtcctctacgagctctactggtttttcagggaagaagggtacaaaagcgaggaaataaataacgtcatctcctcaatcctaaacagcccaaggacgcgggttatctgcgacactgggaagtacacgaaacgcgcgctagaactcaccagaaacccaaagcggttcaatgacatggtaatactagccacggcagaggacttcaagagactggcaacatacgataaaaggctgaaaaaagaggctgaaaagctggaaatcaagaccctgccttaaaccctctcaaatacctcctgcgttatcctgagcacggcgcggtagagcttctcgctgatgatgccctcttcgtagtgctccttgagctcctcctgatcgattatctccttcttgccgtccggccacttaactatatcaacttcgaggtcaacgtagcgagccccgtcaggatatatctcaacgggcgtgtttatgttgtagtactctcccttcaggttgccgttcttgtcgtaatacctgtgcacgaaccaccactttccagcttcgagctcggttatggcataatctccaaactcaatcggaagctcaaggccgtcgtagaacttgcccggcttgaggtgtctctttattgtgaccctaagcgggttgtgggagacctccaagacctctccaggccctagcctaatcctctgcccatcgggcttgacgtgctcaagggtgaagagccagcccttcttaggccctttgttctccacgagcgcctcccagaagccctggttaaccttgaccctctggccaggtacctttgagagtattccctcggctatctcgacggcaaagccaagctccgggtctttggccttgagctggtggtggccatcaacggttgggacgaccttgttccttatctcgtcgagctttctcttcgctcctcctccgaactccacttcatatatgttcctgccctcgattatcagggaaggtgcaaagtacgtgtcggcctttgccagcctgtcggcgagcttggagagcctcactatctcgtccctgagaaggttccagtccttgtaagcggctgcagtcctccagaggactccccacttgccgaggtctatgctgagacccagaatcctgagcctctcacgctcctggttgtcccttatcttcctcgatatcttaacgtgcctctgtgcccctatgggcttcggtatgaggacagcgtagtcccccggtatcgtgagggtggtgctgaggtgtggaaggaggttgtgcttcttgacctggacgagtatctcatcgccttcaacggccttcggaagatccttccttgggattgtaccaatggcacttcccaggtcaacgtaaacgtacttttcgtcgattttcacaacaagtcccttgtatatgccgtagagctggtacgggagccttctaaaaaagacgtcaataagttcctcttcaaggaccttcttggcctcttcaacggcatccccaacgagcacaaccccgtgtctgtccttcttatcgtagatgtcaacgtcgaagtcgtcgtaggtcttctcgaggccgaagcgctcgacgatcttgttgctgggctggctgatgccgaaccccctgtcgaggaagagtttcgtcagggcagtgctgtatattcccctaattctgactgtaggccttgtgtctgtagacactttcaccacccctatcctttttctcgattaccccaatgagcgcgagtccctcaagtatctcgccagcctctctcactccgctggccttctcaacgtttctcgcctcgacccagagcaggccttttgcgtgccactcccttagggcctgctcgaccctgtgaacgtccgaggggtgaacgtaaagcctgtaaaggaacctcttgagggtctcaagctggctctcaattgctttagtttttctaagctcctcaagtatgctgactggaacctttttttggttttcgcctaggagcgtcagaccttcaacctcggcagaaagctcactcagggccttccggatggcataatcgtagagcctgtggaactgaaccagcctgtccaaagcggccttaagcctcgccctgccctcatagtcgtcgcgcccaagaagggacatcacttcttcaaggcggaacttcatctgatgctcgttcttgtaaagttccttagcgagatcttcgacccttccacctattgcggatagttccttgtagaggtgagaggctaactcaagcttttttgccgacaaagagtgaagcttcctcacaacctccgtgggctcctcttccggttcatagagccgtgaaaagacctcctcaaaggacgaatgcatcccctcaaaatcaccgagcctggccttcagttcatcaacgtccatcggcaccccctaatcctaagttgcaactaccactacttttacttttccattgaggggaggcaatcttgggaaaacagaaacgcttaaccgaaatccttttttaagccccttcataatacaaatgggtggacgaagtgctctacgaccgcttcggcaggccagtaacgaacctcaggatttcgctcacgcaggagtgcaattaccgttgcttcttctgtcaccgggaaggccagaggtttctggcgaaaaacgagctcactccagaggagatagagcgcctcgttagaatcgcatcaaggctcggaataagaaaggtcaagctcacgggcggggaaccgacagtcagagaggatatacttgaaatcgtgaagagaataaagccctacgtcatcgacctcagcatgactactaacgggagtagactgaaggagctggcgaagccgctggccaaagcaggcctcgacagggtgaacgtatcgcttcacagcttaaagccggaggtttacaaaaggataaccggcgttgatgggcttgaggccgttcttgagggcatcgaggaagcggtgaaatacctctcgccagttaaactcaacatgaccgtcatgaagggcctgaacgacggtgaaatctgggacatggtggaattcgcggctaagactggaaccatccttcagcttatagagcttgaagcgccaagggagatggccgagacggcatttttcaggaagtacttctacccgctcaagcccgttgaagagaagctggagaagctcgccgtcgaaactaaggaaaggaggatgcaccggaggaagaagtacttcatcccgaccgactacggcatagcagaggttgaagtcgttagggcgatgcacaacactgtcttctgcgccaactgcacgagactgagggtgacctccgatggcaagtttaaaacttgcttgttgaggaacaacgacctcatagacttcctttctgctatgagaaacggagcgagcgacgaggagatagttgaaatcttcaaaagggccgttcttatgagggagccgtactggaaatgatgccctaatagagcttttattcagaacaagaagtcaaagttgggcaaggtttttagggataacgtggataacaaaatttggaggctagcaatggttaacccgattaatttcaacggcttcatagcgggatggttgctacttctcggggcactcattggtatataccgggcgttgtactactacaaaagagtcccagagccggggaagagcctcgccaaaagaacccttatctcgcttctgttctttggtctgggctctgtgagtgcaattatagactcactcaccccgaggcccctctggtttttgatggtgatattctacaccctctcatatgctgcaattttgtccacgatattcctgagtttaagggcagtagcaactagtattgagaaaccggaaggggttaaagaaaggagcacagctcaaaaaactccagaaagaaatgagactagagaaaaggaacttcccctacatggagggtattcactgcgcaaagagccctccgctcagttgttccacattcttaaagaagtctccagtggcctgatagtcgtcagcagaaagtcccgcgaagagtgggtcgagaagttcggagttcagccggacgagttcctctggctgtcgagggcagacgtcgagaattctatcgacccctcaaaactccacgtcatccagggaaagattctccagttcatggagcagcgtgggccagttgttgtgtactttgatgggctggagtacctaaccctctacaacgacttcccagcggtggccaagttcctgttcgcagtcaaggacatggtaatgattaaaaactcactcatgctcatccaccttccggagggcatctttgacaaaaaacaagagattatactgctcagggagttcgaggaaataaatgaagaggagctcattaaaaagctcagtcaggccttgtcccccgaaagagccgaggaaatagcactgtttggtgtccttcccccagcaacaaagagtggggatgccaaagatgccagcgataaaagtcccgaagagggaggccgagccactaaagaggaagctcaagaagctgaacctctacgacgggaagagaaggccaaggagtgaaggtgacttcgtcctgcttccggttatagatgatcctcgtgtttacgagctgggacacgaggttctgcccgttgaactcccgctgaggcctgaaaggcagatatacaagaaccttgagagcgttctagcggagaggctgacgtctgaggagctgaagtatctgaggcgctacgacgtcatcggcgacatagctgttatccaaatccctcccgagcttgagcacagagccgaggatattgtctggggcctgaggaaagtccacccgttcatcaaggtcgttgccaagaagggcttccatgagggtgccttcagaataagggactactccataatctggggggagaaacggctgacaacagttcacaaggagaacggggtcgagataaaggttgatttgagtaaagctttcttcaacccgagaatgaagggcgagcggtacaggctggcccagctcgtgaaggacggcgagcggattttaattcccttcgctggagtcctgccatatgcactcgttatagcccgctataagaaagtcaaaatcaccgccgtcgagctgaacgaagatgcctacaggctggggctggagaacatcgagctgaacaggaagaggctcaagggggagatagagctcatacaaggagacgccttcaaggtcctgccagaactgccaactttcgagagggtgataagtcccacaccgaggggcgttgatgcccttgctttaaccctaagcaaagcccagaagtggctccactactacgacttcgtgcacgaggagaagataggagagttcggggagagaatcctcgaagagtgcagaaaacagggaaaagattgcagggtcaggataaagaaggtcagcgacttcaagccgcatgtgttcaaggtttgtgcggatgttgagattctgggttgatcggtcaaaattcttataagtattcacgccgtaattatgcacatgagaataattcacagaagaatagaactgtcgaggctcgagggcgaaggctggaagatgctctacggtaggcggaagacaggaaagaccttcctcgttaggaatttcctcgactacgacgagttcttcttcgttgagcgggagggaatggttagggacctaaatgagggctccacaatgacttacggcgagttcatgaggctcttccctcgcctgctgaagggcggtaaggtggtggtggacgagttccacaggctaccggataggttcctcgacctcctccacgcctactctggaaccggggagctcatcctcataacctcaacccgctggctagcgaagaggaaactccttggaaccgggagtccgctcctcgggatagtccagccgataaggatagatcccatagacgagagggagattttagccgagatgagcagagaagtgaggggaaaggagctaattgaggcatctacctacctcagggagcctatcctcgtccccctttacaggtcgcctttgagggagttcttggccggctatctgagttcttcgggtttgctgataggcgagctcgttggcgaggccttcacggaggaggagagggagctgacggaagtttacagggcaataatgaagggcatcgccgatggaaaggaaacgagcacggagctttcttcgttcctctactccctcagcctgataagcaaggacaacactggagtcttgcagaggtaccttggagtcctaacggacatggggatacttaggagaacccaggtcactggaaagaggaggaagaagttcgtttacaggcacgcgtcacccctcttcgacacttcacttctaccttgaggcaaaatacgcctacacggagcttgagactcctgtggagttcataaggaaggcgatagacaggaaactaccgaggcacgttgaggccttcgttgaagggcttttggccaagagcctcggcctgaggcctgtgaggattgaaatgcacacagatttggagcttgacatagcatcttcagggcttcaagaagctcgaagtggttggagaggtcaagtggaaggagagagttaagagggaggaagtgaggagaatagaggagaaactcaaccgctttgactgcaggaggattttggtggttccagacgaaaacgttctcgaaaggaagcctgagggcgttgaagtcctaacgcccgaggatctggttgagattgcgaaagaagggatggagaggagtatttaggccctttccttgtggaagaacccgacgacctttccctcttccatcgtcttcctcagcatctcggcggctttctcccctcttctgcgttcatccttctcttttatcccgtacttctcagggttttcgagcatatccctcgccagcttcagggcctcggctatgctaacctcttccatcgccagctcgtagacagggttgtcatggggtatgagcgaagcatcttgagccctcagttccatgagggcctgagatggccctttttcaccgagaggggaagtggggagtaaaggatccacatcaagagagcaggaacctccacagggggaggcatctgacgtttatccccttcaccctctcctcgcaggacttccagcccgttaccaggatcccttcgcttaagccaaagtgcttcgccgcttcgacaaggccctccacctcccgctcccagctctcgtcaacgtcccagctcacctgaacgagcctcgatatctttagattctctctcaccacgaagtcaacctcgtggccgttcctgtagtagaagacgttctccctcccgtgcctctgcacgaggtgcctcgccaccgcattttccgccaatctccctatgttctctgtgaaccgcgttatcatgacgttggccagcccggtgtcaaccgcatagagcttcttcggatacctcctcacgtccttcacctttggcgagaggatcggaaccctgtggataaggtaagcctcctccattgcgtcgaggacggaatctacaaggtttggcgagacctttctcccaactatccccgagacttcgttcctcagccttgatgcgctcactagagaggagaaccggcttaaggccagctcggcgacgagtttgacgagcctcgcgtccctgaagccgtggcggtaggcaacgtccctaaggattattccctcgaacagttccctcaaaagctccctcttcaatccctcgtcatcggttaggacgacctgcgggaacccgccgaactcaaggtactcccttaaggccctctcaacctcccccctccttccgagaagggcaggaagttcaatggggagccccttgaaggagagaaactctctgaatgagagggggtaaacctctgttactaaaacgcgtccggttaagagggtcgcaagctcggagcggaggagggaggagctcgacccggttactatgacctcggcttcacccaaatccagaaccttcctgacccaccgctcccagccctcgacgttctggacctcgtcgagaaccaccacgggtctagctccccttgagatgtaggttttaaacgccgagaagatctcttccagaagctccaggctcaggtctggatagaacctaggctcctcaaggttaacgtagagcgtctcctccggcggaagacccttctctattaggaatctcaggtactgacgggctaacgtggtcttgcccgccctcctaacccccacgagagccagggcgttccccgtggagagcttccgtcttatatctttaagataatctcctctcgtgatgccagtatcctgctctctaccccaaaagttgtagggggcaagcacctcaataagctcttcccggctcagcattttatatcacagaaaatataagaaaagtgggtttttatatttttcgcaatacaattcacttcttgaggaagtcgaacagcgtcgcctgcttgcccttcttggttttctccttctcgggcttctccttcttcccaacggtctctatctcttcctccgcttcctcaagctcctcctcggttaactcttcctcctcgacttcttcaagttcttcttcaggttccccagcttccatagtttcctcttcctcagccgcttccacccttctttcggcttcctttgctctcgcctcaagctcgccttcttttttgagtttcttctcaatgttcatgctctttgcccatatcgtcttcgccttctccttgtctccagttatgaactcaacttccttctcgctgaggtcgaggaaaacgacaaagtgggccgccaaatcggggttgttctcgaagataactctaaggtagcggagggtctctatggcctcaagcttagccatgtgcatctcgctcattatcttcttgattactgagtccctgagcgaacgctcctccttgctctcggtgaggagctttatcgtcttaggtgggtagatcttaacgaagcccttcttcttgatgccagcgaccgccaccccagccgtcatcatgtcggtcgcgtacttccagaggccgtagtttccagtcctctgtgccctaccgaggtatatgtcagccctgctgagcgcctcgtaggccctcgctatgtcttcaggcctgtagtagacatacgggacgttctcgtctatccactggagaagctcgttaggcatcatgtcaactccaagaacagctaactttgccctcttggcgttgtccgttgcgaacagctgggcaagcgcctggaaaacgctcttctcagtgtcgcggtaagccaggacttcaacggcatcctcgactccaccggtaacaacggtctgaagatcgtttacagctgccctcaggtcgccgttagccctcttcgctatctcgtagagaacctccttgggaacttcgagtccctcacgcttgaggattctcacgagggcctttatgatgtccctctgcgtcaacctcttgtactcgactatctgggctttgttgcgtatctccctgggaacctcccagtagtggttggcgctcattattatcgggtttctggccttgtcgatgagcttcgctatctccctcgccccagagggctcgatgttgtcagcctcgtcaaggaatatcagcttcctcctctttccgagaatatccatagtgtatgcagcttgaacgtagcgctctatcttttcatacgtcctctcgtcgcttgcgttgagctcgatgacctcgaagccgtactcgttggccagggcatagacggtggtcgttttgccgactccaggggggcctgctagaaggagggccttcttcttcggcggatttccgtggagccaggcttcgacccacgccctaacctgctctaacgctttctcctggtttactatctcgctgagcttcctaggtctgtatttttcaacccatgggacttccgtcatagggatcacttacccataatcgtgaactgggcaaggagtgcctcgagctgtatcatctcgttagccccttcaaccaggcggaagttgtactctcctatcttgtccgccagggccaccttcttgtcctcgggaatcgggaggttgaagacctccttgtgcatctggatgaggacatcttcaccgctgaggccctgccttaacaggatatccctcagcttctctctggccttcaggaagttgccttccagagcaagggtcatcatttcacgtacgtcttcaggcctcgccctgctggccacgaggaagacgttctcgtcggttatcttcgtgtcgagggctgctgccgcctgaaggacgttgattgccctcctgagatcgccctcagcgacgtagagtatcgcctgcaggccttcctcggtgagctcgagaccctcattttcggctatgtacctgatgcgcttcgctatgtcctcatcgcggagcggtctgaagcggaagatggcacacctcgactgtatgggttcgatgatctttgaggagtagttacagctcaggataaagcggacgttgttcgagaacatctccatcgtccttctgagggcctgctgagcgtcctgtgtgagggcatctgcctcatcaaggaagattatcttaaagctcgcaccgcctatcggcttcgtcctcgcgaactcctttaccttttcacggatgacgtttatacccctctcatcgctcgcgttcagctctaggaagttgtgcctccagttctcaccgaagagttctctagctaaagccagtgcagcggttgtgttgtgaacaaccgtcggcatgtttccggcgatgaagttgtggtatcctggaacgtggaggtcgtagatgacgaagtcgcccttaagctccttcacttcggttatctcgtcccagtagagctcattctgggagaggaatatcaggtatgctaccccttccttaagcttctcgtcggagaggatttcccctattagttcgagctcgattttccttatttcctcaagttccttgatcttctccgtgttgctctcaagaattattctcacgctggagttccaggtgccgagtttccttccgatttcggcatagcttgagtacttccttgcaaagaccctcatggcattaatcgtaggttcaaggtcgatcccaagggccttcgctatcttgatgtagttcctcaggctcggcttcctcttgcccttaatgtactcgaggagtctgtcggccctaatccccgtcttttccgctatctcctttctccgctccgccatctcgttccagtctatgaggatgctccttgagagggattctttcagtctctcaagctcatcgaggcggtagtaaatttccttcatcagctcccacgagatctttctagcctttctgtggctccagctcctcttatcgtcggagaagtttagcttaagcctgtctctaacgtaggagataagttcatagttgacattcaagctgtcgaggttcgggttgggcttcttgacgagctttagggttctttccaatttttccctgtgggagaagccgatctcgctcagaaacctctccaagttctctgaacctgagattgtgacatggtagtatgtcttacccctgacttttttctcccttatctttgaggttattccaaaaccagctaaggcataggtcacctgctccgccatttccctgctggcagttgccagtactacggcgttcttatcaactccagcatcgcagtcaaagtatgccctgaggaaggagcgaatcccctcccagcctttctcaggtatgtaaaccttatccgcttttctcccggccaaaccaagcgaacttacaagctcccaggccctccgtgagttcacgtaaacgtccggtgccctgtttttgtggattctttccctgatcttcgcatctgggaagagcctctcggtcagctccataaagcgctgccttaaagatgggtctgtgtttgtaaaggtgattactttattcttcgagtcggcgtggccgtccccaataaaatagccaagccactcagccagggggtcttcctcagctatggccggaaggaagcgcggcacggcaagcctgtcgcctggtctgagttcctcagcctttacccacatgatctccccgtttttcctgttcacgagtagcgggtgatagggagtgaccttgagctccctaccgaggcgagtccttacctttatcagcctctcggccctgtccttgtagacgtactgaacctcgaactccctcagctttccgtcctcatctattccaaggactttgagaccttcaactggtgtggggccgaacctacccttggaaactttttcaacgagttctcccagctcaaagagcctgccgttggctatgaccttagcatccccagtgaggcacttcccgacgccgggtggccctgcgaatagaaggtgcggcatcgagccggttttaacgtagtgcttcagcctcttgactatgtgatcctgacctactatgtcctcgagcctctggggtctgtacttctcgacccacggcttttcgagaattttaacttccttcacttcctcggacatggattttcacctaaacctttatgagcccccggagtttaaggcttttgccgtctcactgggacgctgtacccaaccaaccattgtcttctcgtggaactgcactgacctgcccactgcaaaacttttatacttcaatgaccaagaaccatcggtgattctcatgggaaagcttgactggattagggaggagctccaggagctcaaggataagggattgtatgtaaccatcagaaagcttgagagcgcccagggcccgtgggttgtagttgacgggaagaaagttctcaacatgtgctccaacaactatctcggcctagccgcccacccggagataagatacgcggccataagggctatccttgactacggtgttggtgctggagctgttagaactatcgccggaaccatggagctccacgtggagctcgaggagaagctggccaagttcaagaagagggaagcggccatactcttccagagcggttacaacgccaacctcggagctataagcgcgctccttaagaagggcgaggacggtgtgttcatcagcgaagaactcaaccacgcgagcatcatagatggaatgcgcctcagcggtgcgcctaaggtcatctacaagcacatagatatggaggacttaaagaagcgcctcgaagagaacaaggacaagaagaagaaaatcatcgtcagcgacggcgtcttctcgatggacggcgatttagcaccgctcccggagatggccgagctggctgaacagtacgatgccatactctacatcgacgacgcccacggtgagggtgtcctcggtgacagcggaaggggtatcgttgaccacttcaagctccacgacaaggttgacttcgaaatgggtaccctcagcaaggccttcggtgtcattggaggctacgtagcgggtccggaggaggctatcgaatacctccgccagagggcgaggccgttcctcttctcgagcgccccgaacccacctgatgttgcagcggctatagcggccgttgagatactccagaggagtgacgagctcgttaggaagctctgggacaacaccaacttcctccagaagggcctcagagacctcggctacgacctcggcaacaccaagcacccgataaccccagttatgctctacgatgagaagctcgcccaggagttctcgagaaggctgtacgacgagtacaacatcttcgcgcaggcgatcgtctatccgacagttccgctcggaactgcgaggattaggctcgaaccctcagccgcccacagcaaggaggatcttcagtacgtcatagatgccttcgaagacctcggaaagaagaccgggttcctgaagtgaagttctaactttgaacattttttccatttttgttatgtttttgcaacccttagtcaagattcagattataaagtcagcaggaagggcttataaacttttgtcacatattacatatttaggtgtaagacgtgacagccaacattatgcacatcgtccttgcaggattgcctagcagggattgcctagtggcgctgctcactataaccctgcttagcttgtactacagacaccaatttatttcccactatccccagttctcccgctcgtacgatttaatcacactcggtttttcactcacctccctggcaaagacgattttcctacccctcgacctcaacgatgcagggtttatccacttagagcagagtacggagaatttcctcggcactattgggaacctcctcctcttcatagggctctttcctatgattttcggctgggcaggtataatatcgtccataacaaggagatacgagctcgttcccgttgtggagatagagggcgagcccgaagagatgtcccccggagtgtatattaccccctctggttcaggccccaaccttctgtcaaagcttattaagggccgtgctcctctcataataacccgtacaatgccaaaaagcgtgagaaaggcccttaacattaaagaggttccggttttgtggattacagccgctgaatgcagcgagggctgtgttaatccccgcaggcttgagtacctgctccacaccctggtcaatttcatgcggcgggaggaaaccccaaagcttatttatctcgatggtcttgaatacctagttatcgaaaacggctttattcccgtctacaagttcctttcagccctaaaggactatgccctcattaccaacactgtgatcttagtgcccgccgagaaggcatccttcaatgagagggagtggaacctgctgaggagggagtttgaatccctccaagaaaaagccgaatgagtctagaacttcacccactcgaccttgtagtaggtcacgtcggcgtcctcgtcaactatcgccattatcatgttcttcctcacgccgtgagccaccctgacgcgagcggttatgtcgtttggacttaacctggagttctcggggacaacccagacgagccactcggagtgctcttccattcccctccggtagaccctgaagtgggagccgaacttcaggccggacttcacagtgtagcccctatctctcaggtccttgtagacgagatattttgcatcaaagagctcatccctggccctgccgaggttcattatctcctcaagcgagagcttcctcttgccgtccctgacctcaatcttgccgcgctccactagataggccgcttctagaagagatagaaacagcttaccctcaacgacctttccaaagtatcgcttgttgtagagcccgtttatcgcgttctgatcggttgagaagaccctgtcgccgctcaggtagaagattatcatcagcttcccctccattcctccgctgggagtagcatgtagtaggcatcctcgccgtcggagtagtaacctataatcctcttaaccttcctgaagccaaagcgttcgtagagccttatcgcgttttcgttgctcaccctgacttccaggccgatgtagcgggcgcccctctttatgagtctttcaatggcttcagataggagggcagaacctatcccgttgccccggtactctttatcaacggctatgctcattatgtgtccttcaaggtctggtctgaggtagcccatcacgtagccaacaaccttcccgttgtactccgccacgagaaaggtttcgggattgttctcgagaaacattaagaaaatccctctcgggtaggcctcgcggaaagattcgcgctctatcctcataacctcagggatgtcgaagagcttcgccggccttatcacgaccatcgcgaggggaatccttctgctggcctctctggctgatgtgctcatattacaaactccctccaaagccttaaaaggattgaggagagcccttgatgggtggccacccaaggtgatgagcactctcgaacctgacgggcaggatgatgagcggattcctggctgatttttctccttttgtggtaagaataggcaagcagcaaagtttaaaactctgaaactggaagttactcgataggtgggagttatgaggatagccgaggatattaacaagcccgttggaatcgtgactggggaggcaacggttagttcgttccagttctacgctcatcccgacacggacctgaagttcggagacttcgtggttgcgaggctctgtaaggaagccaaagatcaaaactgccgctggggagagaatgaagagggtgttgagtgggttatcggcacaataagagggcttaagaacataaactggctcctgagcgagggtaagagcacatacacgtcccttgagctcgacataagggagtacggcgagagcataggagagaacgaggcgctgatagttaccgtccacgtcctcgggaaggttcaactcaacggcgagaaggctgaagtagtcccgaccagagttcccgtcccaaacgggaacagggtttatttagccagctcagaccttttgagggcaatatactacggcggaaacggctacatagagcttggaagactgataatcagggaagacgtcccggtttacctcaacgtgaacgagcttgtgtcaaggcacttcgcaattttagctgtgacaggtgccggaaaaagcaacaccgtctcagtaatgctctggaagcttgtggaagaattaggcggaactgtgatagtcctcgacccccacggtgactacacgaagttgagcctgcctgggacgggaagagaatatgtgaacctgatagaggccaagataaggccggaagcaatggacggcgaggagctggcagatttgatggagatccagagcaacgcgagcatacagcgctcctacctgctcagggcctgggacacggttcttcacgagaaccagggaattggcggccgggaagcggtcaagctcgtccacgatttactccagcggtgggctagcgagggcggagggacatactgggatccgcatgccggccagtatagagacctcggagagataaaatcggcggagaaggagacgataatgaggcttaccatgaaagtctcccgcttcctgaggaactacggccatctgctctcgagcgaggacatagttgccctcatagagcccggcaaggtgaacgtgatcgacctcggcccgctcgacgagggacagatgaaactggtagttgccaagttcctcgaaaaggtcttcgagacgaggatggactacgaaaaagctagaaagaggctcgactacctcagaactgcctattcgagcaacatatcggccgtttcggatgagataaacgagctggaagaattcctgaggggagttgagaagaactacccagcccttgctgaacctgttatggtcatcgtggaagaggcccacatcttcgcaccgcatggcgagaagggaggggccgttagaatccttgggaggatagcaagggagggaaggaagttcggcgtcggcctcggtctggtctcccagaggccgagcaggctcagcgaagacgtcctgagccagacaaacaccaagatcatcatgcgcatcgttaatccgaacgaccagcagtacgtggtaagggccagcgagcaggtgagcggggagcttatgagcgacatcgctggactgggcaagggtgaggcggtgatagtcggtcaggcgataagccttccggctttggttaagatatacaacttcaaggccctcggcgggaactacggaggagaagacataggcgcggtcgagaggtggcttgaaaggaagaggcgcgagcttgaggagaaggagaaggaagagatgtatgaagaagagggcatcgaggttgacttttgaggtgatatcgtgagggaaaatgcaagaaaaagaccggaactgccctggaaaggtgccctcggggatattaagcccaagtataactcggttgaactccagcataaggttctggagttttgggctggtgggaggaatctccaatgaagttcgcacacatagctgacgttcatctcggcttcgagcagtaccgcctgccgtatagagccgacgagttcgcggaggcattcaggcgggcgattgagatagccgtagaggagaaggtggacttcatactcatagctggagacctcttccactccagcagacccagccctgaaacgctgaaacaggcgatggaaatactctcactgccgaaggagaagggcataccagtttttggaatcgagggaaaccacgacaggacgcagaggagggtttctgcttaccatctcctcgaaaagctcggcctgctctacctcatcggcctcagggaggagaaggttgagagcgagcaccagacgagcgagaagaccgagaggggctggctcgttaaaggggtttttgagaagggcaacaaaagcgtcgagatacacggtatgaagtacatgagtgcggcgtggctcgaaaagaacccgccgaaggagatattcaggccggagggggactccatactcatgctccaccaaggggttagggaactcgtcgaggagatgatgggcaaactgcctgagagccagcgcgactactacgagctcaagctcggcgacctgccgaagggctacctctactacgccctcggccacatccacagggcgttcctgacgagctacgacatcggaaagctcgtctatcccggctcgctccagaggtgggacttcggggactacgagataaggtaccgctgggacgggaataccttcaaaccgaccgctgggaaccctaagggcttctacatcgtcgaggactgggagccgaggttcgtggagctgaatgtcaggcccttcattgacgtcaacataaaggccgacgaagagacagcaaagagggagctgaagcgcctctccaccaagattccagaggaagcctttgtgaggctcgacatccgctgggagaggccctacgacgtttcaaagctcaccgagctgataaaggcccgctacgtctacgtgaggacgaggttcgagaggaagctgaccggaagaaccccctcgggagaagttccaaagccagaggagtacttcattcccgtcgagctgaaggcgataaacctcacgggcgaaaaggctatcgagtctattgaagaagtcgttgagctcttcctgggtgagggatgggacgagaagcttcctaagaaaactgaagagcccgaaaggaaagaagatgctacagccaagaaagaaggaggccctgagaaagaaaagaggcccaaaacccaagggaaagaacagagggagacgaaagagcgcaaggactctgaaaagaaggtcgttaaaaggccttccaaaggttcaaacctcctcgactggctcggtggtgggagatgaagattgaaaagctcataataaaggacttccgctctcacgccctcacgaaggtgaacttctcgagcgggataaacctgataatcggccagaacgggagcgggaagagctctatcctcgatgccctcctcgtggggctctactggccgtcaaagccgaaagacctgaaaaaggacgacttcgagaggataaacgggagcgggacggaaattaccgtgttcttcgagaaggggaacgtgaagtaccagatacacaggaacatcggcaggggactggcctttgtgaagtaccacgacggaagctcctggaagacccttgagacgggccagaagcccgtgagggattggatggagaagctggttccctacgatgtcttcctcaacgcgatctacatccgacagggcgagatagacgctatcctcgagagcgacgagagcagggaaaaagtagtcaggcaggttctcggcctcgatcgatacgaaaactcctacaagaaccttctggatgtgagaaaggagattgatgcaaggataaaggcaatcgaggactacctcaagagcaccgagaacatagacgagctaataggaaacctcgaaaaggagctcacttccgtcctcagggaaataaacgaaatctcgccgaaactcccggagctgagaggggagcttggggggcttgagaaggagctgaaggaacttgaaaaaactgctgaggaactcgcaaaggcaagggtcgagctgaagagtgaagagggaaacctgagggagctggaggctaagaagagcggaatccagagcatgatcagggaaaccgagaagagggttgaagaactgaaggagaaggtaaaggagcttgagagcctggaggaaaaggcaaaggaatacgaaaggctctctaggttctacaggaactttaccgagggcataaacagaatagaaaagctcctggccacttactcccagcaggcggagaacctgagggagcgcattgacgagctgagcaagaaagaggcccgagtgaaggagctcctgaaggagaaagaaggacttcaaaaagagctgggagccctcgaagaggacctcaaagcataccagagggctaaggagctgatggccaaccttgagaggctgaagaagaggctcacgctgagcgaggaggaaatagaaaagctagaagcagaaatccaaaaggccagggagagaaaggaagagatcatgaaagaactcgaggagataggctcaaggaggggcgagctgaagagcattgctggtgagaggaacaaggcgctaatggagctcaagaaggcaaagggcagatgcccggtctgcgggagggagctgaccgaggagcacagaaaggagctcctcgagaagtacacggccgagctgaaggagatctccgccgagatgaaagagctcgaaaagagggaaaagaagctcagggccgagctcgtggaggtcgagaagacgctgaagaaggagagggagctgttcgccctcaaagaagtccttgagcagatcagggaaaccgaggagaagctcaaggaatacgacctcgaaaagctcgaagaggccaacgagaaagccgaagagctgaagaaaaagctggctggtttagagggcgagataaaaagcctggaggatgagattaagaaaggggagctcctcaagaagaagctcgcccttgtagaaaagaagctgagggagcttgaggaggagagggcttcccttctcggcgagctgaaaaagctcggatttggagacgttaaggagcttgaggagaggctgaaagagctcgagcccgcttacaagcgctacatcgagcttaggccagcgagggacgagctcaagcgggaggaagaccttctgaagagcctcaagcttgatctcacggccattcttaaggaaatcgagaagacctcgaagagggtcgaggagctgaggaagagagttgaagagctcgaaaagtcctacgataaggacagacacgaggagctgaaggggaagacgagggagctttcaaacgagcttgctggccttgaggcccgcctgaagtcgctcgaagaacgcagggacgaggtaaaggccagccttgagaagctgagggaggagaaggaaaccagaaaggagaaggcaaaggagcttgagaagctcaagaaagcgagagagcgcgtgcagaggctcagggagaaggttaaggcctacaagaacctgctcaaggaaggggccttggccaaggttggcgagatggcgagcgagatatttgaggagcttaccgaggaaaaatattcgggagtcaccgtgaaggccgaggagaacaaggtgaggctcggcgtggtctacaacggaaaggaatacggactcggcttcctcagcggcggcgagaggatagctttaggccttgctttcaggcttgccctctccctatacctcgccggagagataagcctgctcattctcgacgagccgacgccgtacctcgacgaggagaggaggagaaggctcgtggacataatgcagcgctacctcaggaagataccgcaggtcatcgttgtttcccacgacgaggagctgaaggacgcggcggatagggtgataagggtgagccttgagaacggcgtttcagtcgtcagggaagcggaggtgggctgatgtacaggctcatcgacaggaggagcgtggacaggataaaggcgctcctggagaggggctaccgcgaggcagagagcaagctggccgagatagagtggaaacctctcccgaaggagaggaagcagacgagggtctacgccgttgacggaagccagggaaagcagaggctgagcggcacgatcttctacgccgtttcaagctacgccttcggcaacgggccagcttatcggcttgtctacaccaacgcgatgctctacaaccagggcatctccgatcagatcatcaggctccagatggagacccttgagaacaagctgggctacctgtccgcgaagctcggggacgttgactacgtcatgatggacggaaccctgacgggctccctgacgaggccaccagtctatcctgagagcgtgaagggtttaaccacgatagagaacgccctcgggaaaggcaagcttaaagaactcgtcaagaagttcgtgagcctcttggatgagcactataaggagcttgaggacgggctgagggagaagggcaagataaatggaaacgtaatcctcgccgacgagaagcttgaggagttcgaggagttctacaaagccatgaaaggctacaaggttagggactttgccggaacgacgccgagggggataaagatatcccgggcaacgatagacgagtacctgaagggaaggaagagcgcagaggagatattccaggaactcttaaacgagtacggcgaggagagggagctttccctcgacgacgcgagaaatgcagtccacgtcgttctgggctaccttgagtacctctactcccttgaaaagctcctgaggctaaacctcgtctacgtcgccaagagcttctacaacaggaagctgacccagaagctcggaatagacatcgttgacgtgccctacctcgatgcatatctaaggaagcgcttcggcgaggagattccggggtacttcatcataacccaagggggcaaggcgataagccacaagatgccaaaggttctaagggagacgttcccgctcgtcgagcactacattgagcacggcgtgcccatggcctacgtgaggactatgaagggcggggtaatctacctgctccagagcaaccgcgaggtagacgatgatcttttgagcgagattctatggcacgagagcaacggctacttcaggccgctccagagggcacacgagggcgtcaagatcgaaaagaaggcctttgaggccgaacttaaagccctgctcaacataataaaggccgagagccccgagctgagggtgttcctgaagtacggaagaagtccgctggagtagcgaaaggtttaaacacctggacaaaaagtccagcacatgcggaagattatcccagcgctcatcgtgctctcgctcctttcaatattcctcggggtctacataggtccggtcggcctgagtccttccgatgtaacgagcggcatagcctacggggtcaaggtgaccctctcaagattcttcccgttcaacctcggcgagccgccgaagtacttctcaataatctggaaaatccgccttcccgaggttcttcttgcctatctggtgggcctatctctcgcgtcggcaggagttgcatcgcaggcactcttcagaaacccgctcgcagacccttacataatcggaataagctccggtgcggcgttcggcgctgcgctctccctgctggtagggataacctacatgccctacctgtcgctggccttctctttcctctcggttttcatcgtgtactccctggccaggacaaacgggaaggtgcccgttgatacccttctccttgcaggaatagcctatggcttcctcgccaacgccgccacctggtacatctacgtcacccacccgcacaacgcctacatcacttggacgtggcttctgggaagcttcaacggggcggagtggaaggaagttctgataatgctcgttgtttcctcgctcgggacgggctttctcatctggaagtggcgcgagctgaacctgattttgctcggcgaggagagcatagccctcggtttagatctccacctgtacagaaaagtcttccttggcgttatcgccacgctgacggccttcgcggtctacacctcgggtgttataggctttgttggtctcgtcagcccccacataatgcgcatcattctgggaccgaaccacagggagcttactccatcaactgccctgttcggcggaatcctactcgtggtcgcagacctcctggcgagaaccgttgcaaagccgcaggtaattcccgtcggcataatcacagcatttatgggcgcgcccttcttcctgtatttactcatgaagcacaagaggggtgagctgatgagatgaggctcttcgcgagggtttcatactcctacgggcagagggaagtcctgaaagatgttgagatagaggccagaaggggcgagctgttggccataataggaccaaacggggccggtaaatcaacccttctcaagtccctcgtgggcattttgaagccgattggaaaggtcgagctggacgggagggacattctcactctcaagccggccgagagggccaagctaataacgtacgtcccccagagctccttcccggagtttgccttcacagttgaggagttcgtggagatggggagctacatgaccggtggaagcgtcgaagacgccctcaggaaagtgggtctctgggagagaaggagggacaggataacggccctcagcggcggggagttccagcttgctctgatagcgagggcactggcacaggggagcagggcggtgctcctcgacgagcccacgagccacctcgatgtcaaccacgcgctaacggttatggagcttctccgcgagttgaagacggaaaggataatcatagctgttctccacgacgtaaacctggccctcgagtatgcagacagactcgtcgtgatgaaagatggagagaagttctgggaggggaagccaggggagataacgcccgatgtccttgaaagggtttacggaattagggcaaaaatagtggaagttgactcccacagggtctttatcccagagctggcaaaggtttaaaacgaacgtgcgtttcttaggttaggggtgagaaaggtggagaagaaaacgggtacgacaaccgtgggaatcaggacgaaggaaggcgtcgtccttgccgctgacactcaggcttcactcgaccacatggttgagaccctcaacataaggaagatactcccgataaccgacaggatagcgataacaacggctggaagcgtgggcgacgtccaggccctcgcgaggatgctggaggccgaggcgaggtactaccagttcacgtggggcaggcccatgaccgccaaggcgatggcccacctgctcagcaacatcctcaacgagaacaagtggttcccgtacatggttcagataatcatcggcggctacgtggaggaacccacactggccaacctcgacccgctcggagggctcatcttcgacgactacactgcaaccggctcgggcagtcccttcgcaatagccgttcttgaggacgggttcaggaaggacatgagccttgaggaagccaaggagctggcagtcagggcagtgagaaccgctggaaagagggacgtttacaccggggacaggaaggtccaggtcgtcgtcataagcaaggacggcatgaaggaagagttcgtcgagttcaaggagtgaaccaatcttttttaacctctttcttcggaatccctaccatgtggaaaccggagagcaaaaccctcgcactcggtttaatcctgctcctgttctcgtccctgtactctgccgttaaagtcagcgaaggggccggctccatactgaggaaaaccgacaagatactgacccaggtcgaggagataagggggctggagtttaaagagaaaccaacgatcgtcgtcataagcaaaaccactgctctcgaaatgtggaagcccggaaagcccgatctcgagaggctccgcagggaggagctggtctacaagatgacccttcttctcccacccgactacgaatacatcaaagaggagagcgagaggagcgcgggctggatagcggcgaccgttggagatacaatctacatcatcgaggagaacttcatggcagatcccgacacggcgagaaggacgatagcccacgagagcgtccacgtactccagaagcagtggttcaacgccaaatacggcgcagacaccttcgacggaaccctcgcgatccaggctctaatagagggagatgctgatctggttgcagatatctactgcgagaggaacggaattccgatccacaagatacgctcgctgagcggggatccactaacggacatccacatattcccctacgtcttcggagactccttcgtgagatacctctacgaaaagggcaactggacgctcgtgaatcgggcctacgaacgctatccagaaacaacccttcaggtaatggttccagagtactaccttgaaaacaggaagccaaagaacgtgacggtagaagtcccagagaactggagcatccttagaaacgatagaatgggcgcgttctacctttacgtcctcatgagggacgttgcgaagctcgacaacgatacggcatggaacgtctcaacgagctggatgggggacagactgatcctggccaacaacggtaccgattacgttatcctctggaaggttgagtttgaggatgaaaaagccgccgaactcttcgcggaaaccctggagaagctcgccgatgggaacacatacgcgaccttcgagataattcgggatgataatgtcgttaccttaaaagccgttaggagggttagagttgaagcttaaatgtccaatatgtggaaaaacttacgatgagcccgtccagaggtgcgagtgcggtgaaccagttgagtttgaagccttcaatgcagagccttaccttggaaagaccgtctgggagagattctgggacttctggccaatagaaccagcaatggatctctcgctcggcgagggggatactcccctcgtgaagtccaaacttggaaaagagctcggggtaaagctctacctgaagaatgagaccgcaaacccgacctggagcttcaaggacaggggaacgtttctggcggtgagctacgcggtcaaagcgggatacaaggccattggaacggtttccactggcaacatggcggccagtgtagctgcttacgccgcgagggctggcctaaaggccaaaattctcgtctcagagagcgcgagcgaggagaagctcaaaactgtgagcgtttacggtgcggacgtgataagggttaggggagattacggaaggctctacttcgagagcctggagctgggtgagaagcttgggatatacttcatcaattccgacaacccattccgcgtcgagggctacaaggggattgccttcgagatggcggaggagcttactcctgactacgtcttaatccccacgagctcaggcggtctgttcaggggaattgccaagggcttcatcgagctgaaggagagcgggctcatcgaaaaactcccaacgctgatagcagtccaggctgaaggctgttcgccgatatgcagggcctttaacgaagggaacgagagaataaagcgcttcgaaaacccaaacacgatagcgaaggccatagcaaatccgtacccgccgagcggaaacgccgtccttaagttgctccgcgacttaggctggaagtgcaccaccgtgagcgacgaagaaatcctcgaagcgcagagagagcttgcaaaggaaggcctcttcgtccagccagcgagcgcaacggggattgctgttctcaaaaagctcgtcgagagtgaaaaaatcgatgaaggggcaaaagttgtgtctattctcacggggtcaggattaaaagtgctcgcacatatgccctccggcaaaatagtaaattgtccgctggaaggactggagaactgtgtgtcattttagtaaagtattctgccaaagatgtaacgatgagttgctgaatacatcagatcgcgaaatacttatataagataaaaaacaatgactcacttgagccacaaaggtggctcccttgagaaggagtggaggtggctctcttgagaagtaaaaagaaacttgcagtagctgcagtaatcgtcgcagtgatggtaactatgataataccctcagcctacggagtccagccggacaacgccggaacgctgtactctacatacctcgactggctccagggaaagccagtggggctggcgaaaattagcttgggaatggaccaccagattcaaagggccacccttgtggttgtggattacaccctcggggaacccaagatcctctatcaaggaccgatgctgacacctacagtcaagatacaaaggattcctaagggcacaaaaatagagacagtaatcaaagatggaaaggttgttagggagcctaggactgtctacaggccagttaagctactgattatcgtctcgggtgagaactactggggaaccaagttcattgagttccatcccgagaaaccattgacctccgtgaacataaaagtccccctccacagggacaacataggaccctcaatccagaacctcaaccctaaaaatgaattccaagctactagcgtgaaagtgggagatatgttcatggaggacgtaaaaatattcaggcttcacagcgtcccaggggtagaagagcacctgataataaacgaagacgataccctagccattgattcattttcccagaccgtggcccaatgggaacagccaagcagtgacagatgggagcgttctggaagggttagcaccccctttggatatgcctccgaagtcccgacttctgatgggaaaatgaaaacagtgtacgccactgtaaggtaccgcattgataggtacgatgtatgtggatacctaatctgcaggacagtttatgaacttatcccccaagaaatcgtgtacttctcaaaaatagacactgataacgatcctggaacaataccctcaaacttgatcaggtacagtcacctcagagatgcaggtgacgagtttacggcgtatttccaagaatcatcagacgatggtggggtatacttttcaacctcagtctcggcatgtgctggagagggagtccagatatgcttctctggaacagtagatacatacagacagtcctcaaacaacagacctgctgttaaggtgataataaacagctggcacggcaacgttctctactttgcaaaatattccgagaacggcaactactatgaggttcccctacagtggggatgaaccttttagactcttttttattatttaaaatggtggtaccatgctctttggaataggcctcatgccccacgggaaccccgctctgagtcccgaagataaggaaacggaaaagctcgccggagtcctgaaggacatcgggaaggccttctcagacgctgactcctacgtcctcataagccctcacaacgtcaggataagtgaccatctcggcgttatcatggcccagcatctcatctcctggctcggctttgagggcgttgaacttcccggggagtgggagacagatagggggcttgccgaggaggtttacaacgcctggaaaggggccgaaatcccgaccgttgacctgcacttcgccagcaggagcggaaggtattcaagatggcctctaacctggggagaacttataccgctccagttccttgaaaaaaagccgctcgttctgctaacccccgcgagaaggcttagcagggagacactaatcaaggctggggaagtcctcggcgaagtccttgaggggagtgagaagaaaatcgcgctcatagtgagcgcagaccacgggcacgcgcacgacgagaacggtccctacggctacaggaaggagagcgaggagtacgacaggcttattatggagctgataaacgagagccgccttgaggagcttccagaaattccggacgaactgatagagaaggccttacccgacagctactggcagatgctcataatgcttggggcgatgcacagagttccagtcaagctcgtcgagagcgcctacgcctgcccgacgtacttcggcatggcaggggcgctgtgggtgagggagtagcgtgtagttgaaatacacactttatccctattttgtgtatttccaatacacaagctttaaatactatcgtgcattatttttacacatggttgggctgaaggagataacccttgagtacataggtgcccttgattacgttgaggagatcgtgcgggaagttgaaatgccgcatggaagcgacataaaggccataatcggacccaggagggttggaaaaactttcctcatgctgaaaaaggcaaagaatatgctggaaaacggtgagaacgttctctaccttccgctcgacgagcccgagctggcaagaatggaggcgagagagctcgccgaagaagtcaggaaggagtatccaagcggaaaggtcaccctgtttctcgacgaagttcaggagtggggggactgggacagaaagctccgctggctccacgacgttaaagactttgacgtatacgtctcaggctcctcgtcagcactcctctcctctgagatacccacgaggcttaggggaaggcacctctcacggttcgtacttcccctgtcttttagagagattaccggaaccaccaaagctgatacgttcagggagagaggaaggctgaaagcccttttgcaggactacctgaaatgggggggctttcctgaggtttggaagaccaggtctagggaaaaggtcatctcaatcctggaaacggttctttacagggacataatcgaaaggttttccttccgggacgtcggggagttcaaggaggtcttttaccacgccctgtctctttacggtagctatttcacataccgctcactccagaggagcctgaaggccctaggactggagctaaatgtgaagaccctgataaactatctcagcgccatggagagcgccttcctgatattccagctccccctcttcagtccctcccacagaaagacgctcgtgaacccgaggaaactttatcttgtggacacttcattcacgaatctgttctttaagggggaagacgccggcagaaaaatcgaaaacatggttttcctcgaactcctgagagaaaagagctacttcaacccgatgattgacctttcgtactattccgacggagagagcgaagttgactttgtcgtgagggaaggaaacgtcgtaaaaaaactgatacaggtaacctacgagctcaacgcctcaaactacgagagggaagttttgagcctcgttaaagcagggaaaaagctcaaatgcgatgatttaatccttgtaacgatggataccgaggacagaatagaggaaaggggtaaagaagtcaaagtagttccgctgtataagtttttacttgaaaagagacagaaaaaagcataaagcaaaactccctcagcgctttatgtctacaatcctgccctcgcttatgaccaccgtgacgttgtccccctgcttaatggacagcagcttgaggataagctcttcgctcaggtcagccgcgcttatgtagagcgtcctgttgccaactacaagtatccagtgggtgttgccgtccttgatgtatgagtagagggcctttacttcgccggttatttcctccgcctgaacgacctctccccggagaaggaactccttaacttccctctcgtcttcgaatatctttacctccttggtctccgcgttgacgaaagctatcttggcaacgcccgagccgctccgcggaatgatcgccacgcgccaccagagcgtcccgtcgatgaaaacgggtatcggctcaacggccatgaactgactccagtcaaaggtcggaagggccttcttcacgtagtctattgccttcactgggcccgtcaggggagtttcaaacttgacctggctcatctcgcccgtacgggcattcataaggtagattgcagccaaaccgtgggcctttccgtagggttcaactgccgtcatccagtacttccccccatcggtggccacaaccaaaaaaggctgtctgttcccctggttgctgacatcgatgagctctatctggttctcgtggtggggccagaggttctttatgttggcgaagacgctatccttccagtagttctgagcctccacaacgtccctaacaaggttttcaggaaagatagggaagtccttgagacgctcgtccttgatggcttcttcaggacttagatcctcaacgttgccgtcctcatcaacgatgaagacgccgccccactttggaaccgtgtagaaaactttgaagtcgtaggagatgtaagggacgactatgtagagtttcccgttgtagtgcagggccctcggaaggtctaggtcaacgaggtagtgcttcttgtagagaacccagttcaggttgtcaaagaactgcatccccgggccgacctgaagttcttcctcgatgcgctgcatcttggcctgagtcgtgcccatatccacgaacaggacgcccttatccttgagcctgatagagttccaggcgccgtcgggaactatgtagaagccccacacaggggtgccgttcagcatcgtcagatgcccgtcgctgagggtgtagcgcgcgtactcgatcgtgtctatggcgtagcgataagcggtaaatttgggaaggattctaatgtagctcgtggagagattgagctctcccgttacgagcgacggatggtactccttgtacaagtccgtattggcgaagggagacgagagaattagagccactatcgaaaggatgaacagcccgccgaggatcagcggaagcgtgtagtttttccccaggatgtagcgctttggtttgacagccattaacgcccccagggcgaggaacatgtagagtagcgcaggattcctgtagaagcccatcacgagcccgtggaaccatggtctgaagaaccagcccaggagaagaactgccaaagcaatcgccaacgcggaataatcgcgcactcccttcattgcactcacctcattttttactatacccaatagtccacggggcttattaatctacctcaagtgcggccccaccaagccgcctccagttcttgttcaccgtttcgcgaaaagtcttcacatcatcaatgcccacatcgaaaaaccctcacagaacgcttacaccggtaaacaaaaactgttataaatgccaaaaacaatacactagcgccaaaacggaaattttgaggtgatgcctatggcagagaagaaaaagaagagggttctgattttgggcgccgccggaagggacttccacaacttcaacgtgttcttcagggacaaccccgagtacgaggtagtcgctttcaccgccacccagattcccgacatcgagggcaggatttacccgcccgagctcgccggtgagctctacccgaacggaattcccatctggagcgaggacgacatggagaagatcatcaaggagcacgacattgacgtcgtcgtgttcgcttactccgacgtctcccacgagcacgtaatgcacctcgccagcagggctcactcagccggagccgacttctggctcctcgggccgaagagcaccatgctcaagtcaagcaagcccgtcgtagcggttaccgccgtaagaaccggctgtggaaagagccagacctcaaggaaggtcgcccagctcctccaagagatgggctacaaggttgtggcaatcagacacccgatgccctacggcgacctcaggaagcaggtcgttcagcgctttgcgacctttgaggaccttgacaagtacgagtgcaccatcgaggagagggaggagtacgagccgtacatcgagcgcggcatggtcgtctacgcgggcgttgactacgagaagatactgagagaggccgagaaggaagccgacataatcctctgggacggcggaaacaacgacttcccgttctacgagccggacctctggatagtcgttaccgacccgcacaggcccggccacgagctcaagtaccacccaggtgagaccaacttcagggcggccgacgtcataatcatcaacaagatagacaccgccaaccgcgacgacatccagaaggttcgcgagagcattgagaaggtcaacccgaacgcgaccgtcatcgaggctgcttcaccgatcttcgttgacaagcccgagctcatcaagggcaagcgcgttctggttgtagaagacggtccgaccctcacccacggcggcatgaagtacggagcgggctacgttgccgccaagaagttcggagccgctgagatcatcgacccgaggccctacgccgtcggctctatcatcgagacctacaagaagtacccgcacctcgacgttatactccccgctatgggctacggcaagaagcagatcaaggagcttgaagagaccatcaaccgcgccgatgccgacgtcgtcatcatgggcactccagttgacctccgcaggttcatgaacctcaacaagccggctgttagggttaagtacgagctcgaggagatcggccagcccaagctcaaggaggtccttgaggagtgggccaagaactgcgagaagctcaagaagtgaactttttaagccccttttctttcttatattcggtggtagcttaatgtatgctgccgaactgaagaaggtatttgaagtccagagggaaatatcggacatccatccaattttaaagaaggtctatccgatcgtggtcgtaaagggcgacgaactgtggatttttgagccggacgaatccaagcagacctacaatctcgtaaagacagccaaatccaaaactcccctgccagaaggcatcagagccgcttttcccgttgaagagtacgactacaaaatggcctgcgttgtctctgatgacgtctttgagtccctgagaggctacgtttcaatattccacgagttcgtgcactgctatcagttcgagtgctgcgagctcgagcttaaaaagtcgctcgaagtgttcctggaggagcaggccaaaggcaactactcctgggagctgaactatccgttcccctatgagaagggggagttccaaagggcctacgccgaatttctctcggctctcgaaaggggagacgctgagggcgtaaagaagagccgcagagagctcagagagcacctaacaaagaaggagtacgaatacatggtctggcaggagtggaaggaaggactggcgaggttcatagagaacaggatactcaggaggctcggactgccagagaaccactacggcctcgaaaagccctgggatcgaacattgttctacgagggtggggcgaggttcatagacttcctcacgggaggctcccctaccgacctgaaggggctcttcaagagcatgatggagttttagttcattttccaggatttttcaaaacctctcctcctgatgggcttttatatgtcaccttcactttcgggcgctttgctgtccacccaaaaccttttatccaaaaacgtccaactccttctgcccggggagtgccgccgaaggcggagccgatgaacttgggcgggttagtaccccctttattcttgtggggcgtgtgagaacttgggcttctcagggtttataaatgagtgagaactgaaagttctcaagattttataaagttaagctactccccaataacctgcaccacaacgcgcctgtgcctcggcctcacgtcgagctcgacgaagaatatctgctgccacgtcccccttaccagccttccatccaccactgggaagcactcgctcgcaccgagcaggctcgccctcaggtggctgtgggcgttgtcgtctatcctgtcgtgaaggtagcccgcacccttcgggatcagctccttcagagccctcttgaagtcctccaggaggccgctctcgtgctcgatcgtgattatagcccccgtggctccgggcacgaagacgagaacctggccgttctgaaccccgctctcttccacgatcctctcgacttcatgggttatgtccaccaggtctatctcaccttccgttgaaaagcgcagttcccttgtaaagaccttcatgaaacatcacctctgagaacctcaattagtttctcgacctttctcagcacctcaaaaggagtccccccaaagatgtaaacgagcggctcaacgccttctcctccttcatctatgatggcgtcgtaaactcccttttcgaagggagcggcaatggccctcatggcatctccctcattcataccgcctgtctttacctttgctgtcttgaatctcaccattttcagggccctttccacattttttccgtagcggatgtttataacgctcctgatcccaggtctgcgcttcataacctcaaggagaagtcctgcagtgaacttgctcgccccaaactcgggtggaagagcgaatggtctgcccttgactagtgttattctccctggtactgaggcgacgtccgagggattcttagctccaggaagggcgtaggcaaagttgctcctgacttcggggatgagatcgccgaacccttcaagggcaaggagctccctcaatgcaatccccagctcggagaggacgtccttttctggcgttgaggagaagaactgggagcacacttcggtgctgactccagcgtagcgggagtagtgctcgcagaacgttttatccctgaagaggccgatgatgcgtctcgttgtgaacaggataagctcctccttcaccgcaccctcctctatcagtctggcaatctcctcggcaagcacattgagaagttcttcaacttcgcgcggaggtgctttgactttgccagaaaggtacttgctcaccatcgcctgagtcgttccaagccaggccgctatctgagcctgagtaaagcccttagagtacaggatttttgaaactctcgcacgaaggtaaggcataagctcctccgctatatagacgcttggaaccctcatagctctcaccctacaaccaggttattcaactgcatcaagtttaaatcgttattgtcgtcaggtgtatgtcaaaaaagctttaaaaacccaccgatttttacatcggaagggcacttatggactggaaaggtcgcgacgtgataagcataagggacttctcgaaggaggacatcgagtttgttttgaaggttgccgaacggcttgaggaggagctgaacgagaagggctctctggattatgcccgcgggaagattctcgcgacgctcttcttcgagccatcaacgaggacgaggctgagctttgaaagcgcgatgcaccgccttgggggttccgtaattggattctcctccgcctcgagcacgagcgtcaagaagggggagagcctggccgacacgataaagaccgtcgagcagtacagcgacgttatagttattcgccacccgatggagggggcagcgaggttggcggcagaggtcgccgggattccagtcatcaacgcgggcgacgggagcaaccagcacccgacgcagacgcttctcgacctgtacaccatcaagaaagcattcgggaagatagacgggctcacgataggcctgctcggagacctgaagtacgggagaaccgtccacagcctcgcggaagctctggccttctacgacgtcgagctctacctgatttcgccggaactcctgaggatgccgaagcacatcgttgatgagctccgcgagaggggcgttaaggtctatgagacaactgaccttgagggcgcgattcccaaactcgacgtcctctacgtcacgaggatacagagggagcgcttcccggacgaggaggagtacctgaaggtgaagggcagctaccaggtgaaccttgaagttctgaaaaacgccaaggaaacgctcaaggttatgcacccgcttccaagggtcgacgagattcaccccgaagtggacaagacgaagcacgctctctacttcaggcaggtgttctcaggcgtgcccgttagaatggccctgcttggactgacgctcggagttctgggggtgtgaaaaatgccagagaaccttaagatagaggtaatccccgagggaaccgttatagaccacattccagcgggcaagtggctcaaggtcatcgagattctcgggctgacaaagccgaacggaggaacgctccttatagcatcgaacgttcccagcaagaagctcggaagaaaggacatcgtcaaggttgaggggaggtacctgagcgaggaagaggtgaacaaaatagccctcatagccccgatggcgactgtgaacatcgtgaaggactacaagataatcgagaagttcaacgtcgagatacccgacgagataacgggaatcctcaagtgcccgaacccgaactgcgtcagcaaccatgagtacgttacgccgagattccacgtagagagcagagaacccctcaagctccgctgccactactgcgagaggacgataaatgaagacgagatagcccaaaacctatagctctttttctattattctttgcggctcagaagtttccacaaccacatggggaacacgtttgaggactggtactgtaaccagcaggctgataaagacgtctatgacactctggatggcgttcggaagggctattgcaaaccagaagggaacacccgtccagtcttccaccgccgagataacctgctccctggggagacccagccagatggggagtgcaacgtagtagttgagggctatcatcagtgggattctaaggagaattccaacgatgtaagcagccagcccaaacacgaagagccgtttcttgtcagaataatcgaaacccagtgtccttctggcaacttcgaggcctacgagaacaccgaacgtcgccagggtcttcatcattgcacccagccagctcgcggaggatacgacgctcagaccgaggaagagcatggcgagggctatcaatcctccccagaagccgaggatgaagtaggcaacgatgatcggaactgcaacgaggtctattttcatgccccacactgtcggcatctcgacgggcattacgtccagagcgagggcaagggccagcattagaccgataatagcgatttcttttgaactgattttcatcccccaccaccgttacaagtttgtacccaaatttttaaatttttgttccatacatagaacaatccgcttataagccaggagtcccaccaaagtgcgatggaagttaaggacattgaaaagcttgtcagagaaataaggcgcgaacatggccttccggacagcccgttcaggatagatgaggtaaggtacgacgaaaaaaacgacaagctcttcataattgcccacgacaggacggacaagagcgtcatcatcggcaacagcctggtgatcgggaagctgagagagaggctgggagtaggacaggtaacggtctattcgaacctcgaccttgaaataaagcgtagaaagctggaactggctgaaaaagccgttaagggaacgaagcttgagttcctcctacccataatagaggccgaaaagaggtttccaccgagagagtggcccgatgtaaggggggaactaaacacactcatattcctcagcttcaacgcgagggcccttgttggtttcgccgaaaagctgggattaccttacaaggccgttgggctgaagtacgcgtttcccaagctcaactatgaacccattgagggagaacccagagaattgttctttccagacgaagagaagctcgttaaaattgccaaggggaagggagcggagctggttcttgcagacttcccgttcggactcacgtggaggggtgatatagcactcctgaacccgttccgctttctccacattggcttcttcgagctgaagtacctcttcggcttcgactggccgaccatcgtggacaaaaacgcccttattgactttgttgtcgggctaacgtatgagggcctcatggagtcaacggatggtgcaaacctgatatggcgcgcatggaggcggggaagatgataataggcgtcgttggaaagatagccgccggaaaaacgactgttgcaaagttcttcgaggagaagggcttctgcagggtttcctgtagtgacccgctgatagacctgctcactcacaacgtctccgactactcctggatccccgaactgcccaagaaggccgaaccaacccgcgacaggctcatcgagtttggaaagtacctgaaggacaagtacggcggagacatcctcatccgcctggcggttgacaagaagagacactgcaaaaacatcgtcatcgacggcgttcgctcgcgggaagaagttgaaacgatcaaacgcctcggcggaaaagttatctacgtggaggcaaggccagagataaggtacgaaagattaagaaaaagaagagcggagaaggacagggtcattcagagctttgaggactttttgaaaatggacgaagaagaggaaaagctgtaccacacgacgaaactgaaggatatcgctgactacgttatagtcaacgaagggactctggaggagctgagggagaaggttgaggagataatttcggaggtaatgggatgaaactcctcatcatagctccctgcctgctcagccccttctacgtctatcgcgggccgaaggagaaggagtacgagacggctagaaggctgagggagcttataggaaggctcggcggcgagtggcaggttttagcttatccctgtcccgagtacgagctggtcggctggccgcgcgctccagccagcagggaagtttacgagaggctcggcatgagggaaagagctaagataatagcggacttcattgggcgcgttctaactgaagaaaaaccggagaaggtagtctttgtcggcgttaaaggctctcccacctgcggcgtcttctacaccagctccagcaatccggataaatatccctacagggcaatgcaggagtttttctacctgagcaaggaggaaaggctaaagcgctcaaaggagctggtaagagagcagaacttcgagctgaagcttctccccggaatactcttcgaaatactgatggcgaggtttccagagtgggtttacattgagttcgataaggacgacgctgagggaagtatcaaaaggctggagaaagctctcttcaccactcggtagatgagcagaggttcgcgcaggggttaagggccgaatttacaagataatactaaatctaacgtctttctgggcttagaaaagcctttatatgctcccggccaaaggggttttgagatgaaccctgtaaagcagctgctctggtggctaatagcgggaagtgaagggggactgaacagggcgaggataattgcggcactgctggagaggccgtccaacgcgagacagctcgccaaaaggctcggtctgaactacaccacggttcgctatcacctcgatatcctccagaaaaacgggcttgtcacttctacggagaaccgctacggaaggatgtacttcctttcccagcttctcctcgataattactcggagtttgaggagatctggggcagagttaagacggaaataggggagggagaaaaatgagaaaggtattgatagtgctcacggttatcctcataggtttgattggggcctttctaggctacaggtacgttgggcctccaggcccgggtgaggtggagaggataatccagagcccctgcgtgattgaccctgctaccgcgaggctctacacggccataaaggcggggttgacttctttgagtgcggcgatcggcatcgtgctcctctggatatacgggaacctctacaggaaggtccgctcagagttcactctcggccttatggtggccacctccgccctgctcgtgtacgccgtgactgccaaccccctcttccacaggctggtggggcacacgagggcgatcggccccgggcccgtcctcgtggttcccgacttcttcatcgccctggccctggcggtgctcctctacctggcactgaagtaggcctccctcccaaggcccctactcccgagagtgcgaagctgaaaaagcccgcgagcgaggagatgtcaacgagcagtatgaaggcgagtagagtcagggcaactgccttcccatcttctccctccatcagcctttctattgcaatccccgcaaggcccgccaccgccggcgccatcggaaggtagaagcgtgtcatgaagatgtagaggcccgttctaagccactcgtactggaagtagaggccaaagtaagcaaggaaccagaggagcaggagcggcgttatcttacttctcctggcgatgtatgctccagcaggaagaagtatgagcgacggaaagccctcgaagaggagcttcgggtgcgtcaggaggtttctccatattagactcagcccttcgccgactttaccggctaaaatgtactggaaggcgaagttcgtgtagcctatggtctttgagtagccaaccgtgaacggagacccgaaaaccgcccagttatatgccatgagagcgagtagcatcgggacggaggctccaacggcaatagcggaatagcgtagcgccctcttctcgcccttccggagaagccagagaacgtagatggcgagtgcaacgtatgccacgacgttggtgtacctgaccagcactgatgccccgagcgagaggctcgagatgattccctttttccagtccccatcctcaaggccgaggtagtagaggccaaggccgatgagcacgagggccatgctgacgaagtcggacatgtaaatcctgtagaacatagccaaaaaggtggcgttggagaggaggattatcgaggaaaagagggccgtcctcgggctgaaggccttcgacatcatccggtaaaacacgatgagcgcgaggaggccgaagaataagttcacaaatctttcaatgccgagcctgtagaaggcggcgaggatgaaaggataccccggagccttttcgagggcgtagcctgtgccaacgctaacgtactgaatggctctaaagttcccgacggcgagccccttctcgattatctccctctggaagtccataagttcagagcgggttattatgagctttccctgggcaaaggccttcatcgccgcgtagtaggtcgcatcatcgggctcgatgagcttaacgggaagggccagcacggcggtgaagacgataagggccatggccagaacgactaccaaatacctgccttccgtcgttcgggtaaagtattcccggagcctttggagggcttctttcatctcgctcaccccacaattttaaaatcggttgtgtagcttggacgatctctccatacgtccacctaaaattgaatgtatgaccccaaaataaaagagttttccgaaatcccaccaaaatctttacaaaattaaagataaacggaggaaaacaaaagcgccaatgaattcgagtgatccacttcccccaccgcagaattcacccggacggaaaagacattacaacaagggggacaaggtgagtcttgagataagaatattgcacaaaagaggacttattgctacatagatgcacagatgcacaaatcttattaacgggcacctcattaaattatgacgggaatcattcatgaaccccacactactcatcgccggccagaccctaagcctcggtgcaaagctcttcactgtgatatacctgtggtactcttaccagaagtcacttagaaagtcagccctgatttttgcccttgcgttcctcgccgcctccctacaggttctcggcgaccttatcggtattgaattacttgccataaccatggaagccctcttcgcctcacttctcttctatgggagtctcagactccttgatgaagagggactctcgttcaccgtcagccgcggctattacgtctccataacccccatcatcctcaccctttacatgctcgccgccgagcgctcaagcgatccaaactggctcgccacggttggagttgcgtacgcggtttctggcctcttcgtcctcctttctggctttctgctcgtaggcttgagaaacatctatggaaacagcatgaagtaccttggggtcctgctgattgtgtatggggcacatgagatggactatcccctccttcgccctgttgagtggttcgcacccatagggttctctctgagcgctttactgaccgttctcatcgcctacttcttcgtaaagttcgcaggccatgaggagttcttaaagacaccctccgagacccaaaagccgctgaaggaagtaaagcccgggcttaccatattgtcccctgaggagtatagaaagatcctgcctgtgctccaagaccgcccgctcctagccttcgtccggaactcaagggatccccccgaaaaatggactgtttacaccataagccaggtggagcgcgaacgtactgtacctcccacaaacctccctaaaatcacagagatcattaacagatacctcagagcagcgggaagcggagggatagtcctcattgacggcatcgagtacatccacatgtacaacggctttgatgcgatggccaaatggctgagcaccatccgagacatcgcataccttaacaacggaagcgtgatcgtggtgacagacagcagagcttggaacgagagggagtggaacctcttaatcaggcttttgagttaaattgggactccaaaaacacgcatcacagcgacaccagcagcgcgcccagaactatcagcaacgccccaacggccgttttgaagtctatcttctctccaaggacgagccaggtaaggagtaccgcgagggcaacgctggtcttgtctatcgctatcaccgcggtagttctccctccttttatcgccatgaagtagaaaagccaggagagagcccccgcaaggcctgatagagtaacgaagagcagggcacgatgatcgaagccggccgtgtttgtttttcctgtggcgagggagacgaagagaagaaacgcgaacattatgaacgccctgatcacagtagccaccgttgaatcaacgttcctgagaccgagtttcccaaagatcgggacgagggcggcgaagaacgccgcgaggagtgcgtagatgatgtagagagggattttcacgttcaggcctccgagatggctttcttaaccagcctctccgccttccccatcagctccttcgccttctcttcctcgtgggcctccaaagttatgcgcattatcggctcggttccgctcgggcggaagaggatccaccagtcaccgttttctatcctaattccatctatgtctatcagcccctcgtagtcgaacgtctttagtgcctcgcgcgctattatctccatggctttcgccttcttctcgttcggacaggggattttggcgcggagcgtcacgtagcgcgggacttccttggccagctcgcttatcggaccgagtctgtcaatcatctccagaacaagggccccagcaaagattccgtcgggggtgaggttccactgcgggattatccacgtgccactcggctcgccgccgaagacgccgccgtgttttgcgagctcgtcggcaacggccacatcaccaacgcgcgtccttatgacttctccgccaaggggtctgaggtagtcgtccaaagcaaagcccgcatcaacggtggtaactattttccccttcccgaacttcctcagcatgtagcccgctatgagcgagagcatgacctcgtactcaacgaagttgccctgatcatcaacgacgccgatcctatctgcgtcgccgtcgtgggctatgccgacgtcggctttcatcactctaacggtcttcgctagggcggagaggctcttcgcgttcggctcaagttccctgacgaagaagccgctcgggtgggagttgagcgagataaccctattgcccagctcccgctggaggtagggggagaccaccgagcccgcaccgtttccagaatcgaggacgaccgtgtaggagttctcaagtttgacgaattttagcgccgcgtttatgtactcctcactggggtcggcccttctaagcgtcccgatctcattccagggagcttttttgaagttccctgagtccattatggactcgagttcacgctccatctcagaggtgtatgccattccgttggcctgccacacctttatgccgttgtactccggcgggttgtgagaagctgtgatggtaacgccagcatcggcaccgtagagctttatcgcaaagcccgtgagcggcgttggcgctaaacctatgtcaatcacatcaacaccagttgagagaagtccgcttatgactgctgattttataacgtcgccgctagtcctggtatccttcccgataacaacctttccgccgccgaggtacgttccaagggctttgccgacctttagagccagctcaggtgtcagcttctcattaaagacttccctgattccgctggttccgaagtacttccccatgataatcacccatgaaagttatgggggaaagttcctaggttcaaatataacctttccgcccaggttaaacaattccaatgggagaaaaggaacaaagaaaacgggatcacgggccaaaggtcgtcagctcgatcccgttcgggtcgaggacatggacaacgacgtctccgttcagcctctcctcaaggcccgagacaagttccgtataagcatctttggccgagttcgcttcgtcagccgtcgtgaaggagctcatagccctgacgtggtatgtggaaccgctcttctcaaggatcacatcccagggcccctgaccagcgaattcgacaagataatcgagagctttccgagcctcttcctcgctcgccactctgtaccatacgttgataccgctcgaggaaacgtagcggtatttgctctccacctggtagagtacgttcttttcgtcatcgagaatctggagaagcaccttctcgccgctgaaaacgtcctgggacatctttgacgccagaaagatgaggtaaaacttcagagaatcctccatttcgctggagctcgtgtaggtgcttgtcaatccaacaacgtagccgttatccttctttacgtaaacgtctatctcattggggttcagttcggcgtttatgaggttaataagcgcctttgcctgatccgtggatacctttcccgaatagtggactgtaaccccgtttacactgagggttttttcactctcgacgttaacgtccgggctctcgacacagccgctcgtgagcacaaacaccacgagcagcagggccgagagcgcgtaaaccttcctcatactcccacctcacttcttcacgagcctgtatattccaacctttgcagtgtagctttcgtcggggttcggtggcgcgtagtcaactctgaccacaaagggctttgccgagccgtaaatcatgctcgtactgtcctcgtaggaagagactacctcgttagtgtctggatcgagtatcttgatgcccttaacgaccccagttcccccggcctctatcttgtacgtgccaggttccaaggtgtgcgacagatagaaaacatccccagtcacagtgtcgctcttcacttccacggggaccttatcgtagaaggtctcgtaatagtactgcatgccgaacgccgccacgatgccgagcactatcagcaagaaaaaccccaggatcagtttcttaaagaatcccatccttctcacccccatcacccctaaaacccgaagagacctcctcccttgaccttaacgccgaggtcggagagctttttctttatctcccgctggttcatgctccctgagaacttgctcttctccttccaccttatctccatctcctcctttttgccctcgtcaacgttgcctcccttgagcttaacctcctttattccgttcagtggaattgagaagttctctggggattctttgagaacatcctcaggggacatgtcgtagtagcgctcgtgcatcgtccagccagatgcaagcctcttaaagaagccgtctcctctctccttcgcttcttcccttgccttctggatcatctccttcttcacgtgggcgacaattatcttctcgtctgtgacgaccaggttcacaagggcgctcttgaagaagcccttgtggtactccaggtttggtattacgtaaaggactttctccatctcaaacaccttccaattttctttccagtctcatcaaacaagcctccgaattagcctaaaggtcagctttgcaaacaaaacaaggagagctaacgctaccaaaagcaggaaaagacccagaaacgggccaaggacgtggaatccagttgggggttccgtttcagctccccccgaggtttgagtaccgtatcgttatcctgtgggagcagtcgccggtcttctcgtgggagacgagctcgaaggctgtaagtgttccatcggagttgaggttcacgtagacgtggcccatcttgatctcttcggcaatctcacccgttggatagcctgaggtaggtatctcgcttgggtctaaggtatcgaggttcccctcaccgaggtctatccagtgtcctagcaaagccggatactcaacgcaccacggctctgccacgagatcaacgtcctcccacacgttatcgcttatctcgttgtagcccttcagctcgcccgtggagaacttcacacctgccgttccttccgtatcgagggtaacggtcttgatctccctcatccctgaactggaagcggctgaggtcgttgaggtcaggaaggactcgtagcaagccctggccttctgatacttagcgtaggcctcctgaatttcctcatcgctcgcccccgaagattgaagagaagtgacgttgttgtaggcctggacgaagagccgataggcgtcgtccttgttgtccgggcagaggaaagcccccgatgtcccgttcgcactctccggagggtagagagtaacgttcctctcgaactcgtcaaagaccccgtcgaagtcgtagtcgtgtagatcaggggttccgtcgtaatcaacgtcgcgctcgtctattattccatcggagtttgtgtcccaggcgtcaaccttcccgtccccgttggagtcatagacatcgggaatcccatcgccggtgatgtcccacgcgtagctatcaaccccgttgaaagtcgttctccacgtgtcggtcttcccattgtagtcctcgtcgaggtaggcagtgtcgtagctcccgtcgccggtcgtgtcgaggtagatggcatctatcttcccgtccttgttccgatcaacgaagagtaccgagccgttggttgttggaacctcggcgtagtcgtccccgatgtaaacgtctttccttccatcgttgtccgaatcaacccaccccttctcgccggggaaggactcgctatggtttccagaagatgtttcagagaaaccactcccgcccgaagaatgggtagttgtcccacccgaatcgaagccgttggggaagctgtccttcatcttcgtgaggtcttcgattatgtgaggattcgtgtaatagatgtaagccgcaccaagtaggatgagtatcaggagcaggccggtgaacttactcattttccttcacctccacgaaggttgggggactaagccacccgccggaaatccgcttgaacttcttgcccgtctcgtagtcctcgtagatgccgggctttgccgtctcgtggagtacgtagccgttccacgtgaaccagccctggttcctctcctctatcttcttgcggagattgaccactgcacctatggttgcatctgccatgttcccgaagtagcccgtcggatcgaggagctttccgattttggtggcaccatcgagcactattatggaaaccttcgtgctctcgggcaggttcatcttcttgagctcttcagcctgcttcatcaatgccctcgcgtcctgtgcaacgataaaaatgtttgcgggcgtcctgagcatcttcacggtcgaggtccccttcagcttgacggtgtctccaacggtctcgaagttgctcgccacgaagttggcccagtcgagggcccctccagaaccgtactggccgccgacgagccacttgggcggctcaaggattccggtgaggatagcgttcatcgtggcttctctctcggcctcgctcttggagttctcgtatatgaagctcctcatctttatcctcctcattatcggatcgtaccggtatttctcggctatctgcctgagctggtggcgcttttcagggtcatccgcaaatatggagatgtagcccttgatctcctggttcctgtagaccttctcctccatgtaggcgttcatctccttggccattctgtcaggatcgtccttgtaccgatcatggagctcgcgaaggtgttcaatgtagaggtcgtaaacgctcttcatgcccgggtcggtctctatcatcttgttgatgtagtcaatatgcctctccatcagcgattcagcccattcgagcttcttctgcatgatacaagcgtcgcaggtcgctatgtccgggtcgtcgcaatcaacgaggccgtccatgtcgttgtctatctcgtctccgggcacttcaacactcgcaagggttacgtggacgcttctctttgccaagagcttctcctcgcccttcaccttcccgtagaggcctatggtgagcgccccttccttcacggtcgggtcactaatgtagaggacgtcaagtatctcgccgccctcaacgggcagcctcttggagctcccatcggggagggtgacgagagcgtagagatccttggcaccgctccccctgacctccgcgtagagaggcacggagaagaggccgtcaattatctgcttgaggctggcgccgtcctttggcgtgagtacgtcgagggagtaatccgtgaagtttccagcgaacacaaaatcccaggagatttccttggaacgactcccgctgccgtcgctgaccacgaaaaccacccttacctttccctccttcaactgcccgggctttatcgccacatcgaggacaacgggtatggttgtgctcgacctgtttatccaagcgtaggccacagtgctgttctttggggttgccatgtaggtgtaaaactcctgggcagagtggagctttatcgcctctcccccgtactgtccgctcgggtctatgtagtaggcttgaattcccgagacgtcgctgtttctgtcgaaaacggccgtcgtgaacataagtctcgcgccgttttctacgtcggtctcgttgaacgtcagggttccgaggtaaccgggggaaatcttaacgcatccggagcccggaacgcagagctggaagtcgctaaggagcttcgcgggataggactgggacttgagggacgccaaaacggcatttctcacgctttttcccagagagctcgcctgggagtaggcgtaggccttcattgagagcattgatgataggtaggagttgtattcatcctccatgaactccgtgtggcactccgtctggttgttctggttgaggttgcaggccgtggaaaggaaagaatcgggatcacgctggaagttcaagtattttcccaaaagctgaatcgagatcctgaggtctccgaaggggaagtcgagggcgtagaaagaggtcaggcccgtgtttacgctcacggtgacattatcttcaaccggttttccatctagagtcgtgggataaaatgaagcctcataaacgttgtagcccaggaggaaactcacgtccccaccgttttcagagccaccagagttttgaagaactttactcagagctggggcgatgctgactcctggttctggaacgtctccgatttccacggcggtaaggtcttcactagttctaattggatactcggttatcgttactaggacagtgtagttcacgccatccttaacaatcctgcccctcagaactacgctgttagcaccgttctcctgaatgctggaagtttgcacgatgtttattccaagtccctgaagcgcgcccgttggcggactcaccgccccggtggtgaagggggccaggaagagaatcacaatcattacacccacaaaaacgcgcacgttcacacggcattcctccgttcaatactggaaaaaacgaaaatgtcccaaatgcccaataaactggactgcacggtcccaataattggaccaaagatgagggattcaatgagcaatgaagacaactttctcacttccctgagaaccatctcgcagaagagaaaagcgggacaggttccctttgtacatattacacagccatgggtaataaacctttcgcaaaaagaaattcgacaaagagcaacttcaaatggaactttgacgaagttctttcgcaagctcaaccagcttcctcgccctctccagagagacctcgttctccacccttccatcgcgctttatccacgtacccacgatgaagccgtcggcgtacttccagagctcgggaaggttgtcgtagctcgtcccggagccgactatgacagggactggggaaatctccttcgcgagcgcgagtttatcaacgtccacgggccttccggttgcttttccactgacgacgacggcatcggccaaacccctctccactgtgtcgaggaaggcgtcctcaaagtcaccgaagtggacggcgtgcttgacgtgcacatcggcaaagacctttatctctgagggaagcctcttcctcagcatcgccagctcgtgggcaatgccctctattattccctggtcggtgtatgcaaccccactcagcacgttcacccttatgaagtcggccttcacggcgtaggcaatcgagtaggcggctatcccatcgttgcggaggacattaactccaagagggagggagacctcatctcgtatcgcttttgcgacaaccgcgagggaagcgaccgtggttttgtcggcgtacttcgggaagggaacgtcgccaaagttctccaccattaccgcgtcgaaaccagcttcttcaagcgtcacggcgtctcttagtgcggcctcaatgactgaatcgaagtccccgttgtagaggtaggaaccagggaggggcttgaggtgaaccatcccgatgaggggctttctctcgaagtccatgttatcaccacggtggaatttcgtggagggtatattaaacctgttgagtgaattgaaggcagtttaaagtcccgagccctccaccataaacagctgcttccgttcccctggaggtactaaaggagaaagccgaaaaatttttatgtgttcttggtggtttagtaattgtctttaaattcctggtggtgggaatgaagaggagagcggcccttgttctggtggtgctgatactccttagcggagtgccgggcacgacactcgcaggaactcaagaggagaaagcaggcacgataaaccccctcttcaagaaccccctaaaagaactctccaccgcagaagacggtgagagagaagccctaatagcactcatggaagccctcctaaacgaaaccctcaatggggacataatcgtgtcagacaccatgagaatcagaaacatccactggaacggcaccagcctcatcttccaaatatggtggtacgacaacaaccagccaatagcaatgcagacctacaagtgggaaaacccggagagagccctcggagcgctgagaaaagcaaaaaccggggaaaccaccgaagagtcccttgcaaaagccttcaccgtggagccgctgagcacttcccgcggccttcagataatcgacgtggactacctcacaaacgacaataacggagagtacgtagtcctctacaacggcggctcatcaacgttcaccgcctctggatggtacttaatggacagctacgcctacaacaacgagcgctgctgggtaaacgaaaccccctcaatccccaagaaccactgctacgactcttttgggagagaccacgtgcgcaagttctcggtaagcctcggcccgggagaggtcaggagaatactggttgccagttcttcctcgtccgcaatcctgaacaatgccggggacacggtctacctgatcgataacaaggggaacctggcggacatttactcttataccggagcgcccaaggtaacggtcaggagaatctcctactcacccagtccccccaaggagggcgattacctccatgtcacaataaacctcgacaacagtgggccggtaaatggaaaggggcacatcgagctttacttggacggcgtgcttatcaagaaatccgccgtcacggtctacgcttatcacacgtgggagtataagatgtacaacgtgtggcgcgcgactcccgggagccacgtcctcacggcgaggttcgtcccggactacgggggaagcccgtcctcaagctcaacaacgctcaaagtttcagagtccaggccgtacatctccggggtttcccacacgatgctcgttgaaaagcacccgattaggttccacgtcaacgtcgtcaatccctccggcaacaggaaggacgtaatcctcaagctcttcgttgatggcgtggaaatcagcaggctcaacagctacgtttacaagaggtggagctttgacctttggtggaagaagccgggcaggggcttccacgacgtcgagataaagctctacaatgccaacggtactgtggtgtactccacgtgggcgaggaacatttacgtaagagagaactcgcccccagaagttgtgagggttgatcttccacctttcctgtactcaaacgagtggagcaacggcacgatcgtcgttaacgatgcggaaggcgacagggtgaacgtgagtgtggaagtcgtcgggcgcttcagctttaggaggactggcctgtacccgggatacccgcacaggttccccctcgctccgatctacaaccacactaactgtcgcgagaacgtgaccattcgctttacgcccgttgatgagtatgggaaagtgggggagaccgtgacgaaagtcgtgccggttctcacggacagcgataaggatggttggtgcaatgccttagagtgggagtacgggatgaatccctacagtaatgacacggatggtgacggggtgattgactcaaaggacgttgaccccttgagggacgtgaaggttacagtctacatcctaagagcgaaggcattggacgatgttgacagttcaattgctggtcacaatccagcggatatgagtttggagcttaccgtaaatggacaaaccaaaacccttttcctaactgataatcaggatgattacgagaagaaaataattccaatcaccaatccactcgtcaacgtccaaagctatgcgattgcactaactacctttgatgttccagacgacaaggaagttgccatcatacggttccacctctacgacagagatgacaatgggaagagaaccgaaatggacgtctcccctagcaaaggaaccgttgctgtaatacattacaaccttaaaaccggaacgtggagcggtgacgattatcagggggatgaagaaaaatatttcggctatggtcacttgagcggatgtggtgacggctcctgtaacgtcgggccaaaagagccggacaaagacctcaaggtatacgtgaaatacgaaagtatacttgaaaaggctaaaattaatggtgagatcatcgacataaaaacgattgaaggcgttaatgacgttacggtgaaagatggaactacagcattctcaatagtgaaaccgaaaaatctgaaagttgctcgggttcggctggagaatggaacggtgatcaacgtcaccctcgtgaacacctacgggactgatgtgacttcaccgggaaacgaggtcgtcgcgacgacaagctcctctagtcccgctgagattctgagcaatgggagcatgagcaacgacgtaaagacacttaaaggtgatgtcaaagttgtgacttcttcaggagaaatgcccctgaagtcagaccttgtcgtttcttactcctcagctgacgacactcctgacggcgaaatctggttcgtcataaccaccaacgacgcagacgggatacccttctaccgtgaaatcgagctgaacaaagagcttgaggcaaatggatttaccgagcgctttgatcccagtgacagaaaagccgacgacatgaacggggactacgacggtgatggcgttccgaacagtgttgaactgttcattggaaaagatcctgcgaagagggacattctcgggattagcctcactgtctccacagagtgggctttgagtgaggaagacaagagaaatttggtttacagtattagaaaggcgagcgacttcgtttacgactacactgacgggtacgcgatgataaccagcgtgcagatatgggacgataagagacagtgggatgatgcggacgtgagagtacataagactaagtgggtaatccctcaaacaagaactgaacttttgtacaagggatggccaaaagcatctatcggaggatattggataaaaaggttctctaatgcaactgagagtcagaaacacgagttccatataatgatgtccaagaagataatctcagcggcttctgcattctcagaccaaaacattgtaatctctattggagatgtggactggggaaaaacattagggcacgaattgggacactacgtattttggctttatgatgagtatcttgatgtaaaaggcagaaattactatagtatcaaagattataaaatgaatgctctcaaaatgtggttcggagaagtaccaccccattctgtcatgaacgtgcagtttagatatagcgaactaagttggccacaagactacgctcggtttaattcgacattaacagaaatgttcaaaaattcagtagaggaacatgtgacagagcaatggaaagtatctagaagttgctgggaagcatttgcaaagtttatcagagaagaatggtatatcacaattcagccggacaatcttttagtccataaacctagtataatcccagacatgcctttcagttctatgtatgtccctgtaactgggccttacacaggcgtcggctacttcatggaggtgacttggaaatgaaaggaagattcctcagagttctagcgtttatagcaatccttctcctttcacttttagctttaacctataactacaggaaagatgcctgttttagttcaccatcctgcatgcttaaccgcatggacgcggagaggggcttagtagtagtatatcacaaagaaggggaatggagggtcataacttatgaaaacggtgccctttcagagataactgcaactttgaaaagaaacctcatcgtgaagaggataaatgttgaaaaaagacaggtaaaaacagggctcaactacagtcaggtttctttctcaatagacgacattcctgcccaccaagacgaaacggcaatgattataaaaatcgacgggaaagtcagagtcctcaaaggggaggaaataaagaaaatccttaaccaaacttggaacttcagggacattcttaaaaagttcaacggcgttaggttcatctttgtggacagggcaaaggagccttctatagacggcaatccgctcgttgggggttacctcgtgatgccctcaccctcaaagtgcacgtactcaacatgggttgtagcctttgaaaatcggggaaatgatacacttttggcattatatccaacatggaacgtgtcaggaagagtgggaaacctcagtggtccaacgatcaacgtgacgaaaatcccggagaacctcacaattccctgcagtggccaggaaattctcataaacgcctctgaaattattataaatcctttcccaacgaaattgcttgatgaatccaacttaaggtgcccagtggtggaaaaaactacaatttacttcaatggaactacaaaaactctccactacacgaaaaaatgcgtcgtgtctggaggataataagtacttcaagagatgaaactaagatacacacatgagtcggctacttcatggaggtgacctatggatgaagggaaagttgcttgcccttgcttttttgatttttctcttcctctttggctacttttatctcccaagtgagagcatgagcaacctctatcatcggattccagctcaagttagggaaaactcgcagcttgttgccgcttactattactcccaaactggttttgatggttttagagagtaccagttcgctttgtacgatccagaaaacaagactattagcatttacacttttaagacttacaaattcttgaagatctggccgaggatgaagaaaagcaaaatcacttgcaaaacaccattcaattactccaccctctcaacgaacccagaaaagctgaaagacttcaaaaactgcaacaactgcagacaactcctctacagggatagggtttacaggaatggagaaattgagagcatttacccttcaatgcaggatattgttaacaaccaagagaaaaataatagtaaatacattgaacttgctgttatcaaaagttccgagttgtcaataggatccttagagttatcttcgggggatacaattagatattcagatccgtttgagtacgcagaccttctgtaccttcccggtatgatggaagatccaatgaaggggattattctcgaaattctaccgatagataatcaaagcgcaaggagaaaggtcatatatcccggaggggtcatctttacggacaacattaaattcaaagttttgacaaacgaaacatggactctcagggaagttccatgggagcaggtgtttgaaaaaattgaacctgagagattcaagcagacaataaaaggaagcctgagatttacaatctcgatcttcaaatacgacggaaaactagaggtattctcagactggattaacactgaaaacaatttccacgcatactggagaatttatccatccaatagcattcagaaaatctactttgatagaatattaggataccactgcggctaactggggtgatctggggatgaagagggcattagctactggagtcctgctccttctcttttcttttttcgcgtacaatgcctacacttaccacgagctctcaacggcggaaggagcgtacaaactcgcaggaattccaaaaggggaagggttgatagcagtttatcacgaggacactctctggcagttcgcgacttacaacgaggagactaatgtgctcaagctctacactgttagccaatcctctcaattctggctaaaaaagaaaaaggtagagagtgcaagagctttcgtgaattactctccggtaatactagacctaggtgctctaaaggattataagtcccacgagaaggcactcctcttcaaaaccctcggatggaagtacgatgatgagattaacggttcttactggtggaatctcagtgaggttataaagccgaatgaaacgttttaccagatttacgcgcttggaacgagcaaggcaatatggataaggtcaaaagaagtatgtgaaaagcggagtcttttcgctcacgattatctttgctatgggagcatcggaatgaacggcgtactagtctttccctcctacaaggacacaaaactcctttgagtaaaggaaaagcctgtagatcagtataattctgaggtactcgcatactatccagggattaccttaaaagggagtggagaaagtcctgagtggagtgcctctgcttacaagcaaacagatggtcagattatccgtgaagtactcgagaagattgaaaaagggccaggaatcgtgcagatcatggtgacttcagaaggttatgcctccggcaagtatttcggcagtcagtactgccaggttaaagccttctgggatgaaaacaatactgagatccatgattggggatgcatgccagagagcaggttgaggttagtagattgggggtaaagttaaatgaggggaaagttgctcgtcctcgcttttttggtttttctcttctttagctatttttatctcccaagtgagagcatggacaatctctatcaaaagattccggagcaagttaggggaaactcgcaacttcttaccgcttattattcctctcaaactggttttaacgggttcagaaagtaccagttcgctttttacaatccagaaaacaagaccctcagtatttacactttcaaggtttacaagtttctgaagatctggccgagaatgaagagaagcaagataacctgcaagactccctttaattattcagtcctcgcaacaagtccagaaaagctgaaggacttcaaaaactgcgataattgcagggaactcctctacaagggcaaaatttacaggaacggggagattgagagcatctacctatcgattgaaaaagtccccaagaagagcactacctacgttaactttgtactcgtcaaggacagcgaaatatcagcaggcaaaataacgggaagagtgggagatcacgggattctacgaggcccccttaggatacagaggtttgcttcgcctgccttcacccatgagcgttcctgagaggaatgtaatactggagttcataagctggagagaacggcacgattagggcggtcactcattacccgggcaatgttacagtctcaacaacggcgaaagtaaaagccccgagcaacaaaacgtggacgctggaagaagtcccgttggaagatattgttcaaaaactgaagtctggggagctcgtgagtaatatcaagggtcccttcgctttgagttctcaatcacgagagagggagagagttgaagcgtggacagcccgggtgaatcccaggaaaggcgtcgagggagtttggaggatataccccctgggaaagatcaagcccgaaaggttcaggaaattagacgggtaagtgtgcacttggtatgggagctacctaactggaggaatccacagatagaaacaaagatgcactgtaagaggggatggaagcaaagtacatatacgataaccgcagagacatcatgggtgatacgcatgggagtcgaggaaaaccccaaacttccaaagtcagttcaaagacatcttgagccggatgagagggttctgttcgccataaagaagaagataagcatcgaaaagccaaagtggctcctcgttaccgacaggaggataatatacctcgacgagaaagttctcggaaggtacgacttcaaggccatcccataccagaagcttgagcaggtcgtggtcaagctcggtataatgagctcggaatttatcatagagggagaggagaacataacgctcaagcttggctggatggacaaggaggaagctagaaaggcgataaacgccataaaggatgccctcaacgccatagccgtagaacccgtctcaatagacgtcaacaaagggctgaccagcgagacgtgggttctgaagaagccgagggaattcgtaacgaggactatgccagcttaccagccagcccaggttcgggaagagaaagaagacccgctcgaaaagctgaagaagctcaaggagctctacgacatgggcgtgataagccaggaggagtacgaagaaaagagaaagaagctgttggaggagatttgacttcacccttttcgtttccatactactgcaatcaaggccgctatcataaccactgagagagcatagagagcaacatctttctggccagctttttgcccctctgaaaccccgggcggtttctcagtaagggtaacggttctgttcccaacgccgtagagggttaagttcagcggccttaaagcgccccaggcttttccctcgtagagcctgactgagaacggcacgccttctggtagtggagcaaccgtgaagtagtagcccattgacgacttcaggagcggccttggttctccaagctctggaaggtcgccgctaagccacagcgtcccagagacctcccccacgaggctggcgttgagggctatgagcgcgggaacgtcgtttcctgagtagtagcggagaggcctcgggggacttctccctccgtctgaaacgaccgtaacgttcacccaggccgccgaggtctccagcctggggacttcaacgactatcttcccgtcttcccaggaaagaacctttgcttccctaccgccgattatgaccttgccaccctttccaaaccctgcacctccgattactatctcctggccaggccgggcggcatagggagttattgagccgataagtggctttttctgttccccctcgatgtgaaagacgtagacgctgtcccgtggaagataaacagaagccttcccgcccgacacgaccatttctccaccgtagagggcgtcgcggtagttaccatcgggccagtctacggagaaagtcaggttgaccgcaggccccttgttcatgaccacgagaaggctgtggttcccaaaggttctttcaaaggcccaggtctcgtaggatgctgttacagtcatgaagtcgccgaagacaagggcgtcgttggtctttctcagccccccaagagtgcggattattctggaagcttcggtggtgttgtcgaagaccatcgtcggcctgttgtagggatcgccctttccgtccttgctaacgaggtagctctcgtcgccgtagtagattacaggaatccccggcagagttagggttaatgcaagagccatgtgaaagcgctgaatttcgtcttttctatcgccagcgtttaaaaagcggacgaggtcgtggctgtcgagaaagttcacagcctttgttggatagacgaagtgggagtaataatctccaagctcctcggagagcttgtcgagaccgccgaagaaggcgaagatcctcacaatgtcctctctgattggaatactgagaaccggggagacgttcgagtagcggtagaactcgtagaggtcatcgcccttctggagagagggagtgaagtactcgccgtagatgaagagcggccccttggagtagaggcggaggtaaaatgtctcgagccagccgagctccatgtgctttacggcgtctattctgaggccgcaggcgcccgagtcaacgaagagcatggccccctcggtgaggtatgaatccacccacgggttgagctggttgaaatcggcgaggccatagaggtttgcgtacttaagcggtatcccgctccaggtgtagatgttgccgttgtggtggtagacgttctcacggattccggtaatcgggttcacttcagcgttcttcgtgtccttgaagtagtccgtcaggaaggtgccgttgtcgtagagggcaccatattcaccgtagttcaccgggttcgagtggttgggcacgtagtcaacgattatgcagattccccgctttttggcctccttaacgagccgcctgaagtcctcccagcccccaaagtgctcctctattctcttgtagtccctcgtccagtagccgtgatagggagcgctcccgtaggcgagggagttgatgttgtcgttgagcggcgagacccatatcattgagactccaaggctcttgatgtagtcgagcttctcaatgaggccctctaaatctccaccccagtagaggcggtagttggagtgagtcggatcgtagaacggttcgttgtttgaggtgttgccgtcgtaaaatcgatccaccatgacctggtatattatcccccgctcgggaacttcccaggcagaggcgatgggagtaaggagtaggactatcagcactaccgagaccagtctccccattgtatcaccagaagtgataagagagggcagttaaaagctttgggctaaagggaagagatttcatcgagggtaaaagagattcctttccccataatattcaggtttgcggactttgaaacgtaaagcacgaattcttcaccctcaaaggaccagttcatcaccgtgcttgcaatctcctctaggagaggcagaagctcggggtaagacatctcaaccacgtcccggttgatgaagtaaaaggctattctcctcttgtcgccctcaaacgttgctatgttcttgacgagcctgagggcccccctcctttcgagagccaggaagagcttgtggactccgagaactgggtttagaacgacgtcattgaaggacgccttctcaactatcctgccgtagtagcttatatccagagaatacctgtcaacgtcaacctcgccgaggacgttgccgcagtttctttccccaccgcctattttaataacgggcacatcgttgaacccggaaacgtcaaaacccatgaactcaagtttggtgagagtctcgcagagagtatccgcaacgtcgtcaatgagcaccggtcggttttccctgttcaggtatatgaggtagaacagcacttcgggcattgaaaccgtgtcgtactcaatcatcactgtctcgccggggtaaaaggcagacaagaactcacggagatttagcactgacacgtcaaccacctgtggttacttaacgaggaaatataaaaaagtatcgaaactcggaagattgttcaaataattaaacaatctttgcgtgaaccttaaccctcggagccataaatgaggagattcttttaatggcctttccaggctcggccgtctttaggagatcaaagacgttgcccacgagcatgttgtctttgaagggaacgagctctccatctctgacaacgtagccgagaccaactggaagtgaaaagtcaccgctgaccggattggcggtgtgctcaccgaagacgttctttatgattatcccttcaaagtcctccaggccttctttcccaggttcgaccacgaggttactcgatcctattgatggaacagtcctgaagcttctaactgcgtttccagtactcttaagtccgagcagggaggcgtaagtatggtcgaggagaaagccctttagaataccgttctcaatcagtgtggttctctgcccaggagtgccctcgccgtcgaaggggtagcttcccggaaggccttcgagcgttgaatcgtccaggagggtaaagtcctctgaagctaccctatctccgaagctggaaaacctgctcctgccgtagtaaacctcatcaccgtagaagttctcaaggaggacttccacaatggacaggacggcctctggctccagcactacttctccctcgtagggttcaagcctcttcgccctggcgcttagctctgcatcctccttcgctttcattatggcctcttcaagggcttcgatgccctggagggagcggtagctctggtagaacgacccgtttcctggagtgtcctccctgaccgcgtaggcagagacccccatgtacgttgaagaggcttcaagctcaactccgttggagttcacgacaccatacctctcaaaggccagggagatcgagcccgaaagggtctctttttccttcagctccctcattttctcagcgtactggagcgcgagagcgtgggcatcctcaaagggtatttcttcgatctttctgtcgtatattcccttgacctcgggaactttagatggaacggggaaacccctgaaaggaacctcacttaccttggccagctttatcgtccgctccacgaacttttcaagctctgaacgagagtggtggatgccagttatataagagaagccgagctttccgttcagtcccacccttaggccaatgccggagtagaacttcctctgagagcggtcgagggtctcacgctctatcctgaaggaaccgctcctcccgctctcccagtagatttcccattcaacgtcctttgagttcaggatttcagcgaggctctcaatgacatcgatcatttcaatccccccacaagggccttcgtgagtaggtgcgggccgccatcatccacgggaaccgactgccccttgccgcagtatccagggtactcaatcctgacgtcctttccaatggcgcggatgctcttgagaacgtcaaggatttttcccgagagggcaacgtcgcgcaccatcttcctaagctcgccgttctcgattatgtagccttccctcgcaccgaaggtgaaggttccgttggcggtatccacctgtcctcccttgtcgcctatcatataaagcccgtatttgacctcctcaagcatttcctcgaacgaccagtcgccagcttcgacgtatgtgttgcccatccttacgaggggctggtgggcatagctctgcgccctcccgtggccgttcggctcaaggccgaagtactgggccgtctcgcggtcgttgaggtagttcaccaggacgccgtcgcgaataatctcaaccctcttggcccttattccctcgtcgtcgtagatgtaggagccgaacttgcccgggagggttgggtcatcaacgactgtaagcccatcaaccgctatcttctgtccgagttttccggccaaaatgctgtccccgttcttcacgaggtctgcctcgactgcgtgtccaagcgcctcatggatgaagaggcccgtaagctccgggtcggctatcacctggaactcgcccgacgggggagaactggcttttaacagcgccctcgctttttcaactaccagggaagtccagtgagaaatgtcaattccctcaaccatctcccagcccagcgttcccccgaagctcttccagtactgctgcatctccccgttctccttcgcagttacggaaaacccgaagcgtatcctgggaacaaccgtccttatctcgctccccagggagttgaaatagaaggtttccacaacagtatcgcggtaagagacgttcctgttcactattctctcgccagtcagcatggaatcggtctccttcacaagggcaaccttttcttcaatgtttatatcggagaagggccttttcacgggcatctcggcatcatcaacaacgggatcgccagtgtatatctttgactctccccgggagagcttggctattttcatggctgtttctatcgctttctcaaacctttcaaagtcgtttgcgcttgagaatccccacgctccgttgaaggccctcgcgcctattcccgtctcggagttactggaaagccccctgagctgaccgttgctcatggacacctcggtcatgaccacccttgaaatcctgatttcataataaccaataccgtgctttctcgccagctcttccgcagacctgatgagtctctcaacttccatctcgtctcacctggaggcagtccggagctgggtttatatcattttgccagcctaaaaaccgaagagcttatacggttaaaaactaccaaggttctggtggtgattatgaaacgagcgttatcaatcctgctggcagtgttcctcatagcgtcgttcttaaccccagtgaaggcgcagtgtccctcagagggaaccacagttgtcctgaaggcgccggcagtctcaaaaaccccggatggacggctcgtcggtgtcgcaacggacttcgtgataaccgtcgctcctggtagcgggcacgtttacgtcgagacctggcctctctcagaggttgacatgcaggcaagcgcgaggctggcggcccaaatagctggaaaggtgactggcaaggacatgagcaagtacgacgtcttcatacaggtcaaaacggacactccgatcataggcgggccatcggcaggaggaacaatgacagtgggtataatcgcagctctcatggggtgggaggtaaaccccaaggtgatgatgactggaatgataaaccctgacggaacgataggccccgtcggtggaatccttgaaaaggcttcagcggccgcttcggtcggggcaaagcttttcctcatccccaaaggccagaggattcaggtcatccaagagacccagcagaaaaccataggtggaatagttcaggttgtacagacgaagagcgaaaaggttgatgtagtcgaatacgcaaaggagcgctggggcctcgaggttaaggaagtaagcgacatatacgaggccgtctattacttcaccggccacgcgctcccgaagccgaaggcaccagccaacgtcttcatagacacctccttcctcaaggacgatgccgttaaggactatcagaacaccaccgcttactacgagagcgtcagggagaagctcaaaaagagcaacgttgactacacggcatatacagtcctcaaagaggccctggaccaggctaaggtcatactcgacggcgctaaagaagccttggactctggaatgtattacacggccctcagcaagaactttcaggcgagaatagtcctgaggcacgtcgactggtacatcagcgttgagagcccggaggacgttgcgaacctcctgactagtgtgaactcttacataaaccagaccgaaagcctcgtctcgtccaaggaaataaggggaatgacgatgctccaggcggttgccgccgcagaggagagggtagaggacgccaaggcaagcctacaagaggggtggaagtactactacagcgccgactactggaatgccattgacagagccgcctatgcctacgagagagcgcagactgcgcgcttctgggcaggactgggcgagaggtttgcaacgggtgatgttatagatagggaagagctcaaagacactgcaagaaactacatagacgagtcgaacctcatagtgacctacattgagtccatgtatgggaacgtcataggaactgatctaatggacacgattcaaaaggcggagcagtactacggggacggaaagtactcagcggcaatcttcaccgccatggaagcgagggttcgcggggaggtgttcctagacaccctcggcatagacaacgagaccattctgagggagaagctacaagagatgaaagaggccgcgaagaccgccataggggtagcgcagatgaacggactacatccgctcctctccatagcctactacgagttcgcagagagctacgagaagggcaacacaaccgatgacctagtcaacgctatgatattctatcagtacgcaagggaaagcgcgggcgtgttcctgataaaggtgaacgagagcacaccaaacgttccaagcaacgaaactgccataccagctttgccaaccaatacaaacacaaacggggaaaccacttccacgccgagcgcaacctcaacaagtaccacaagctcagggatacaatcggtctgcggtccagctttcattctcgccctcgcacttctcccgctcctgaggaggcgtgggtgagcgggaggtctttcacaccttttcttttcaaaagctcgacttcccattctgcaaggctcgggcagacggtacatccgagcctgtagaagccctcgtagtagagcggatggagatcaaagcccctcatgaggatgaacagctgaaccatcattccgctccagaactttatgggcataacctcaaggatttggccaaagtcagtttttctctcgactacaggtggctttaggcgcctcctggcactctctccatcgcggtcaccgacgactaaaagtgggttctcaaactcgctgacggcattgtacaatgcctcgaccttcatcttggtgcaccagcggtttctatgggttggcatgccgaacttctctatgggcatcgggacgtccaccctgatgaggttgacgcccagctttcctgcgagcttctcgatgtattcctccgtctctggcatctcgtactccatcctgacgtagacagcattaacttcaccaaacgcttcctttgccagtataagggccgccgtggagtcctttccaccgctccaggggacaactatatcgtaccctttgaatctcctcagaaactctttgctcgcgtttgcaaaggcctcgatgtagtctctgttggcggccatcaggtcctcaagcgaaacgtcctccgtgcagggacacctccagagaacctcggtcggaaagccgagctttttgctaacctctgcaactttattcggacccgagaagtaaacctcctggttcatcagcttcctgagaacgagagagttctcgccgagatcaacgtcaaggagggacttcatggcctttctaaaaccgtcgccaacggccagatagatgtcgtagtcggggtgtacttccaccccgaatggattttcaggattgagggagtaagcgttcttccactcgattccgagcctgaagcgggcctttatctcctcaaggttggcgtacagctcatcaacgcgcatgttgcggaccttcttggttctcaaaagccttgcgtagaacggcttttcgctctccttcacaacctcaaggatgtcctccatgagggccttctctttctcaccgaataggaatatagggatatagggttctccaagaacctcgttaagaccatcctctatttcctcaaagctcctcccaccgccgaggcttttaacttcgagaaagccgccatagttacgctcgtttatgtactggagagccttcgcgtcctttctagctcttgcgactattgtgaacatggtcgagtttaaaaggggagaacttaaaaggctttggccgatgaggagaactccctgccccgaccggtgaggagaccggcttatctgaggccagccaaagcccttaggaagcgcagatagattcccttgaccctcctgacggaagagacactgacccactcgtcggcggagtgccagttaccgcctattgggccgaagacgagcgtcggtttgctcaggtaagttccgaagtagttgaagtccccaacgcttgccccgtaggtaatctcgacgctttttctttcaacttccctgtacgcttccttaaaccgcctgacgaacctgttgttctccttcacaacgtaggggagcatctcaggagttgggcgcctgtatttttctatctcaagctcggcccttacaccaactctttctgcgagcctgtagagttctcctctaaccttctcccagtcctcaccaacgaccacgtgcctgtcaattatcgcaattgcctcgtctggcacgctcaatccatcggccgagccagagaagtagagggtgcagtacgagccttttccgagcttcgggtgtttcttcatccgtatcctgttgaggttggagacgagcttggcaagctcttcaatggcattgataccgaggtaaggtctcgccgcgtgggccttctttccctttgcccctacctcaatcacgaacctgcccctggcaccgagcatgagtttctcgttcgttggttccccaacgagaacgaggtcggctttgtcgagcctgccgctctttataagctcccaactccccctcgaaaagccctcctcatcactgacagcggtgaagatgacgttgggcctctcattttttggaagctccgaaagctcaaggaaggcacttaggagcgctgccagcccacctttcatgtcggcactcccgagtccgtagaacctatccccatcaagctcgccccatgggttctttgtccatccctgagataggtgcaccgtgtccatgtgcccgtttaaaacaactgtcgggcctttacctttgaggtaagcgaccacatcatcgccaaagccttcaacgggaactgtctccacaggtatgccgttctcttcgaggagtgaagctatgaactccgaaatctcgtgctcctctccaaagggggactttattgagacgagacgttttaatagttcaaactcatccatacgatcaccaagaagaatttgagttaaggcttaagtacttttcagggagcttttaggaaaagcttgaccaaagaaactttgcaaggcaaagtttcatcaaagtttgtggttcttgtttgtaaacggttttgaaagggatttttcattaagggctcttgtttaagtgtgaattcaattttagtgagagctttcggagtgagtttacttttaatcgacgcccgtagggcgtcaaagagagaaactccttcttgataagctgaaacttaggggaattcactaatgctaacttgtgtatcttgaaaatcctcgtagaaaggcaatttcagaaggaaccacaaaccctgatcaaacttcgcgatggaagcttttaggaaaagcttcaccaaaagtttgaatgtcttcttgatgttggcctgatgcggttagattctcttgatagacgggcagagaagtgtggttttcctttctttttaacgcccgaagggcgttatactgtgagcaaaccccttgaaaactgctaattgatgagaagaatcactaaaaacaggacgcttaaaaggacattccacctttgatgaaacttttcgccagcaagcttttagaaaaagcttgaccaaaaagtgccctttcttcctgaacttgcccgttgatgagcgtatgctcgctcagaaagcaagttcgcgcgggtttaactctaaaatctcccgttaatgtgatttcgaactttctttttagcgctctttgagcgctatactgcgaggaaatcctgtaaatctagcaactagataagcaaacccgctcaaaagccagctcattaaaaacgcatactactcttccgccagcgctttcgcaagaaagggctgatgtggtgggggcgcggggatttgaaccccggtccgcgggtttctccgggtcagagctccaaaggctcatccccaatcagtaaacccgcaagtcctcatacctctggagcccgcgatgatggaccaggctacaccacgcccccgtccgggagtagcttatccgcttggggtttataaattttgtcccgacagttttattaactttggattacaaaaatatagtgaggtggtacccatggaggagccagtagttatcggccacgacaagttcaagattggggaggacgaaaccgcaaagagggagctgagagtcgttaaagttcacgacgacgttatccagattcaggaagaagttcacggcataattgccctagtcggggccagctcaagcgtcaacatcaagaaggatgagctcaaacagctgataaagatcgcaaaggaaaagttcggctggagcgacctctgcgagtgaatttctccttttatagacattttgatgtacaacattccgcttctatcaccttcgaatttagagttttctgagtatcatcgacagtgatattaacgttttataagcataaaagaggttaaaaataccggtggttgccatggccgttggagataagatcaccatcagcgttatcaaagcggatataggcggctggcctggacactcaagggttcacccgcagctcgttgagacagccgaggatgttctttcaaaagcagtcgaagatggcactataatagacttttacgttgcaacctgcggcgatgatttacagctcatcatgacccacaagaggggcgttgacagtccagacatacatggccttgcatggaaggccttcgaagaggccaccaaggtcgcaaaggaactcggtctctacggagctggccaggacctcctcaaggatgccttcagcggcaacgtccgcggaatgggaccaggagttgccgagatggaaataaccctcaggaagagcgagcctgtagttacattccacatggacaagacagagcccggagccttcaacctcccgatattcaggatgttcgcagacccgttcaacaccgcgggcctcatcatcgacccgaagatgcacatgggcttccgctttgaggtctgggacatcctcgagcacaagagggtcattcttaacactccagaagagctctacgaccttctggccctcataggtgcaaagagccgctacgtcatcaagagggtctatccgaagcctgggcacccaatccctgagaacgagccggtcgctgttgtcagcaccgagaagctatacgaagtagccggagagtacgtcggaaaggacgacccagttgccatcgtcagagcccagagcggtctacccgccctcggtgaggtcctcgagcccttcgccttcccgcacctcgtcagcggctggatgaggggttcccacaacggcccactaatgccggtcccgatgcaccaggccaacccgaccaggttcgacggcccgccgagggttgtcgctctcggctggcagataagcccagaaggaaagctagtcggcccagttgacctctttgacgaccctgccttcgactatgcccgccagaaggcccttgagataaccgaatacatgcgcaggcacggacccttcgaaccgcacaggctcccgctagaggagatggagtacactacccttccgggagttctcaagaggctcaccgacaggttcgagcctatcgagtgatttccagcccttttctgttcattttacccctgtaccgttttatccaccaaggtttttatatttcaacaccctatagtctaagctggagcggaaaccttaaatattcttcaagttgatttcaacactcggagtgatacaaaggtggtgggagcatgaagttcacggtgcttcacctgaagcttgacgagaggaaagttgagagcgaggagttcgaaaaagagggagtttacggcatcatagactacggcctcgaactccatgagaggcttggaactcactcaattgaaccgtatgatccgaagaacgttgtcgtaatggggatggggccgttctcgggttcaatactgcccggtgcccacaggcttatgttcttcttccgctcgccgctctacgggacgctcttcccgtcggcgatgggcggtgccgcctacgccttcaagaacgtcggcgttgacttcgtcacatttgaagggaaggctgagaagccggttgttgtcatcctctacaacgacggctcgaacatcaacgtcgagctccacgagatagagctcgaaaagctgatcgagatctggaaggactataagggcgaggagggcgtctacgcgctcacccagtacctcatagacaccttcggcgagaggttcgacttcgagtaccgcatcgccgtcgtgggtcctgcagccctcaactccaactacggtgccatcttctcccagaccctaaggaagggcaagcgcgttgagggaagcgaggactgggcggcaaggggtggctctggaagcgtcctcctcagggcccacaacgtagtcggtataatcttcggtggaaagccgaggaagagggaattcccgggcgaggatatctcgtcattcagaaccgccaaagagatcgttgaaggcgtccacaagaagccctacaacgacgtcatagctgagaagaccgtcaagtacaagtacaaccccaagctcaagacaggaggaactttcggtgggaactacccggcggagggcgacttcgtcccgattctcaactggcagatgccctacatcccgaaagaagagaggatcaagatccacgaggcaataatgaagtactactgggagcccttcaacaaggaggcgatagagaccaagaactggacgaactgcggtgagccgtgcccggtcgtgtgcaagaagtacgccaacggtcaccacatcgagtacgagccgagggaggccaacggcccgctcagcggcgttataaccctccgcgccagtgacataagcgttccggccgttgatgcgatgggcttcgacgccatagagttcggcggaacagctgcgtgggttctcgagctcgtccaccgcggaatactcaagcctgaggaagtcggcctcagcgatgtcccagacttcacgaaagaggccctccttgagaggcccgtcgaggccagcgagaagaacgccaagctcgtcgctgaactggcccaccgcgtcgccttcgccgagaacgagatagccaagatactcggcctcgggaagagaaaagcaagcgtaatcctcgacgagaagttcaaggacaggctaaagtatggcgagagcttcaaggactacgctgtgtttacccccctcggcgaggacggcgagatgacgccgacgatgtactgggccatcggaaactacatcccgctcccgattcaggggaggtactggacgttctaccagttcggagtcttcctagagcccgaggagcttgcccagaagattatcgccagcgccctatgggagttctggtacgacaacgtcggctggtgccgcttccaccgcggctggatgaagccagtacttaaggctctcttcatggaggcctacggtgagaacgttgacatggaggagcatgctaagaaacagataaagcgccttatagagttcgcgagggaggctggctatactccagtgttctgggacagcatgcgcgtcatcgacctcgttgccaggggaagtgaagagttcggcaacgaaaagtgggccgagaagttcaagatcgacaaggtcggaacggccagggagtaccttgagaaggtgctcgatacgtacagcgagatgcttggggtcgagtggaggctttaaccgccgttttatttcctttctccccattaatgaaaagagaaattaaaatggtttctcaagcatatagccggaacgcagacttctgagtgcaaagagcaggaaaactcctgttagagccatcgaaacaggcagggggtagggctcacgctctgcagtccaatggtcgagcggatacatgataacaggaaagtaatggggttcaggtagagcacaggggagctggagcggtagtaggcaggggagaacaccacgaggagccagggcagtattcccgtgacggccatcgccttgtaggggtttccaatcttcgcacctatggaaaccgcaagcgcccccagctcaaggaaagttaatgaaagtgccagaatcagaagggggatgtttattctgctagttccctgatagtaaacgataaccgcgagacccaggagcacctgggggaggaccagcagggagtaagtgaggaactgggcgaggactaccgctgatattcttgggggtagtgttgagtaaagctcaagaacactgggttcgaagacattgctgaccctgttcgttagcgttccgaggaaagaactaaccagagaaacaacgataaagccgctcaccaggtaagagatgtcctccggagttctcgagctggagttcatgagcatcataaagagcaaggcgaagggcatgagcaggaggttgacaaagaggaacgtcctgtagagccgcattcccttaagctccatcccaattagaggacgaatcattcgccatccctcccgatgaggtttatcacgaggttctcaaatgagggggactcaatctcgaggtaggacacccccgcacttttgaggattgcatccacagtccgcaatgcatcctcaagcgtgtcgaaggccagctcgtagaggtctccgcgttttttgtgctccttggggaggatgctctggggtatctccctcccggggattaaacgaacctcggtgggcatcttaaccatcgagactatgtccgcgggagtgccggaggtcactatctttccataaacgaggaggtacaccctgtcgcagagcgcctttacttcgttcatgtcgtggctggcgaggagaattccttcccggtttgaattccttattacatcccacagccggtgctttgtaacgatgtccaccatgctcgtgggctcgtccagcacgaggaccggaagctcctgaatgatggccatcgccagcagcagggactttttcataccccccgagagctgatacccgaagaactttgcccccccactgagacgaggagctctagaacacccgatattctcttccccatctcggctggtgaaatgctttcgccccgcatcctgaggacgtactccagaacctcctcaaccctcaaagagggaaagctgaggggatactgaggcacgtaggcaagggttctttttacaatatctgggttattcacgatgtcccttcccatcaccctgattgagccttccgttggcttcaaaagccccagaagctgtcgtatgagcgtggtttttccagcaccgttgggaccgatgatcccaacaatttcattcttcctgacgcggattgagattccatcgttggcctttgtgccgtcgggatacaccttggtgaggttgtcaatttctatcacgttcatccttcgccctccagaagttttttatatcttgacttaacataaagtgctaaaaattcgctgtaattctgtaggtgctctatattacaggaaattttggactttgatgaactggccatccatctgcatcctccgtagcatactgggccaaatttacaattgagagcacatggtggctcgaagtttattaaagaataccatctagaacttgtgatgacaagattgccttcttcgtcaatgtatccatccggatttgaatatagaaagcctgggcatttataaacatttagttgttcatccactgcaaaactaaaggcatggtttgccatacatgggccaagtattagggggtttcctatggaataccccaaatccacagcgtaggaataaatctcaattagtagttttgaaatatgttgggttaatttatagctctcacctacatgtatcgacgtttgagttgggaatatgtattcaaaaccaactccttttagtaacttgtgaagcccgtattcttctttcaaatagtgtaataaggacttgacactggcgatattatcatcatttatatttgatcttaatataattcttttccgatattggtcaatattatcgataatattttttagaatgatatcaaaggttccacttccatcagagtatggcctcattttatcatgcgtctctttcattccatccaaagtaatttgaaccgagctaatgtagggtgccagctcctgggctctttgtttggaaaataacgtcccattagttattatggacatagaggttttaatgccgatttcttttaaagaatctaaatctcttactgccacttttagagtattataattcaacattggttctcctccgaagaacacaacattgacatttctcagaatgtttatcctcttgtttattagtctcattattctattccagctatcagttgttaaatcctgattactgtctaaagcttttcttaagtcttggtaacaataaggacaggagagattacatcttgaagttaagttcacaaacattcccatgtgtgttggagtatattttagaacattcacatgagtcctcattagctccttttcatctaattgggaaggtatcaaaaatcccaaagtggttagttctttaattaggctatcattaagagttccattgtcaatatcagcgttggcattgctgatactatttttaagcctgttccaagcatcttctgaaatagcaactaatgagcgtgaaagggtattaaatagtattatacgtccctgatatggaacagcgagagtatatctcgagagtttaacatttttcatatttctccacccccattttcagtagtttagtagttcaaaatttaaaaataaaaagataaaaccccatcagttcgggttatccttcacagggttacagaagctcccgcagatgaaaaagtttggctcgttgaagccgaatgctcccctctctagcacaatcaattcctccacgttatcacctccttaagtttttgcaatatattttgaacaacttatatttataaatttttctatttgtttttgctaaccatattttattctctttttgaggtataaaattattaaaacttaagttttcttcttagaacggatcaaaagaagcatgagtaaaggagttgtacatccatacaacggccaaacccttatatttttcctcacccttggcatttcaggtggtagaatgagggcagtggttattggctctggaatcggcgggcttttgacagctggatttctagccaggaaaggctacgatgtcacggttcttgaaaaagctccttatatcggcggccgcttcacaaatctgaattacaagggcttcggcctctcaacgggagcctttcacatgctccctcacggcgaagacggcccactggcacacctcctaaaactcctcggtgcgaacgtcaccatagtgaactccaacccaaagggcatgatcttctacgagggcaagaccttccactaccgcgagggctggaagtacctcggctggaaggagaaagccagggcgatgaaactgatggcggacataaagagaaacaagctcccgaccggagaagaggccgagatgagcgggcgcgggtggattaaggaaaagataggcgacaacgagttcaccgacctcttcatcaagagcttcctcggctgggccgacagcgtgctggatgtacctgctggagagctggccagggagattaaagcggccctaaagtggggcggccctggactcgtcagaggcggctgtaaggccttaaccgacgagcttgcgagaattgtggtggaaaacggcggaaaaatattgacggggaagaaggccgttgaagtcgatgccgaggcaaagaaggtggtgacggccgacaacgaggagtttccttacgatgtccttatctcgaacatcggcatcaaggagaccgttgagctcctcggaagggagaatttcgatagggaatacctcaggcacgttgagtctctgaagccgagcgaggggataaagtacaacgtcgccctgaaaggagaatcaaggatcgggaacaccgtcgttttcactctcgatactgagagaataaacggctataatgagccaacagctctaagcccggagctcgctccagagggatacaccctcataatgctccaccatgcccttcagagcaggaacgttaaggaggagcagaagaagggcatagacgacatttacagaatcttccctaacctcgatgaagagggcgagatcctgctcatccagacctacctcgacggaaatcctgtcaacagggtcgccagcgggcaggccgttgaggacttcccgattcaggatatctacatcgtcggcgatgcctacaagctacccggcgggatagaggtcgagggtatagccctcggtgtcatgaagacccttgaaaggctcggacttggaagcttttccgaatggtacctctgagcggcacttttctttacatttgtagagtggttggcatctttcccgaaccttattcaagtgaacatgagtgaagcctaacgaacgtttttatgccagtgagcgtaattagtcatccctggaggtgagagcatgaagagagttgtcatagccttgggcgggaacgccatactccagcgaggccagaaggggacttacgaggagcagatggagaacgtgaggaggactgccaagcagatcgctgacataatccttgacggcgattatgaagtcgttatcacccacggaaacggtccacaggttggtgcgctccttctccacatggacgctggccagcaggtctacggcatcccagcccagcctatggacgtcgctggagcgatgacccaggggcagataggctacatgatcggccaggcgctcataaacgagcttaggaagagaggggtcgagaagcccgtcgcaacgatagtaacccagaccatcgttgacaagaacgacccagccttccagaacccgagcaagccggtcggcccgttctacgacgaggagactgccaagaagctagcaaaggaaaagggctggacggttatagaagacgccgggaggggctggaggagggtagttccgagtcccgacccgaaggggcacgtagaggctccggtcatagttgacctcgtcgagaagggcttcatcgtcatagcgagcggcggcggtggcgtcccagtgattgaggagaatggagagcttaagggcgttgaggcggttatagacaaagatttagccggtgaaaagctggctgaagaggttaaagcggatatcttcatgatactcacggacgtgaacggcgcggcaataaactacggaaagcccgatgagaagtggctcgggaaggtaaccgtggacgagctgaagcgctattacaaagagggccacttcaagaagggaagcatggggccgaaggttcttgccgcgataaggttcgttgagtggggaggcgagagggcagtaatagcttcccttgacagggccgtcgaggcgcttgaggggaagacggggacgcaggttgtacgggagtgaatttggagcaaagttttttgttttaccattattctgtctcaattttgaatgtttttgaagacttttgtagaattcgctgttacagagttggctacatcaaacaaaagggaaacgaatctatcgtgctcaagacaataccgccgaatcatccaaaaagtttttatttactctctcaatttccagtccagatgtccgaagtgaacagagctgttctaaaaagggagaggggtaagagagatgacaacggttaaagtagacccagaggaaattaagaggatcaagagggagattgaggccctggaaaaggagagaaacgagatcagggccaaactggatgagctcgaaaaggagctccaggtctggattcaaaagagggatgaaaagaacaaggaagtacagcagctccgccagaaggggcgcgagtacaaggcgaagagggatgaaataaaccagaagatacaggagcttaagaagaaccgcgaggagatcaacgccaagcttgacctcctctaccaggaaatactcgagtacaagaccaagagaaacgagtacaaccagctcaggaggctcaagatgtcccccgagaggatacaggagaggatcgagaagcttgagtgggagctccagaccaacccgaacataactccagagagggagaagcagatcgttgaccaaatacaggttctcgcgaccgagcttgagatcatccagcaggctgagaggttccacaagaagctcgttgagacgaggaaaaaggtagaccagctcaagaaggccaggaaagccatcagccttgagatacagaagctcgccaaccagagccagcagttccacgagcagatgattcaggccttcaacaaggctgacgaggtcaagaaagaggccgacgagtaccaccagaaggtcgtcgagctccgcgagaaggtcagggaagccaggaagcagctcagggagatcgagaggaagatcagggagtacgacgagaagcacaaggagctcatcgcctaccgtcttgtcgccaagatgcgcgccaagaaggacgccaacttcgagaaggcagttgaagccctcgagaagttcaagcgcggcgagaagctcaccctcgacgagctcctgctcctgcagaggtacaacctcgtctgaggaatcgctatggaagtcatcaaacacgaaggacccggaaggcttggggtagtcaggctaggggattattccttcagaactcccgcgttagtcgggatagactttaccctgtctcccttcaactccttcttccatcccaaagagccgggcgagtacgacttcaacctcgctccctcgatacctctcgggttctacactcccgatgaggtaatccagaaggccatcgggaggctgtggagtgtaaactacgatggcttcaacgccttctaccttcctgccctgagaagaacggagtaccttgaggagttcttcaagattatagatagacacaatttcgatgccgtctacctcggcaactcgaaaattctaatcaaggagtaccgctacttcgtgaggattttaagggaactccgcgagaggttcccgaacgtcatgattatagccgaccttgagccgttcttctacccgctggcggtttatcttggcattgatgccttcgatacccgctctctcaagctctacgacttcgagggtaagggattcacccagttctctccattcctttggagcaacgagcccaactccctcgacttcgcccgcgaagtcatactgctcgtgaggaaggcccttgaagagggcaagctgaggtatctagtagaaaacttctttccgacccagtacaacgctggaattctgagaatagcggaccttgagcacccagattatcttgagaaatacactccaatccagaaggagacggtatatttcatcagcgatgcatccatcagaaggcccgaggtcaaaaggtggcacgagcgcgtgcttgagcgcttcacaccgcccaagaacgttgaactcctcctgctcttcccttgctccgcgaaaaaaccctactccttctcaaggagccacaccctttacagaagggccgtgaaagaggcactcggttcgggaacctccaaggttcacgagctgatactgacttcacccttcggcgtcgtcccgagggagtgggagtggctggccaagtatgacatagtagtcaccggccactggagcgaggaggagataaagcccgccgctgaactcctggccaagacgctcgagaagtacccggaggacatcccgatagtagctcacctcgatgaggcctacgttgagatagcgaagctcgcttccgagctctccggaagggagataatcttcacggacgtcaaaaacgggacgacgagtcacgaaagcctccgctcactcaccgagaccctgagggagttccagattgaggggacaaaggaggacaggacttatcgctacttcgagaacatcaggaaggtcttcgacttctacttcggcgtcggtgctggagaggccattcttcctgagaacggacaggttaagggctcaaagatgctacgcatcttcgttgagggccagcagaccggaactttcaccgacggcgtgataagcgtaactccctacggaatgcagaggatatacgatgcactcaagtcatactgggtgaagatagacttcgagctgagaggagacgtcttcgctgtcggcgttgaagaagctgacccgaggataaggcccgatgacatagtcggcatagtcagggatgaaaaggtagtcggcgtagggaaggcagtcctcagcggcgaggagatggtcagggcgaagaagggagtggccgttaaggtgaggaagagggtatgacttcttcaagtctctttattggagaataaaagcccttcttgatcatttcattcaggaggccgtttgcgtcctccagctcaaggactccttttctaacgccaagtacgaggactccaatggtgccagaaaccttaacacctagcagtctagctttcttccttgcgtcgtagtcatcgctgagcataattccacccctaaactttgcaacggctatgcaggatgcctctccttttccgagactttgattgagcaaggtgtagagctctctttcctcctcggtaagctcgatgacgtttagtggaatttcgaggtttgggtacttccctcgctttattccaacctcaaattcttccatcacttgaaccgttgtggtgcctttatcgcctaagataacctccagaaggtcgagatgtcctgttttggcaaagttcgaaataactgtggtgtccactacaaacactctatcgcctccacctcggaagcaacgtcgtctctgtccggcgttcttatggggatccccctgcgcttgaactcttcaataacttcctccctggtaactccaaggacttctgcagcttttccaaggcttatgagtccatcaatgtatgcagaaatcacgatctccatgaagagctccctgtcttgttttatcagggatacggccctcttaggcataagctgggcaaccttctcaaactccttcagtatccagacttcttccataatctcccccgcatatttttagagtgcacatgacttaagcgttgcgcaatatctaaaaatcccacttgcgtgttttccaacatgcccaagcacttcaagcgcggagtgaagagggagcaccactttctcaagggcctagagaagccgctggaagagatagccagaatccctggagtgaaaaaggtaatcccgggtaggatatacgcgagcgactccagaggtttcgagataaaggtcactagggagactcagacgggtttaaagctcgtcgccaagagcgatggaagcgttcaggaggtctttttggtcgttgataaagccgataggaagggggtgtggagagagatagaatcgctggccgaggagtggggaaagtaatcaaagctccctctttccctcaaagaactcgatcagctcctcgtcgcttatctcatcgtcggcttcagtgtatccaagctccctcttctggaggtctatgaggcccggcgtcaggaggagctttccgtccagcttcggcaccgcgtagtggagcgttatttcactgaactcgtcgagctttatcgtggggtgctcctcgtactcgatttcctccagccgttttccgtccgctatgagcttagcaactatcgaggcgccgtctattgaatactgaggttttccgatgtgcctgactttaacgccttccatctttgaggttatgaactccctcgtccttccgcgtggaactgcatctccgaggattccgccgaccactatcatggtgtcctcctctatgtcttcgggcttcagctcctcctcagcctggaggtcaagaacgatgagttttgaacggtcgaaggggaacttcgtgacgctctctgtgatgacgctcccaagcttcgccagcctctccctctcatcctcgcggacgttggtaaagatgagcttatccccccaccactgggcgacgtgagagtactcgagccacagccaatcactaatatcctcaaggtgctcgattatcaggtaaggcattgacaccaccgatgggctttcagcggggctcttaaaaactctaccgttcgggcgatttgaaaactttgttgatggaaacgagacaaaatcctgcctcacggacgggtagggacttaaacgtggagtaaagcttttaaagtcacgatccctctatactacgggcttggactgcggtggtagtctagcctggtctaggacaccggcctcccaagccggtaacccgggttcaaatcccggccaccgcaccatcttctcaaaaaccttttaacttccagcgttctgttaactaatggtgcttaccatgaagagcttcttaaccgagcagcagattagggttctccagcttagggccaaagggctgaaacagagcgagatagccgaaattctcgggacgagcagggccaatgtgagcattctagaaagaagggcccttgaaaagattgaaaaagccaggaacactcttctcctgtgggagcagataaactcgaagataagcgttgaggtcaaaaagggtgaggacatcttccaggttcccgagaagctctttaagaaggccgacgagcttggagtgaaggtcccctacagcacggcagagataatagcgtttctggtggaacatgcgccaatagatgacaggctggccaagagggacttcacgctcttcctggacagggaggataggcttcgcgttagcgagtgcatcttagaggattttgatgagatagggaagcacgagggcggtaaagacaccatttaatgccatcgcaagcccgctaactcccccagcaatctcatcctccagcagaatcctagccgttcccaggccgtgagatgtgacccccattgccagcccccttgccactctgtccctgactcgaaatacgttcaggagttccggtccaaccgcattcccgagtattccagtcagaataacgaggactgccgtaagggagggaattccaccaattttttcgctgattcctatggctattgcagttgtgacactcttgggggctatgcttaggagcacattactgctcccaccgagaacctctgccgtgtagaaggcacttagtatggcaacggttccaccgaccgttattcccgctgctatctccttccagtacgctttgattgtatcaagccccctgtaaacggggacggcaaggcttaccacagccggcccgaggaggaacttaagtatcccggcgctctccatgtaggaatcgtaggaaaagccgccgaaccagagaaatgccgctatcgtggctattgagaggagaacaggatttgtgtaaaaggccttccttctcgcgtggagctccgaaaaaacgtagaagactacgagggttatggccatgccgtaagggttcaccttccttccctcctcaaaagctcaacgacctttgccgtcgtgatcaatgtgaccagaaagctgaccacgatggcacccacgaccgggataagctggctcttaaggaggctgatgtagagtattatcccgacccccggaggaatgaacataacgctcatgttctttacgaagagttcggcctcgttctcgacccattccagccggacaataccggcagttaaagccgcaagtagaaacagcatgccgaggacgctccccgggataggtaggttaaaggcagagctagtgaactctccaagagcatagaagccgaagattatggccaatcccctgtaagcgttcatggttcttcttaagcggcggaatataaaagccctccggcgaaaaggcaataagctaagggacctactaccacgggtgataccatgctcttcaagaactatcgctttccgggtaggtacggccccgagtgggggagcggcgggatcttcggattgaggtaccacaatggcgtcctttatttcaccgtggccttcgaggcagaggcacacttcatagacgtgaagagcggtgaagaaaagacctacgatttcaccttggtcggagacgcccccacgagcggcggggacacttacaacgccgttgagaccgttgacgagttcatctacttcggcggctgggtacatgctccagcggtttaccgcgaggacagaaggatactcttcaacaacaagtactcccacgtgcacgtctatgacaccgcggaaggctcggtcaagctcctttggaaggagtccatacaccatgagaccgactgggccggcgagataagcgacatcatctacgatccctatggcgacaggcttctcctagcgagggaggatggtcacgccaacctcggcgtctactccctcgacaggaagaggggaaaggccgagcccctcataaccgagccgtctccgaagggaacgcgcgtccacgacgttgccttcttcggggtgggcaacaacttcacaggcggagtcagggagttcagagccctcgacctcataagcgggaagtgggaggcctttaagccagggggtagcgtggacggaaagccctacgagaggcccgaactcggggcaatggcttcggcctacaacagggccttcgccttcgtccgcggtggaatcttcgctggcaacccctacatgggcgaggtattcaccttctaccgcctcctcgacttcccgacgttctacgctcccttccgtgtgaacgcaataaacgtcggtggaggaatcctcacggcattcaactcccatcacgatgcatcgtacaggaaggattcaagcgatgctggaatcggatgggacttcacgaacaccctcgtggggccaagcgtcctcgtttacatcgctccaccgatggtgaagatagttggagcctttggagcgagggtaacgagcatcgagaaaatggacgggaagctccttgtggcaactaacacaacaccaaacaccggcgctaccgaggcgacgcccttcgacaccggaaacagggatatagtcgttctggacgagaagatactccaggagaggccgccggcggtgagcttttcagtcccgctcgacctcctaagaaaagcaggtaaaagaaccttcgggggcattcctctcgatggttacaagagtgctagggctatattctacgtgaagaacgacataaagctgaaggtctacgagtacgacctctcacttccagctggtactgcggaagaagagatcgttgacctaaaggcagggagaaacgtgatcgacctgaggacattctccggaatcgtgggcttcgagctggaaaaagaggtgaagggaaaagtaaggatagagctcctctgagctctccctttttacagtttgaacttgccgatgatgtcgcgcagcttctccacgatggcctttagatctgtggcggctctctggagttcttctattgcggctgtttgttcttcgacggcggagctgacttcctcagcagaggcagttgtctcctcagcagaggcagcgagattctccaaggctttcagagccttgtcaacctcctcctgcgtcctgagaatctgctccttcacgtgacccaacctagcaccagtatcactaatcaattcagcaatgttcgtcaagtactccgtggtttctctaagagtctccgacgactcactaacaacactcacacccctctgcgtggcattgacggcatccctaatctcctccgtcatcctgttgataatctccttaatgttgtcagccgccttcttgctctcctcggccagattcctgatctcctgtgcaaccacagcaaaacccctaccagcctctccagccctcgccgcttcaatggcagcattcaaggctaagaggttagtctgctctgcaatcccagtaataacgttcgtaatctcctcaatactcctgctcatctcattaaccctgttgactgcggcctctatgttacccatcatctcctgaatgctctgaatctgctgtgccgaaacctcacccttctgcctgccctcctcagcaatgtgaacaacctcgttgacagcaccctcaaactcctccatggccctaacgctctcctcactcatatcagcaaccaaccgcatgccctcagtaatctcattaatgttctcctgctgcctctgcgcctcaatactaacctgctgaacagcctcattcacctggttgatagcctcagtaacgtcgttcgcaacctgagcgaggacgtttgctctcttgtccagctcgttcgtgacgttcacgatttcgccgattagacctttgagcctgtgggttgtgtccctcagatcttctaggacctccctgagttcaccctttgcctcgacgctgaggccgttgcttagatcaccctctgcaaggcgctcaagtttgctcgctatggtgtccagggcccccacgaggtcctttccaaccgattcaaaggcctttataagcgctccaatctcgtcgtcttcgaggtactgtatccctctgagcttctcccgaacctcgctcagccttccgtccgccagggcctgggccacgtcacggagctgttcgaggggctttagcgtggtgttcaaagtcctgtatgcgattcccaggactatcaggccgaagaccgccgcgaaaacagatcccagtaaggaggtttttatgccagagttaacttccgagtttatctcgctggcgaccttttcagtattcgcttttagagaggaatcaatggcgttcatcatcgggtcggttagctcgtttatgggaaccgttgccaggactatccagccggtcgttttcatcctcttgtagccgcctatcttgtccactcctttgaatgtgtacctaatccatccggtctccttgttcttgtccagctcaccggcgaggcttgccaggttcggatcgtcgtggatgttgagcttctgaacgaggctctcatcggggtgaacaatgatggtgccgtctttgttcaaaatcgctatgtaacctgtctggcctatctttatctgcttggcctgatctatcagagtcgagacgaagacatcaacaccaataacgccaacgaactccccgttgatgtaaacaggctcagagaaagtaactatccatttgcccgttgatgcgtctttataaggctcagtccatactgggccgttcttgtcgactgcttccttataccatggcctcacgcggggatcgtagccttctgggagaggctcgtcgggccacatgtacatcccgccggtggtgcttccgaagtaaacgtaggccacgttgggatcgaggtttttgaccatctcaaagcgcttgagaagaaaagccttgaactggggatcgctttcgtcgtacttcgaatacgcctccaggacatcctgaacggccacatcccccatcatgcgcatcttgtcgaagtagtcgtcgaagagcctcgcccccagctcggcggcacttacagttatcgtgcccgcctcctctgttattggctcctggacgctcttctccatttccttgggcagaacttcgttgagctgaacgtcgagcgttttttggatgttgtccctcatcttgagggtcgcataaccgaccgtagcagaaccaatgaggagtgtcacgagaacagcggctatcacgatgacggctatcttcttccggaattgcaacggaatcaccccccaatcttggaagctctagaagtagtctatgacttcatttgttaaatcccttttgtgtaggggcttatgtaggtaattacgatggcaaaaagggagaatccacgaaacaaaagaaaaacataactgattcaaaaagatcaagaatgggagaaaacgttgttccagctcatgctctcctcgatgagctcctgaaccgtcagagttttctccccgacgacttctggcttgagctcttcaagcgccttgaggagttcctctctcggaaagagctcctcgtcaaagattacaaagccgttcctggcgtagccgttgaggaatattctccacactctctcgtccttctcaagctcgtactgctttatcgttgccttctcccagttgatgtcgccgaacttcagatcaagtctggtaagcttcttgttgaagaccctctcggttgtcatctccaccacctcactccttgttcagcccgaagtagtcctcgatgtcaatgtaggtcttcctgtagagctcgctgttcctcatcttctcaacgaactccttggagcggaagtacttgtccttcttgtagtcccagtccggatggagggccttccactcctcccaggtgtagctgaactgggcctgcaccttgtcacggtaaagctctggaatgacgttgaaggtacagaagggaacaatccttccgtcgggcatcgcgtagtggatgacgcagcgctctacgcgctcaacgtcgtagttgtactcgtccatgaagtgcatcatgccgacgaagagagcgttctcgtggaactttccgagggcatcgtagttgccgtgcatgaaggcgttcttgatgaggtcgaggactttgactcccttcggggcgtacttgtcgtcgtagaagctcctgaacttcatgaatatctccgcaccgagcttgagcttctggagctttccaagcttcttccactgctcgatttcctcggccttgctctcaaggaactcaacgaatccctcaacgtcgaggaacctcgggattgggacgacgcgcttgttctcgcggtcaaggaagacataggtagcggcaccgcatgcgaagtggctggtcatgtagtagcgtgagcccgtgaaagcctcgaagaacctcgctatgtggcctgctatcggaattggataccagtcttctttggctatagctccgttagtctgctcctcgattctcttgatggcaccgggtatcgttatcctgaacctctggcgctccttcttcggaacccttccaacctgggagatcggctggaagttgactcccctgacgatatcgaggtggttgaggccgaagttgattatcgcaccgagctcgtggtcgttaacgtttctgatcgtggtgggcacgaggactatacctggaccacccgccttcctcacgttctcgaagatgagcgggatctcccagtggttcttccagttggtctgaggggtcattccgtcgtagctgaggtagagggtgttggttccggcttcccttatcttcttaaccagctctgggtcaaaggcaagctttattccgtcggtgttgagctggacgtgatcgtagccctcttccttggctatcctgattatctcaatgaggtcatccctcaaagtcggctctcctccagtgaactggacggcgttggcgcctataggatgctccttctttgcattgcgaagcatcattctaatctgctcaagggtcggctcatagattggctgtccctcgcgggcgtagaagaagcagtaccagcagctcaggttgcagcggttggtgagaacgatgttgagaaggttcgtatgggagcgatgcctcgggcagaggccgcaatcaaggggacagttgacaccggtgttctgaacgttggcgctgaagagctctttctcgtcccacttccaccgtttaaacctgtaatacatctcaacgtcctcgtaatagaggtcggttatcattccctcggggcacttcttggttatccagaccttaccatccttctcccagacgactgcaggaacaaccctcctcgtctcgggacagagagagtacgtcctgtgcgggagttcagcgccataggctctgctggcattcttgagaagctcgtaaaactcctcctcgcttatttcagggaactcaacaatatccctgatccgcttggtagattcagcaaactctttttcaccgctgggaacttcgccaatgctttcagccataaggcttcacccctaattctgcctctggcttgaggttcaattcacaggtataaaaacttttgcgtaaatatgaagattttccttcataggtatgggacaaaattgagaagtccccaggttaacgttaaaagggaagccgggaagtaggggcggtggtagaatgccggcgcgtgacatgaggatggagatgttcgttagggcaataatgaggagggacttaaccaaggcgaagggccacatggagaagctcataaagatagccggaagcgatgagtggggcaggggatacgcaagagcagtcgagggcataatgaacgctgtaaaggacaacgatactgattctcttatcgttcagctgttaacgaccaacgacagggaacgggcaactgagcttttgagcgtgtactccgagatggcagcgcaggagttcagggacgagtacgagaagggctactacaccgcttgggccgagtttctgaaggcttatctgaaccagaaaacgctcgcgtgatgaagatgggaaaggaagagctcatgaaaaagcttgaggagaagatcaggaactgccagaagtgcccacttggaacgctcaggacgaacgcagttccaggagctgggagctacgatgcaaaagttatgttcgtcggtgaggcaccaggctactgggaagaccagaagggtctgcccttcgtcggtcgagcgggaaagctcctcgacgagcttcttgctgagattggcctgagcagggacgaggtgtacatcaccaacatcgtcaagtgccgcccaccagaaaaccgcgatcctaccgaggaggaaataaaggcctgttctccctacctcgacagacagatagacataatcaggccgaaggtcataatccccctaggaaggtactcaatgaactacctcctcaggaagttcggctttgagccggaaccgataagcagaatccacggaaagaccttcgaggcgcataccctcttcgggaagatcataataatgccgatgtaccatccagcggcggccctctacaagccgccgctaagggaggagctgaggaaggactttcagaagctgaaatcactcctggaaaacatctgaattttttcacagatttaaaagttccagcaaaacaaagatcaatattatctttttcttatacctaaaccttttgagctcgtattgaaagtcaagagatgttttatgtaaaactccaaaagatacttgggaagactttttatagctttgatgacctaataagtacttgaatatatcgccgagtaccataacgacaaagaatcgccaagtatatggcagagaacttcgaaatatccaaccaataaggcaaaaaatatcgaaagacttataaaagtccgaatttcctttggttgaaaatatttgggggtgaaaatgtgtcggactttggtgtgctgtctctgctaccacccctcgttgcgataggtcttgctatatggacaaaaagagttgtcttggcgctgtttgccggtgcctggattggaggccttatggtttctggctggaatcccctaacggggacaactcagaccctcgagtgggttgtcggcagtgttacagacgactggaacgcaaggatactggtgtttgacttcctcatcggtgcgggtgtcggtttgatatacaaatctggcggagtgcacgcactcgcaaaagttctcgggagcaggatcaaaacaagcaggggcgcctcagtcctcgggtggctcatgggcgttctggtgttcttcgatgactacacaaacaccataatcgtcggcaacaccatgaggccgataaccgacagaacgagggtttctagggagatgctggcatacatagatgattcaaccgcggcaccggttgcgggccttgcgctgatatcaacgtggattggatacgagctggccatgataggcaagggatttgacggtgtcggaattacttacaactcctacgatgcatggctctcaagccttccgttcaggttctactcaattctagctataattctggtcttcatcgttgcctacacccacaggcactacggtccgatgctccatgccgagtaccgcgcaaggactacgggaaaggttctccgcgacggagctaagccgcttatgaccactgaaaccgaccttggcgctccacagccaaacggaagtccctgggacttcgtgatacccatcctgaccctagtgatagtctcactcctcggcctgtggtatactggagcggccaacctctacgcatacgatcagggactcgactggtggactgagctcgacaatccctttggggtccacttcacagattatgggttcgttgacgcattcagggaagcagacgccgcaacagccttgctatggggatccttcaccatggttctcgttgcgagcataatgctcgtcggccggaagaagatgaccgtagagcagtgggaagacaccgtcatccgcggtatgaagcagatgctcttcgcaaacactatactcgtgcttgcgtggactctcggaactgcggctgactccgtcggaaccggaagctatgtgataaacctcgccaccagctctggccaggacctcggcccgtggatgccgctgataatgttcctggcggcaatgtttgtggcgttcacaacgggaacgagctggggaacattctcagtaatggttccgctgggagttcagctggctctcgcctttactggcggccacgtgaacgaaatagtctttgccacgatcggggcgacctttaccggggcaatctttggagaccactgctcaccgataagcgacacaacgattatgagctcgatgttctccggctcggaccacatcgaccacgttacaacccagataccctacgctgttactgtggcgagcataggtgcagtgctctacctgctcttcggccttggagtcaggagctggataatacttctaccgcttggaatagtgctcctcgtggctgcttggtacgtcctcagcgagtggtacggcaagaagtacggcatcccgcacggaaaggtgcccatctacgtcgttgaggagtgaacttcaacctcttctttccttttatatcctgaaaggcttttaagagcctcttctgaacaattctggggtgaaagcatgctcatcagggcgtttattccagcccacataacggcgttcttcgtgccggtgttccacgaagagccgctgaaggcaggttcgctcggcgctggtgtgaacctctcgaagggcaccaacgtcttcgccagcatcgagactgggacgctggagaggcacatccacgtcgccttcaacggggaacccgtgaaaagggaagaagcggagatcacatactacgttgcggaaaagctcgtacccaaggacttccttggagaggttgaggtatggcagtacttcgacttccccaacggctacggcttcggaaacagcgccggtggtgcccttggaacggctctagctttaagctacgccttcggcgggacgtggcttagagcggctcagcttgcccatgaggcagaggtaaagcataagggtggccttggagatgtgatcggacagctcgctggtggaattgaggtgagaattaaaccaggaggtcctggaatcggggttactgacaacctgttcttcgaggactacaaagttctcgttgtgcccctaggcaggctgtccacaagggaagtgctcgacggggacgttgtaaaggccatcgaagtcgagggcagaaaggcgcttgaagaactcctaaaggagccgaagccagagagaatgatggttctggccagaaactttgcagaaaagacaggtcttctcccgggagaactctccgagatagcgagagagcttgataaagtcctgaagaacccgagctcaatgataatgctcggaaaggggctttttgcactcgtaagagacgaagaagctgaaaaggcaaagcagttgctgagtgatatgaaccttccctacgacatagccgagatatacaccgagaggccgaaggtcgggcgctgggtcgggtagcccgctacccttttattctccttgccgtattttatccggtggtgagaatgagcgatatgcgctactctgaactggccgatctctatagacggctcgaaaagaccacgctcaagaccctgaagacaaagttcgttgccgattttttaaaaaagactccagacgagctccttgagatagttccatacctaatcctcggaaaggtctttcccgattgggacgagagggagctaggcgtgggagagaagctcctaataaaagctgtctctatggcaacgggagtccccgaaaaggagatagaagactccgttagggacactggcgacctgggagagagcgttgctttggccataaagaaaaagaagcagaagagcttcttctcacagccgctcacgataaagcgtgtttacgacacctttgtcaagatagcggaggcccaaggcgaaggaagccaggacaggaagatgaagtacctcgccaacctcttcatggacgctgaaccggaggaaggcaagtacctggcgaggacggttttggggacgatgcgcactggagtcgctgagggaattcttagggatgcaatagctgaagccttcagggtgaagccagagctcgttgagagggcttacatgctgacgagcgacttcggatacgttgccaagatagccaagctcgagggcaacgaggggctctcaaaggtcaggatacagataggcaagccgatcaggccgatgcttgcccagaacgcggccagtgttaaagatgccctcatcgagatgggtggggaagcggccttcgagataaagtacgatggcgcgagagtacaggtgcacaaggacggggacaaagtcatcgtgtattccagaaggcttgagaacgtcacgagatcaatcccagaagtcattgaggccataaaagcggccctgaagccagagaaagccatagtcgagggagaacttgtcgcagttggagaaaatggacggccaaggcccttccaatacgtgcttaggcgcttcaggaggaagtacaacatcgacgagatgatagagaagataccgctcgaactgaatctcttcgacgtcatgttcgttgacggcgagagcctgatagagactaagttcatcgacaggaggaataagcttgaagaaatagtgaaggagagcgagaagataaagctcgccgaacagcttataacaaagaaagttgaggaagcggaggccttctacaggagagcacttgagctcggccatgaggggcttatggcaaagaggcttgattccatctacgaaccggggaacagaggcaagaagtggctcaagattaagcccacgatggagaacctcgatctcgtcatcatcggtgcagagtggggagagggaaggagggcccatctgcttggttcgttcctcgttgctgcctacgacccgcacagcggcgagttcctgcctgtgggtaaagtcgggagcggcttcacagacgaggacttggtcgagttcacgaagatgctcaagccatacatagtacgccaggaaggcaagttcgtcgagatagagccgaagttcgtcattgaggtcacctaccaggagatacagaagagcccgaagtacaagagcggcttcgccctgagattcccgcgctacgtcgcccttagggaagacaaaagcccagaagaggccgacacaattgaaagggtggcggagctctacgagctccaggagaggttcaaggcgaagaagtgaactcccctccctcatcctcggcgagtgagattccttttccctcccagaactcccgagctttcctttttctttcctccagagcttccctagcttttctgtgagccaattcaaaggcttcgtccacacgatagtaggtgtacacgatcgcgacgattcccagaatggaagccagcagagaaaggtccgaagctgccaatgttacaaaaacaggagcgtcgtagagggtgtgaagcaacgccgccttcaggtagcccgaaaggagagagccccttagagccatttcgagggcgatcgccgtgaaggagacgtgatacatgaccacgacaactctgaggagagcacccaggatgttgccggagaagaaaagagtcactccataaagaacggcctctataaccgcgaatatcaaagcaactttgactgtcagcctccagcggtagagctcatctccaccacggagatatggaaagagcttcactccttcctctacaaaaccggctacgagcggcaggaacagaaggcccgcatcagaaaaaatgaaatacaacgcaaggagttcaagaacgacagccaacataaaagccagaaatccatacttcagggctttccctgtttccactataggagttatcctgtccagggtagagagccagttatcaacctttccgtacagctttacccccaccaacagggcggatatcaagtaaagtatcagcatgattacactgaccataatatcaccgttaacactttccatgattacattaaaagcttttcccggcagttttttatacttaaacccaaaggtgaatcatggggattaccatgagtgactcaaaagatgaactcatcaggatgttttttgacgaggaagcgatactatttggccgcttcatactgacgtcggggaaggagagcaactactacataaacgtcaagaagctcagcaccaagcctcgcgcactcaagctcatagcaaagctcatggcaggggaagcacagaaaagagggataacctttgacagggttgccgggccggaactcggagccgtcccgatagccactgcccttgctctggagactgaaaaaccgctcgtcatcgtaagaaaaaagccaaagggacacggaaccggaagccagcttgagggtgaggttaaagcaggtgataaagttcttcttgtcgaggacgtcactacaacgggtggaagcgtcttgagggcagcagaagttctcgaaagggagggggcagaaatagcggccataatggttgtcgttgacagagaggaaggggccgaagagaccataggtgcaaaatacactttcctcccactggtcagggtctcagagctttttgccagaaggaaagagcctcagaaagagtgaacggagtgtatcaagaaagctatcgagcaaacttcttttcatttctacaccaaagatccactccctaaggacatcgccggccatcctgatgtcccgggctgcatgggagtgcgggacgttcacaacaacaggaatacccctgttttgactcgctggaacggcggggtcaaaggaaactatgcccacaacgggaacgccaacgctctcctcaaggtactcaacgatgtcatcaactattggcttttcctcgcggaccttgttcagtatgactccaactttgagaccgtaggcttctccaagggctttaagcttgtccacctcgttctccaccatcttcctgaaggagtgaactggacatctgccaagctccacgatgatgagctggtactgggcgagcctgaaggtagagatggtatcaaagggaattccaacgggggagtctatgaacgtcacatcgtaattctccgccgcgtcacgcacaatatctctgagccgcttttcatccatggtgaggatatcaaacagctttgaactgccaggaagaacatcaacccctgtcttgacgtcgtggtagatagcgtccttgagtctagcatcaggagtagatagaagagtatggaggtttgtgacggggttgtagataccaaaatgaaaggccagctttgggaggtataggtcgccgtcaatgacgagcgttttatagccgttcaaagaaaaataagttgagaggttcgcgctcatcgttgtttttcctgccccaccccttccagtgaccacaacggcaaccatgttaatcagctctcctcttctcgtttgcttattgtgaccagttacacttcagagccgaagtagtcctcaagtgttttggcccgaaccataatggaggctttatcaacgccgtagaagacctcaacgaggccctcagactcaagctccttgacggtcttaagcagcgctggggcaggggtttcaagctctgcgctcagcttttggagggcaactgccctcttcttagtgctcaaaaccttatagaccatatccttgcggcggccgaacatgaacccggcaccaataatactacgttggagacctaaataaaccttctgtgaacacttttgtcgaatcgtcagctcggcagatttataaaacggtgctcaaaattgtggccatgagcgtgataaggggaacaatagaaaggctcagcgacgaggggcttgggacaatcagggctagtagaagggagatcctcgtcccgtacaccgctccgggcgatgtagtggaagttgcgcgctggaggaggaaaaagaaaaagctgatagcgacggattttaaggttatagaagagtccccgatcaggactgaaccaaaatgcccgtactttggcgtatgtggcggctgtcttcttcagcatctcccctacgagaagcaaatagagttcaagagtgagaagctctccaggtatatcgggacggacgttgatgtaatcccgtcccctgtaatctatggccacagaaacaggatagacgtcgttataagcacagggggaatagggttcaggagatacggaacatggtgggatgccgttgacattgaggaatgccccgtttttggaaagacaagccgaaaggttctgaagtccctgagggaattcatagaagacgaaaagccgactttgtacgagataaggaagaacgcgggctttctgagatacatcgtcatgagagagggcaagttcacgggcgaactcatggtgaacctcgtaacttcggagggcaaactcccagagagctttccagaatacttcccgtacgcaacttccatctactggagcgtgaacaggaccgagagcgacgtctcttacggagatgtagagaggtactggggtgagcccttcataagggagaagctcgacgacgtcacttatctaatccacccaaacagcttcttccagacgaacagctaccaggccgttaacctcgtccgaaaagtggccgagctggtggaaggtgagaaggttctcgacctctactccggcgttgggacgttcggaatctatcttgcgaagaggggtttcaaagttgagggcatcgagataaacccgttcgcggttgagatggcaaagaaaaacgcccagattaacggagttgatgcagaattccgcgttggtgaggacaaagacgttaacagcctctccgaatatgacacagtggtagttgatcctcccagggctggcctccaccccaagctcgttaggaaaatcttaaaagacaggcctgagaccctcgtttacgtgtcctgcaatccaaagactctctcccaaaacctcaaagagctctcggaaggctacaagattgaagaggccgttggcctcgacatgtttccgcacacgccccacgttgaggcagtcctcaaactcagaaaagtttgaataataaaccaaaaaatccgataccttaataaaggattagtgcgtatttgaaacttaggtggtgagattatgttagacgagagggacaagattatacttgagatgctcaccaaggatgcccgaacaccattcgccgagatagccaaggtacttgggataagcgaaacggccgtgagaaagagggtcaaggccctagaagaagccggggtaataaagcagtacacgatcgtcgttgacccagcgaagcttggctacaacctggtcagcattactggagtagacacgaagccggagaagatattcgaggtggccaacaagctcaaggagttcgacttcgtcaagcatgtctacctgaccagcggcgaccacatgataatggccgaggtatgggccagggacggagagcacctttctgagataatctcagagaagataggaagaattgacggcgttacgaaggtctgcccggcgatcatcctcgagaagatgaagtgagaacctttcttttctcttttctcgttctacagcattaatttcaccaattccgcttatgattaagtgttttatactccgcagtgcaggttaatcatcctgctaaaagcacacagaaccaaacagcttgggagacttcttaaaaacggaattggcaacgttgagaaccatagaagaattctggtggtcccgcggcccggatttgaaccggggacctgcggatctacagtccgccgccactcccaggctaggctaccgcgggaccctactgggcaacccgttccataatcgctggagtaggtttataaatttttctctcattttcagctcggtgagaacatgagggcctacgacccagtaacggttgccattcctctcgcttacaggcttgaaaagataatgctggagaagaagtccctcccgagcggcgacgaagtgaagacaatcttgaaagagcttggacttgaggagctctactccgggaagggactcgcgctcctgagaaaccaggacgttgttgttttggtattcccccgtgagagccttgtgattgatgtaatacccgcgaccggagaggtcagcgacgctcttgaggtcattgcctaccacgacagaaagctcaacgccctcattctcgaagttctccccgcgaacgacatagagtacgaggggaacattggagtcgagcctgcaataatcagcctcgagagtggggagcttgagagtgcccccgtcttcggggacttcagagaagaggaagatgggatttacctcgtaatcgacaaggacaccctccagaggtggaaagagagtggaaagctcgacgtttgtccgatctgcggtggcgaactatcatggagagggaagaaggccatctgcctggactgcggctacggagtgaaggtggtggaagaatgagaactgcaaaagcccagcttgtgaagtactccagaaaagcccacgagaggggcctgactgcggcattcggtggaaacttgagcataagagttggggatctggtcttcatcaaggccaccggctccgtgatggacgagatgactccggagcaggtcgctgtagttgccctcgacggaagacagataagcggcgttaaaccctcttcagaataccgcctgcaccttgcagtctaccgggaaagacccgacgttaaggccatcgcccacctgcacccgccgtactcgatagttgcttccgcactgctcactggagagctcccaatactcactccagaggccgagatataccttggtaagattccgatagcacctttcagaccggccggaaccgaagaactggcagaagttgtggctgaaaaaatcagggaagcggacgcggttcttatggagaggcacgggattgtgaccgttggaagaagccttagagaagcgttctacaaggctgaactcgtggaagaaagcgcaaagctgtggtatctgagcaggaaatgagcggaaaaaatcaaaggctcacttgacctgctcaagggcaccgagaacttcccagattatggtcctcgtgtgcatcggcatgttcgggtcttcgctgatttcttcaaggatggctatagcatcggcggccctaacggccgggtcgcggctctcatcgaggagaacctcgatggcctgctcggcggccctcctaatgttcctcgggacgacggtgtcctgaacgacctgctccttgagaacctgcacaatctgctggataagctcgctcatctctcctcacccccttcgcttctttaataaaaaattgtaactaaaactccctcggcttatcttaagctttactaactaaaaagcttttcggtcaattgtcgaaatcaatattcaacaccgcgcctcgccaggatccctctctggtacgggtgcttaacttccctcatctcggtcacgtagtcggccagctcaaaaagctcctccgggcagtatctcccagtgagaacgagttcggtgttttcagctttgttctttatcacttccttaacttcctcaacaccgagcattccaaagccgagggcgacgcaaacctcatcgagaataacgagatcccactcgccgcttgacaccagctccttcgctctttcaagtgcccgttttgcagcttttatgtcatcctcgctgggttttccgtgaacaaagccgggcaaaccaaaggactcaatgagggctccgcactcctctatcttcttctgctctccatagaccttgggagctttcatgaattgcactatggcaacctttccacctgaaccgagcatccttacagcgagtccaaacgcagccgtggtctttccctttccgttgccagtgtagatgtgaatcaaaccaagtctgtccttccagctcattgttttcaccgttggacataatctccagctccttttatatgtttgccaagaaactttgcaagcaaagtttcatcaaagtttgtagctcttctttgaggtggctttttattcaggattttggactgcaagtgctcatttttgagtggaacctttataggaaacttcttgaaaaaagggtgttttcttttctttgacgcccaaagggcgtcgatttagagttaaacacgagttgacagggtgttaagggttctcactttcaaaaagccatttgaattggaaaatcacgatggattaggattctaaaaaaagagctacgaaccttgatcaaacttcgccagcaagcttttaggaaaagcttgaccaaaaatgtttccttcccccttgaacttgttgttgggaagtgcatgcttccaccaggaagcaagttcacgcgggtttaattccaaaatcttcccgctaattgtgatttttgactttctttttagtgcccttcgggcactatacggtgataaaatccttttgaatcagccaattgaaagtaaaccccccataaaacgagcctgtttaaaaaagcataccaactttccgccatccgtcaaggacgcttgaacgatagtgaaagcggcgctgaagcttttagaaaaagcttcaccaaaagtttgaatgtcttcttgatgttggcttgatgcgattagattctcttgatagaggggcggagtaatgcgggttttcttttttaacgcccttcggggcgttatattgtgagtaaacccttgaggattgcccaatttatggtgagaatcactgaaacccagcagtttaaaaaggacattcgctctttgatgaaactttgcccttcaagcttttggaaaaagcttgaccaaaagtgtgcccttcttctcgaactttgcttattgaggagcgtatgctctttccagaaagcaactttgcatgggttttactctcaaaacctcttattaattgtgattttgactttctttttagtgcccttcgggcactatgcggtgataaaatccttttgaatcagcagattggtaagtaaaaccccccataaaacgagcctgtttaaaagagcataccaactttccgccagcgctttcgcaagaaagggctgtactggtagccccgccgggattcgaacccgggtcgcgggatccaaagtcccgcatgcttggccgctacaccacggggctgcccgatagagagacccgagttttggcttataaactttaagactacaaaacagtgcaaaagtttggaaaaagaggcctcaaatgataagtgacacgaggtcccttatcgcattctctgggtctttggccttcgtgacgccgctcgcgaggagaaccccaacgcttccgagttcgagtgccttcttgacgtcttctcccgtggagatgccagctccagttaggactccaacgtcagggtttacctttttcacgagctcgacggtgttcgtgactacctcgggctttgccttactgaccgggattccggtccctattagctctggcggctcaacggcaacgtagtccgggccaagggcagcgaccgccgctgaaaccgccgggttgttggagcagaccattgtcatcagcccgacttcttcagctcttcttatcgccgcttcaaggtcggccaaaatcatcctgttctccgagtggttgaggagcgttccgacagccccgacttccttaacggcctctggaagaacgtggccggtgtggcttccaggctttatcgggtcaatgtgctgtgcaaagactgggatttcaacactctcagctatcatcctcaggtcggccagctggggggcgacgacgatcgttatgcccgtctccttccagactctctcagccgccttcgctatctccagagccctctttcctgttgcctcgatgtaggtcttgaagtttatcgctataatcggctcctttagcttcgccatgggtatcaccgttagtgttatcacctttgggcttaaacgtctttcggagagtttcctttccagtggagcggccttccaaaggggtcaatcaagccggcacggattaaagaagagcttatcttgtccccgaggtagctctttattatgggaatcgtcacgatgtcgagcggctttaatcccttctcctcgcgcgccctgttcacgatgagagcgcctttgtacgtctcctcgctgacgactatggcctcgagacttttcatgctgtcagcgaagcctattgcagtatgtatctttattatcctgtagttggtgtagccgtttacctcaatgaacttgagaagatccttaaggcggtgctcataggggagtatcctctcggcgtagggcttgttcctgaccatctcgtcggaagtcaggccgatgtagactatcttccctacctcgaaggcctttctgagcagggccttgtggccgaggtgaagcctgtcgaaggttccaccaacgacgacttttcggtacttttttctcatggtcctacttactcatgcagaccaataagcttttttgtcccgctgaaaacggtaagtggtggtgaggatgagcctagacttctttttctacccgaagagcgtcgcggtcttcggctcgttcaagaagggggctatagcctacgaaatcctgaggaacattgtcgaagggggctttaaggggaagataattccagtgaacccaaagggtggaaccgttgaagtgagcggtaaaaccttcgaaatcagggagaagctggacgagcaagttgatacggccataatagcggttccagccaaaatcgtccctgcgttgattgacgagatagggccgctcatcaagggtgccgtggttatctcggcgggattttctgaggtcggcaacgaggagctggagagggagcttgtgaagaaagcgaggaagcacggcgtaaggctgatagggccgaactgcgcgggcatcttcggtgttcacgggaagttcttcggctccttcgaggttcgcgttaagcccggtggactggcattgatcagccaaagcggcgccttcggcggggcggcgttggcaatgggaaacgacgaaaggatcggcttttccgccttcgtctcctacggaaacgctgctgacctaaacgagagcgattttttagagtactttgccgatgacgaaaataccaaggcgatagccctctacatcgagggagtgaaggacgggagacgcttccttaacgcgctccgctacgcttcatcgaagaagcctatcatagttctcaaggctggaaagagcgcaagcggcgccaaagcagcagcatcccacactggctctctggctgggagttatgaaatctaccgcgcggcgttcaagcaggcgggagcgatagaggtcgaggagatggaggagctgttcgacgcggcgaaggccttcgaaatgtaccagagagctggaaagcgcgtggccgttatcactaactccggggggccgggtgttctggcaaccgacaagctcgagaggctcggacttgagatagcgaagctggaggagaaaacggtcgaggagctccgctccttccttccccctcagtgctcattgaagaacccgatagacctgatagcagatgcggactacgagcgctataggaagactatcgaggtcgtctgcaaggatgagaacgttgatgcactcctcgttatctgcgtgccgccgatattcataccaagcgaggagatagcgagggcagttatagaggcagagtgcgacaagccagtgatagtgaacttcatggcgggcgagctggttaaggaaggtgtcgaactcctcgatgagcacggcattaaaaacttcccgacgcccgagagagcggcgagggcactgaagtggctctcgatgagatagcctgttctgggcttccaataccaaacccttttataccctctccttttagcatgccttagcatgatagcgctcggcatagagggaaccgcccacactcttggcataggcatagtgaccgaaaagagtgtcctcgccaacgtatttgacactctcacaacggaaaagggtggcatccacccaaaggaggccgccgagcaccacgcaaggctactgaagccgctcctcagaaaggcccttgaaaccgctggagtaacgatggaagacgttgacctaatagcattttcccaggggcctgggctggggcctgcactcagggtcgttgccacagcagcgagggcgctcgcgataaagtacaacaagcccatagtcggcgtgaaccactgcatagcccacgtcgagataacgaagatgttcggcgttaaagatccggtcggcctctacgtgagcggtgggaacacgcaggttttggcattagagggcggccgctaccgcgtctttggagagacgctggacatcggcatagggaacgcgatagataccttcgcgagggagctcggtataggctttcctgggggacctaagatagagaagctcgccctaaaaggggagaagtacattgaactgccctacgctgtcaagggcatggacctgagtttctcgggcgttcttactgaagccgtcaggaagtaccgtactggcaagtacaggattgaagacctcgcttactccttccaggaaacggccttcgcggccctcgtagaggtcacagagagggcagttgcccacactggcaaagaagaggttgtcctggtcgggggagttgcggcaaacaacaggctccgcgagatgctcaaaatcatggctgaggacagggggattaagttcttcgtaccgccctacgacctctgcagggacaacggggcgatgatagcctacacaggcctgagaatgtaccgcggaggggtaaggttcaagattgaagacaccgtagttaaacagaagttccgcaccgatgaggtggaagttgtatgggactgatagtaccttggctcgtttttgtagccgacgttatactcttcctcgctattgggtatgctattgtattccttataaggaggctcaacaaatacggagaccctcagttgaatgctttcatcaagtggtcgctagttttcctcgtgataggggagattggtagaataaccgacttgattgacgatttctgctgtgctagctcgttcgatacccttcagtatgttacgtatttcatctccatcgtcggcattatatactctgttatccactacataaagcttgtggaaatgaaatacttacctgcagtaaagaaagttccaaagctaaagagctcatttaaggcccacatagtcttttccaaaaacagattgctcgacgttatagacgtcctcaaggagggagacttccccgttcttgtcataacgaggtcccctgatttttattcggggctcaatagggagaacgtttctgccatatgggtcacgcagagcggaaaaggcgtcgcaccaaccgccctccacgttcttcagggaatcatcctcgatttcgtacaggaaaatccaggctcggtcgttataatagactgcctcgagtacctgatgctctacaacgacttcaaatcagtcttcaagttcctgtccgcgctcaaggactacgtggtgattcagcacggctcgggtctgatagtcttcgtggatgaagaagtgctgagcaaccaggagagagcactccttctgaaggagttcgaaccgctctaaaacctgctctttatcttcatagtgtacttgggatatatctccctgttgaagcgcacgaacttagtttttcttggcgatctgactatcgttatctctgtttctggcgagaggtacgtgtaaaactgtccgtccactgaaaggattacctccctagtcatggcaacgttcctgacgtctatcctgctggaggacggtactaccatgggccttgagctgagggctatgggagctagaggggctatcacgacaacgtcaagcctcggatcaacgaaggggccgcccgcgctcatcgcgtatcctgttgagcctgttggagtggagatgatgagcccgtcggcgcgaacctcgtcagccagaccgccgtcgatgtagtacttcaggtgaattatcttcccaggaatcccagtaagtactgcgacctcgttgagagcatcgggaactcggttttctccgtcaaggaacgttctcagctttatcctctcgtctatgtggtagtctccctctataaccctgctcagggcaaaaaaggtctcgtggggttcaacctccgtcagaaaaccgagggtgcccatattaatgcctaaaatcggtatctccttctttgttttgtgctccacacggagtatcgtaccgtcaccgccgataacgactatgatgtcgacatcaaactcctccagggggagaacgtcgtcctcactgaactctccaaggtacctgtaggtgtcctcatccaccacgacatcaaaaccactaaccttgaggaaatcgtaaaccctgtaggccagcttcagtgcctccaatttgtctctcctggcaacgacaccgaacttcatcgaaccaccgagggcacttctccttaatccttggggatttacctaattaaacctttctttttcctgcggatttttgccccgaggtgggtcgtcgccagtgcccccaccgctgtcggtatccagtaggagatgagcctgtcaaggagcgtagcggtgacggcgtgctctttctcaatcccaaggagaacgtaggttgctgaattgaccgtctctatgagacctgcccctccaggaatcacgctcaacattccaactaccatcccgaccatctgaacgacgacaacgtccgcaaactttatggaataccctatggcgaggaaagcataatagcccctaacaacgacggttagccaggagagtgtggagtacacagtggcaagtaaaaaagccctcttgtgggtcatgagaaacctgaaatcgttctggaagcggggaacgtctacttcaacaactctctcaaacttttcgcggtacttttcggccaccaacggcaggaagcgctctacaagcctgaagaaccagcggagcgcccccttggtcttcctctcgcttagaaggattcccagggtgaaggcaacaagaccaaaaaacacaacatccaggaaaatcaggattatcgccagcgaccttgaaccaagggaatagacgtacgcggtggcaacggcaagcattcccaccactggaatgaggtcaagtattctgtccatcatcaccgtcgcgaacacagggccgtagggcatctcaatttctttggccagaaaatacgtcctcactggctcccctccgcctcgcgccccgggagttgcgttgttcacgaagatgccggccattaaggccattaagacctttgaaaacggagcgtccatattgagggcatctatcagaaccttccatctcattgcccaagctaagaggcccaggatatatacaaaaaacgcaagaacaaggtacttaatacgggctccctttagaatggcaattacttcatctaccccagcccaccagaggagagcggcgatgattcccatcgcgaccccgaaaagtgaaacctttttccagtccatcctcacaccttcctgagcttcgctataaagaagccctgagtcaggtgcctgttcggataaaacctctggacgccctccatgtcaattccgtgggatgctatgaaaacgctctgctcttcaagcttcaggcctttctggagcatgtacttcacgttggcctcgttttcctcgtagctgattgtacaggtagagtaaaccagcgtcccccccttccgaagggactttatagcggcccagatgaaggccctctggtatctcgcggttgcctcaatgtcctttggcgtccgcgtctcccagagcttgggccttatgccgagcgcggtgcagggggcatcgaggagtatcttatcggcttcaatcccaagctcggggagctttctagcatccatgtggatgagcctgacgttcttcacgccgagcctcttaagttcctcctccatcttcctcagcctgtttctggacttgtcgatggctattatctcccccctgttctgcatgagctgggctatgtgtgaggtctttcctccgggggccgcggccatatcaatgatgaggtcctcttcactcggctctaggactcttgaagctaccatcgagggcaggctctgggcgtaaaagagaccctctttgaaactctccagctcgctcaaacttgggagcttgaacttcggcagggttacctcaaccgccagtcccctcgtggcggttatcatctccttcccgctcatcctcgcgataccgattccgaccagaagtcctctcggatccctaatttcgacctcgtcgccgggctttatacccttatcagccttcagaactcccggggcgtagagcattgctccctgatagacactctcgctggcaaacttgttcgcgacaaccttcttgaggcctggatcgtaatcatcatcgaagttcggtccttctctttcgaagtaaatcccctcctcaaggtaaggactcctcttgggcttcaaaccttctctcctcagccgcctcatcagctcgctcctgctcgtctttagggtgttcaccctgatgtagtacttctcgactggagttctcaatgatgccatgatctcttctgcctcgctcccaaagagctttctgtagtattccctgagctcggccggaaaagcctcctcgtagcccatagacacacctcaaaggtcaaagatttcaaagcgctttccgagttctataaccttgaagagtccctctttaagcttttcaacatcgtcaaagttggcctcgaactggaagaccttttcggagctttcatgtattctcttgatgatctcctccgacaggggactgtccctcatgcagttgtagacgtcgttgaggaagtcctcacttccgtagatgaagctcttcggaaaggcttcgagaaatgcctcaagaaagtcctcgctaatcttctcttttggaaccgcaacgacgaagtaatagctttctggagttgcgccaacttcaatctggggcttcacttcaaaggcagggtggggatagagcatctgcctccactcgccgtcaaggaaaaggtacgctccaaagacctcctcaacgtcttccaccttaaagccgaaccttgggagttcctccttgagctcctcgttgagcgtgaatacatcctcccagagcttgttaaggaactcatgaacggctctcacgtcaaattttcccctcatgctctcaccaaaaataaggggagaaaagcggtttaaaagtcattccctaggagaaacccccgaaagggcatcgtttatgctggccattatgtccgtctgtattactatcctctcacttgtaagatttatcctggcactcttaccgcccgagctcactgttatgtagaagtttacctcaaccgagctctcctctccgttctttatgtgggctaccagaaccgtcggaaggtactccgaatatatctcagtgtcaattggaaccgtcgcaacgcctccagccggtatcgtaactccctgactgatgtttccaacacctacttttatgccgtttacagacacctcgaactcaaggtttgagactggaatggggaatgagttcggattcttcagcgttgcataggtcttcagattccagacgccgttctcagcccccagccaaactactttcgttccctcaacggacggggtgtagaggagaccaccaaagatcggcttgctctcggctttgaagtccatctggccgaggatgtcctgctggaattccctggagaaagtgagcgtggagtgaagcagaccgaaaagccccagcttggcttcgacgctgagctcaccgtgctggttgctctcaaagtacctttcgagtgcccttactagttcatttgggtcgatgcctatcacgattcttgcgtttgatttcgtgggtgagtagtcaaattcctcaagggaagcgacttcaacgccgttgaactgcattgaaaggctctcaacggaagccgggacaaggagagcctttccaagccccgcatcgaccactacctcaaccttctcctcgctcacgttgccccactctgccgtaaggagggggttcatagtcatcacagcgtaggcgacgtaagctccccacagggccagaatcagaactatcaggataacaatcgcgacggctttcttcatgactttcaccttgtaatccaaccgccttaatccttataagcgattctacccgccataaagtaggtgattaaatgggctggctttcatcaatcttctgggcgttctggtacatacttcccgcttacttcgccaacgcatcccctgtcctcgttggaggcggcagaccaatagacggtggaagggtctggagagacggcaggaggcttctgggagacggaaaaacctggaggggattcattggaggcgtcctgatagggactctggtcggaatagtccagtacttcataacccctgatttctacggaagccttgagactgccgtaaagctcgcatttctcctctcattcggcgctcttatcggtgatctcgtcggaagcttcattaagaggagagcaaacctcccgaggggctatcctgctataggactcgatcagctcggcttcctcataagcgctctggcattcgcctaccctgtaaaaactctttccagcgggcagataatcttccttctggtcgtgtccccgttcattcattggggggccaactacttcgcctacaggatgggctggaagagcgtgccatggtagagcttcacaattttatcctggcaaccctttttaactccgccttctattttatcccggtgatgaaaaggtgagaataaaagtcagatatttcgcccgctaccgctccctcgtgggcaagagcgaggaagaactggaagttcccgatgggataaccgtgagggacctcattgaaatcctgaaggagcgctatcctgtccttaagaacgaagtttttgccgaagatgacgaccttgccgatgtcaacgtctccagaaacgggcgctacgtaaggttcgacgaggtgttgaaggatggggatgtaatcgcgatattcccgcctgtaagtggtggttaacatgctgaccgagagagaacttgagaggtatgacaggcagataatgatattcggagaggaagggcaggaaaaactgaagggcgcaaaagtcgcagtcgtcggtgttggcggcctcggcagtcccgtcgcgtattacctggccgccgctggaataggcaccgttctcctcatcgacgaacagacccccgagctgagcaacctcaacaggcagatacttcactgggaggaagatgttggaaggaggtcaaagccggaatccgcaaaatggaagctcgaacgcttcaactccgacataaagatagaggcctacacaggcagactcactgcagagaacatcgatgaagtccttaaggacgttgatatcgtggttgactgcctggacaacttccagacccgctacctgctcgacgagtacgtgcacagaaaacgaatcccgctcgtccacggcgcagtggaaggcatgcatgggcaggtgactacgatagttccaggcatcacaaagagcctcagggagatttttccgaaagttagggaaaaagaggagaagttcccgataatcggtgccacagctggagtagttggttcgatacaggcaatggaagtcatcaaactgctgacgggcattggagagcccctgttgaacaagctccttctgatagacctggccatgaacatctttgaggtagtggaacttaagtagtcggaggttccacttcccttttctcgtttattgaggttattctgaccgtgctcttccaggttccagtttcaattacctcgatatgtccaaaggcatcgtcactagacatctttgcaaccagtgagtaagctagctttatctggatgattgtaccgttggcgacatggatctcaaggactgcatccgttatcgtcacgtttgaatcgcccggactaagatatgcctcggctaagggaaggataacgtcctccgatagtgagtacacgaaaacagtagtcccgttctctgtgtacttggcgagcggttcttcctggataatggcctcaactagtctaagaggatgggaatcccatagggtcgtgaagttaatctcattgactccaaagctggtctttatgtaagtcttgttccctattacaatctggagcatattctcagtcagattatctgggagaattgtgatcgtggagttaaccagagcctttcttcccacagtatcaacgtatccattctcgattatcagcatgctaacgttggtattcattgtgatgttgccttcggttgtggtcacatcaagcttcataagggcatcctgatgatatgagtaggtttctattttcccgactatgctttcaaggtcaacgtctccggtttctctattagaagacgaggagtcgatgccagtgttcgtttttgtactatttatgccactggtatgcattgagtcggcggtttcaggtttagtatcggtcgttgtctctccccccaagcaaccggccgacgcaacgattaggatggctattaaaagccccaagaccctttttccattcatgctcttcaccccttgaattctgatttccatccatcggtaggtttaattgggtttcggacaatgacataacggggtgatttccgatgaaagtcagactcaccaaagataaattcagcgttgatgaggcaatttccctgctccgagttccagagtccggcgcttacgttgtgttcctcggccaggttaggaacgagaaccttggaagaaaggtcgagaagctcatatacgaggcttacccagagatggccgaagcagagatggagaggataagagaggaggcactcaaaaagttcccgattctggacatggtaatatggcacagatacggagagcttgatgtcggcgaggacacaatactgatcgtggcgagtgccaagcacaggaaggaggcgtttagggcctgtgagtgggcaattgacgaggtaaaacgaagggtcccagtgtggaagaaggaggtcacccccgaaggagctttctggcttgagggagacaaggctgttagggagtaattttccattttttgcttactttttctagtagtttgcaaaatcggaatagataaagtatatatactccgaagcaaatcttttttcggtgagaatcgtggagagggttgagtcgattgccaccccaattagcatgaccaataaagtcaagaacgtaatcattggcaaacctccatggagcaataagaagcacagggggaagatagagaggctcatcctccaacttggcgcaggaaagggaaaattttcagaggttaccggaattccgaggtcaattgggtgcataggaaacaaccggttcatcctcagaagggagcctttgagcctggaggaattcaaaagggctatactcgagttcaggaaaatgggcggtaaggagctctggctaaccaactacgatagcattgaacctctgatggcgctggctaactttgcatctgaaatagaaatccctgaagtttatgcggttgttaggttcgaagacattccaaagattacgccagcagaagagattcgcttcatagccgagataaagtaccctgacgtcggaccagaggaactgtccggctatccatggcttcacggagttctggctgttgtggatccagactacctagaggatgttacaagagagagctttccaggggagctatacgtggacgtattatatccaggttccgttaaaaaaatcagctttaacaccatagaagtcagacgcatactgaacccgaccacggaggagtaccacgactgtctcgctggaacagtcgcggttacggccgatggctacgtactgccatgtccattactcagaaactacatcgttggcgatctgaaaaaagagagcctcaggaaggtaacccgcagaaaacgcctcagggccttctggagaatgaccaaggataacatacccgcatgttccagctgcccattcaagtacatctgccatgactgtagagcacttgagtatcaagctactggtgaaatagacggacttgagtactgcccactcatcctaatgaggctttaaaactcaagtattgatctgtagccgctcccgtcttttttcaccattctctggaaagccatcctggaatttctgtcgttaagctccttgaaggtcggatcaaagtactcaacaaggattttctcaacgtacctgctgaactccaagatttttgaacccatatcctcctttgaggagaagaaccactctaagatatacccctctcccgggagcacgccaacggtaatctcatagtcgttgaatcgtttaagcacctcttcgtcaagctctttcgcgattccgataattcctcgatccgagacattcatgtcggggagaggaacaaaattaatcagtatgcccttctccttcaggcggtttatcatgtacctgacggtgggccttgacttgccgagtttttctgcaatttcagtgataggtgttcgagcgtcccacttgaggatgtccatcaggatggcatactcatagccaagatcccagtccccccactcatcgggaagttcacccttagtgtacgccctaacctcatagtactcgaagtcatctgagtactttccaagcatttcatctataagatccacttggtcatgcggaacctggaaatataaggacaaaccgttcttaaagccaaaagccggattcacatatttaataaaggggttcttggttagctgtattgcagtctcaagaaggctctcaggagaaaccgcaagaaaagcaacaaagctcttgagacctataattcttatgttgtaccttgcgctcacagttaggtatttaccatagtacttgtcatagatgcgcttaagcttgtaataatctaacccctcttcccgggctatgctcctaaggctttccagggggtatttgctcagcagctccaccaaaaactcgatctcttcaagctttacttcccccatgttcaaacaccaccgacccagaaaagttatattatccgacaattaaaaactcttctggtgatgtcggatggtcaggatagaggtcgttgacatagaaaagcccgagggggttgaggtcataatcgggcagggcaacttctcgatattcacagttgatgacctcgccagggctcttctgacggcagttccggggataaagtttggaatcgcaatgaacgaggcaaagccccagctcacccgcttcacaggaaacgacaaggagcttgaggagctcgcagccaagaacgccgtgaagataggggccggccacgtcttcgtcatccttatgaggaacgcattcccgataaacgttctcaacaccgtcaagaaccacccggcagttgcaatggtctatggagctagcgagaacccgttccaggtcatagtggccgagacagacctcggaagaagcgtcctgggcgtcgtggacggcaaggccgcgaacaagatcgagacggaagagcagagaaaggagcgcagggagctcgtcgagaagattggctacacgatccactgacatcaaaccttttatgccgtttctccttctcttttcggtggttgcatgaggctggcctttgtgacgtctaatcctggaaaggtggaagaggcgagaaagtactttgaaccgctgggagtcgaagtttaccagctaaaggtcagctacccagagatacaggcggacaccctcgaggaagtggccgagtacggggcaaaatggctggcacagagagtagatggacctttcttcctcgacgattcggggctcttcgttgaagctctaaaaggatttccaggcgtttactccgcctatgtttacaaaacgattggataccaggggattctgaagctcctccagggtgagaagaaccgaaaagcccatttcaagagcgtgatagcctactgggacggcgagctacacatctttaccggtcgcgttgacggcaaaatagcaacggaaccccggggaagtggcggcttcgggttcgacccgattttcatacctgaaggcttcgacaggacgtttgccgaaatgacaacggaggaaaagaaccgcatatcacatcgcggcagggcgctgagggaatttgccaactggctgaaggaaaaccttaaataagtagagacttcaattagtccagatttttgttgaacaaatgacaacggggatagcgatgacgggaggattggatgccatagacgttaagctgcttaacgaactgaaggagaacgccagggagaacatagccagcctcagcaagaagctcgggatcccgaggaccacagtccactacagaataaagcgcctcgtggacgagggcatcatagagaaattcacggtgaagccgaactacaagaagcttgacctggggactactgccttcatcctggcccgctacgaccccgattcaggcctcacccagagggaggttgccgagagaatagcggccctcgatggtgtctatgaagtccacataatctctggagaatgggatatgatgataaaggtccgtgctccaagcgcagaagaggtaggtaaaatcgttgttgataagttaagggagataaagggaatcggacagacggttacaatggtctcgttcgttaccgtaaaggaagaactttgaaaatagagggcgatgatcggcgttctcctttctgatttgtgatgatgcgaggtttggtgagccctacataacgcagcactcgtagataatctcaacgtcccttatcccttttgcccattcgataacttttctgggcggattcgtcagtctgtcaacgcctgttaagattgcccctctgtcaaactccaacctccatcttccgagaggtctcatacagcctatgctcagctcgccatcgaacatctcacgcgcgtacttaacgacttcaaggctctcctcgacgctcggctttggaacgttctccatttctgtgccttttgttggaattagaacgtcgagaacgagcacgtctatcggatattttaccagcatgtctatggctttgtactcccagtgaatctttccgaaatccaaacctatcgttatgtgcggtgcgactctcacaccggcttcagttagaatgtcaagaaccctcagatagtcatcaacagtcttgtctatcttgtaaacgcgccttatcacgtcgttgtcaccaacgaagtcaagggaaacgacatcaacgtatttaacccactccaggtcgctctcatcaataaaacccacgtgggcgttgagcttgaggttcgttctcttcttaatttcctttatctcgttagcgtagaagtcaaggggaaccttcaggcgtccatccatgccaccgctcaggagacagccgttgtaaccctcctccgctaacctgaggcagtagctcaaaagttcaccacgttcgggctttctcatgccttcgaggtagtgctttccgcagtgggcgcagtttaaagcacaggcgtttccggtgagtgagactgaggggaatttaattcctgggaatgtagattttgagctttttcttgggttctgccatttagctcacctctaaaaccggggggttgtagggggcggagccccctctggcgttcaaaaaagaaggaagggtctgggaaacgcagttttccggtttatgtggggcgaagccccactttcggggggagggggttagcaaggacgtggggggtgaaaccccccggtcctgcgaggggaagttgattctgggaatgtagattttgagcttttttcgctccattcttaccctccagaaaaggacagtgtccagagaatataacccttttgggacaaaaatgggaaaagaaggaaatcactccttctttgcacctttctggctcttgaacagcggccaccaggccttctccccaaagaggctcatgaaggctggcccaatgaagtacactgccataacagctgtcaggaggattcccgctgagagggcaaagcccatctccctcgttccccacgtcgagctgagcatcagggcgccatatgtgcttgcaaggactactgcaaggcctatgacgagcatgtccatcgttcctgccgcgactatgagggcttcctcgggcttcctgcgctcgaactcgtccctggccttaaccagatagaagctgttgtagtcaatgccgactcccatgagcacgacgaagaccatcagcggcaggaaccacatgacttcttgattgaagaccttgccgaagagccacgttgatacccagatgctcgtcatgacgcccatgaagatggtgatcatcgtcgagacgaccgccgggagtcccttgagcgtcgggattagcgacaggaacatcagcaccagcgccactgggattatcctgtgccagaagatatcgttgattctgtctgtgaggtccattgagagcgccgctccaccgccgacgaggccctcccttatcttgccctccttctcaagctcggccatgtaactcctgaggccctcgacgagctccttcgccttctcgtcagttggagcgtagaccgggtcgatctgtatcatgaccatggtaccgccctttgagatgaacctgtccccaccgagggccttgattgctgaaagcgtgaggttgctgaccggctcgccgtagggtctagttggtgaatagacagccttaactccctccattcccgctatgtgggccgttatctcgtcgatcagcttaaggtcgtcgtcggtaatcttgtgtccaatgtctatgatcacgtagttcggcgaagttatcgaggcaccgagcttctcctggctcagctccatgaaggtgagagtttcactgccctccggcaggaataggcttatgtcgtgggttccctcaaacgtgaagaacgtgtacgttgccggaaccgctatgagcaggccaatgaggagcactaccttggcatgcttaacgacccactcggctattctactcctctcgtggacgtccatggtttcaatgtgcttgatgtgcctcggccaccagaaccagctcttatcgcctatgagtgctgttattgccgggatgaacgtaaggctcgctactaggacagtaacaacggcaagcggcgcgattatgccaatctgctggaatatcgggaactcccatgccagaacgaagctggcaaaggctatgatgtctgtgaacgcactcgcaaggactgcatccttagccctcctaagtgcctctgcgaccgctttctcgtggtcgtagccctcagcaatgtactccttgaagcggtggacgtagtaagtcgagtagtcaattccaagaccgagggctgtggtgatcgtcagcatctgtgcccagcttccgacgttgagtatcccgcccttggccaggaggtacgctattccgagggccgtgagtgcagacgttgcaacacccgtgaacggaaggaacgtcgccaggagggcgccgcccatcaggatgaagagcacgatgagagcgcctatgatgctcgcctggctcgtcttctggttgtcttcctggccgtacttcgtcatctcgtgcatctggacgggggtgccaccgagggcgcctttgacctcagggaagtactttccgaactcctcgagggccaccttcttgacttccgtcgcgttctgggcgagatacctgaattcatcgccgctcggacctggccttccaaacggtatgaaggttatcaggagcgtagtgttgtcgtcgcttttgagcatgctcaggtaggttccagccttttccttgacgattggccagagctgttctgcgaggggcttgacatcatctttcgatattgcctgggggttgtccttgaacttgaaggcgatgtccacgagaaggtcctggtcaaagttgaactccacaccgtaggggttgttctttgcgtattctgataccatggacttaacggcgtccttcacaagtttttcgagctcttcctcgctcatcgggtagttctggatgacctgctcgatgaggttgttcataacccccgcgaactcttcaggaatttcctggcctgccatctgttcctgcattcccttcaagaacagctctctagcgagctctttcgggtccgcgccgttgtagagagctctgaccagcttctcggtgtcctcagtcttctgcggggatagggcaagaaccacactgacagttgcatcttcgagtttttcgccgcttattattccataggggtctttgacgacctcgctcaagatgacctctgcaagggcctccgggtttggagcgaggccccccatctgctcggctatttgggccctgagcatgttccctgccatggtgtcgattacggtctcgctaccaccgctctcgtagagctggaagagaacttcctttggaatctcgaatggaaggggagctccagcattcgttatcatgccgtacacgagttcaaccgtcgtgttttcaagcagcccctcgtcggagaggagcgttcccgtgcagtaggggtcggcggagacaaccgcctgcacgaccgcaggaacaatagcctgctgactctcgggaaccttgaccatcagttcgttctggagtgcctgtgccctctcctgggctgtcatgttcgggttctgggcgcagagctggacgtagatgccgtcggccatctgaagcagtcctgcagtcgcgttgagctgggtgtaaagggacgtaaggttgttcttaagggcaacgtatccccgggctgttccgacgaggctggtttttaccatatcagttgtgttcttgaggagaagaacctggttgagggccataccatagccatcgtgggcgcctttgacgctcgtgtagagaagccccgttatgttggcggtcatccttgttacgttgagcgtgagctcgtagtccatttcccagagcatatccagggcatcgtagtaggatgtaacgttggaggcgtacttgccctcaacccggtctttgaaagaatagtaggccttcctcgcgttttcatcgttcacgttgatgttcgtgatgagaaggtacgtgaggttgtcgttctgtgctcccgtgaactcctgggccattaaatcctgaactttgattgactcgatttcgtgggagaccatctgctccgtactgtaatcggtaagctcactcagttttcctgcgagcggcgccatgaggactatgatgactatccacgccgccagcacaatcttgggatgtttcgctatccagtcgttccacgccattgccaccaccccaacctttttaagaggttgacagttatatgtcaatagtaaatctgtctgattcaaatatgtttaatccaaacatatgtggcggaccctgatttataagcctttcgagggcggtgagcgtatgttgcccgaggagaaaatagtgagggacatgttcacggttccaataaagaacatgatactgctgataatcgggcttagaggagagacgcacggctatgaaatcctcaaggagatagagaagatagcctgggggatatggaagccgagtcacgggaacctctacaccatgctcaacaaaatggtcgaggagggccttatagagcccaaggaagagtaccagggaaggaggaggcgcgtaaagtaccgactcaccgagaacggctggaggtggctccaggaggccaatgagctggcccttaaatccctctacgtggccatcgagtaccatgaaagaatgaggaagaagctccaggagaagggctacagcaggcaggagttcgaaagggaagcgattaaggagtaccttaaaatcctcgacggcataatacaaattctcgaaacaaagagggaacagctgagaaaaatgctggaagaaggagaagaagtcacaggaacgggttcctgaacttctttccaggatagaccgctattccctcaagctcctcctctatccttatgagctggttgtacttggcgttcctgtcgcttctggccggggcacccgtctttatctggcccgcgttgagggcaacggcgagatctgctattgtcgcatcctccgtctctccgctcctgtgggagactacaactccgtagcctgctctgaaggatgtgtaggcggcatctatggcctcgctgagggttccaatctggttgaccttgaggaggagcgcgttcgcagcccccatctcaatacccttccttatcctcttcgggttggtgacgaagaggtcgtcgccgacgatctgtaccttgctaccgagctccttggttatcatgacgaagccttcccagtcctcctcgtggaacgggtcttcgatggagactatcgggtaggtcgtgacgagctcgcggtagagctcaaggagctcgcccttgtcgtactccttgccagcaaccacgtacttgcccttctcgccgtcgaagaattcgctggaagcggcgtcgagggcgaaggctatctcgtcgcccggcttgtagccggcctcctcgatggccttgatgagaacatcgagcggttcagttacttccttcatcggcggggcgaagccaccctcgtcgccgacgttcacggcgttccttccgtacttctccatgatgaccttcttgaggacatgataggtttcggatacccaccttatagcctcgcggaagctgtcagctccaacgggcatgatcatgaactcctggaagtcgagctcgttgcccgcgtgaacgccgccgttgatgacgttgctcatcggaaccggcatgacgtaggcgttggttccgcctatgtactggtagagcggcagtccaagggcgttggcggccgccttggcaacggctagagaaacgccgagtattgcgttagcaccgaggttgctcttgttctcggtaccgtcgagctcgagcatgagggtatcaatgtccctctgccaggtgacgtccattccgatgatctcgggggcgattatcttgttcacgttctcaacggcccttctgacgcccttcccgtggtacctgcttccaccgtcgcggagctcaagagcctcgtgggttccggtgcttgctccgctcggaacggcggccctgcccatgcttatcggggtgtagacctcgacctcaaccgttgggtttcccctgctgtcgaggatttccctcgctataacgttggttatctcaaacgggttctccatgctaatcacctcgggtgatatttttcgttccctcttataattctgatggtcaaaatccaggggacgaatttttaaaatgctaatttcacctgattatcaggggtaaacaagatgaactggaaaaagcaacttcgagaggatggctacctagaaattcaaggtttcagaatagagctcacgctcgacaatactttcctcgacctggattacattccacgaataatcgtgtacgacgaaaaaacttcccgctggtacgtcctcaggaaccccatacccaaaggaaaaacgttggaagagaactgggacaacgcagttgaagtactggaaatgatcgttaagggggagatcgagcccaatttgggcgacgaagatgtctcaaacagatttctaagggtgcttaagaggaatttgttataatcttccggaactacgcatttttgatgatggagtactcatttttagcgggaaaaatcctaaatactgtaatgaatctaactttaagcagggatgtaagatgaacaagagggagattgcacggtatattgaccaaacgaacctgaagccctatgccaccaaggaggacataataaagctctgcgatgaagccattgagtacggtttctacgcggtctgtgtcaatccttacagagtcaaactcgccaaagattacctgagagagaagaacgccgacgttaaggttgcgagcgtcataggctttccgttgggagcaaccccaacggaggtcaaggtcttcgaggcaaagagggcccttgaagacggcgcagatgagctcgacatggtgataaacatcggcgccctcaaggataaggactacgagtacgtaaagaacgacatagcggaagttgtcaaagtcgcccacgagagaggggccaaggtaaaggtaatcatcgagacctgctatcttaccgaggaagagaaagttaaggcctgcgagctggcgaaggaggccggcgccgacttcgttaagacctcgaccggcttcggaacagggggagcgactgttgaagacgtcaggctgatgaggaaagtcgttgggcccgagatgggcgttaaggcagccggaggaataaggacgtatgagcaggctcttgagatgatagaggctggagccaataggattggtacctccagtggagtaaaaatagtagagggtgcccccgatgagtgagatactcgaagtgatagagaggataataggagaactgagatccgaaggaatgaatcccaacataatgctggcgggcccgcagttcatagagtactcaaaagatgcactgaagcagataaacctcaaaatatacagaattgaggagcttggctatgatgcagtcatagcagactccaactatctgggccagataaagaaggcatcaagaagagtttccgttgaacccataatcgaagaaaaggaagtgtggaacgagattaaaaacctcgacgtctaaattagtgcctccacttctggatatctcttttttattgcgttcgtgagcagtgttcctacgataattcccgtaaccgcctgaaggagattccccggtacttcttcaagcgcggccggaactccgaaggcgtaggcctcaaagaggaagtaacctgtgaccatcaggagcccgcctattgttccaccaacgatgagccctgagttcccctgcattctcttcgccacatatcccaccacaagtccctcaatgcccttgacgaccaaggttataggagcccatccaggatagccacccatgacgtcgccgagtgccgaaccgacaccacctgcaaacgctccaataacaggaccaaagagcatcgccgtgaacatgaccatggtgtcgccgaggtttatgtagcctccagttgccggcgttgggactttgatgacgtttgtagccacggcaacgagcgcggcagcaatgcctgctatggctattgtgttgacgctcttgaacttctccctgttaacccagatgtaagccagaaacaccactatggctacgaggaaaacgtagggtgtgtagtgggcaagctcgcttattatatccgtcatcttgcatcaccagaataaaaaaatagggggaagttaaaagctttcacttcagagccgctttgagggcctcttcgaatatctccatggcaacgtcgatctcttccttggtgacgatgagcggcggtatgaagcggatgctgttgtcgccgcatccgaggaggacgagaccgcgcttggccgactccttgacgatcctgtccctcagctcggggtacttctccttggtctccttgctcttgacgatctcgactgcctgagcaagaccgagacccctggcatcgccgatgacctcgtacttctccttgaactcctcgaggtacttgtggaggtagtctccgacctcctggacgtgcgggaggagctccttgacgatctcgacgacctctattccagcggcaatggcaaccgggtttcctccgaaggtcgtcgcgtgcctgccgggcttgtcaaaggttatgtccgccctgtggatgacaccagccagcgggagaccgccgccgatggcctttccgaactggatgaggtcaggttcaacgccgaagtgctcaatggcccagaactttccggtccttcctatgcccatctgaacttcatcatcggcgaggagtattccgtactcgtcggcaaacttcttgagggccttgaagaagcccttcggcgggacaacgtagccgccctcaccctgtatcggctcgaagaagatagctccaatctcgtgcggaggaacgtgcctgaagacgtactcctcgatgaagtcgagaaccctgttggtcagctcgtcgggttcttcgtaaccgtcaatgccccaggtgttcctgtaggggttcgggtaggggatgtgggtaacgcccggcatcgtcgggaagaagccgtcctgctggacccacttgctggcggtaaggctgagaaccgcctgtgtccttccgtggaaggcgtggtagaacgctaggaactgcttccttccggttccgtacttgacgagcttcatggcagcttcgttggcctcggcaccgctgttgccgtagacgaccttcctctcgatgtcaccgggggccagctcgatgagcttctcggcgaggattatcgcgttctcgtagaagaagtctgtcagcgagtagtgggtgaacttctcggcctgcttctttatggcctcgacgaccctcgggtgggagtggccgacgtttataacaccgacaccactcgcaaagtcgtagaagacgtttccgtcaacgtcatagacccttataccctcaccgcgctcgatgactattgggaggttctccggatcctgggtcgtcatggcaaggtacttgaagttcctctcaataacctccttagccttgggcccggggagttctttaacgttcggtctaaccaccatgcgcatcaccggaggaacgttgtccttcccctatataagcctgtgttcatcaatgaacatttttgaccgaagatttttcgagaaatatccagagctaaacgaagcaaacatttgagaagtaagaaaaagaaacagtaagatcactcgctgttcttattcttccactcttcgaggaattcctttgcagagttagctgctattgcgccctggccgaccgccaccgctatctgcttgaagacgtttgttatgtctccagcggcgaagattcccggaaccttggtgcgcatgtacatgtcgaccgggatgtagccgtactcgtcggttatgccgaggtgcttcacgaagtcggtcttcggctcgtagccgatgaagatgaatacgccgtcgacctccatcacggtttcttctcctgtcttaacgttcttcagcctaaccgcctcgaccttgtcctttccgatgatctctgtaacaacagtgtcgagtatcgcagggataccgctctccttgaacctgtcctggagtatcttgtcggctctaaactgctgcctcctgtggacgagggtaacgtcaacgccgatgctcttgaggtagagggcctcctggagggctgtgtttccaccgccgactactatgaccttcttgcccttgaagagcgggccgtcgcaggttgcacagtaagaaacgccctttcctgtaagctcttcctcaccaggaaccctcagcttcctcggtgcggcaccgacggcaatgataatcgtcctggctttgtattccttcccgttggcggtcttcacggtgaacttgcacggcccctcgtagtaggcgcattccgctggatcgatcctcaccacctcatcgaagataacgtcaacgccgagcttcttcacctgctcgtgcattctgttggtcagctctgaaccgctgatcccctctgggaagccggggtagttctctatgaggtcggtcaaggccatgtttccgccgaggtctttgcttatgatcagtgtctcaaggccgtagcgggcggcgtaaatggccgctgtgaacccagctggccctgctcctatgatgagaacgtcccaggtcttcttctcgtactccccaccgcgcgagaatcctccaaggctgaacatttttactcacctccgccatccactagagtggacaatttaaaagccttgttccacaaaagtgtgaactgaaaaacgaaaattcagacgagtttcagggaaccgtcgaggagtaagtgcagggtgtagcccaggaacgcggacagtcccacatagatagcttccccagtgctcattctaagcccgtattcaacgagcaggaaggccaacagaccgtaaacggccgcgaagaggagagagtggacgatccccctgtggtgcggcatcagccaggtgaaggcgtaccatccaaccaaagcaccaacggctccgatcacccaggccgcgacaactgaggcccattctgggctgatgttcacccatccagttgcccataagtaaacagcgcttcccactgcaacactgactatcggctttgatcccctgtgtataagggcatcggggtggtctaggtctgggagatcgctcccaaggacgtaaaaggcatagccgagcatcatggaagttgcagtaagctccagcggaaccccaagatagattttgagaaggaaacctacgaggacggccaccggataggtaactatcccgctgaggacgtggacatcgtagttcggcattcactcacccctcagcttttcggcctgtccctcttctaaaaactttctgacatagtcaggaaccttgtagctgccgttcgggtctccaacgagaaagccaagcctcacgagctcgttgaggctctcataaacctgcatgcccggcttcttgaccgctttggccacttgaatataactcacagggcctcctttgaactcaaaaaccaccgcctcaacgaggtccttgtagtcctttggaatcctcatcaggtactcctcaaggctcttcggctcttcgaggatggtcgtcaccacgtagtcgtctatggggtcgaacttgtgcttcgccgcttcgctcaggacgtagtggaggagccttaaaatctgcctagggttgcccctcgccaaatcgtggatgagcttaatcgcctcctccgtgaacggatagatcgggtcgtccgtatccttcactctcgccttgttgagccttttcttgacaagttcaaatgtctcctcgacgctcatcggcctcagcttgaactcatagtggagcctcatgaagaacgctgggaagatcttcgtgtactcctcgtacgcctccgggatgcaggcgaaggccactatacaccccggcggcatcgtgcttatcacgtgcctcagcatctcaaagaactgtatcttctccctctctcccgctccctgcatgttctcaagctcatccaaaaggagagcggagtatgggtactttttgagttgctcaaccagaagctccgcaatgtccctgctcttgtactcgttcgggtcgctcagcatcttttcaagtctgtctatgaagcctaacttccttgagaggttctcaaggaagatgttcgtcctgctcctcggcggcttaagggcatagaagatgtcgcgcgtgagcttcaagatgtcgttggtgtcaaccttgacgtaaatggcctttccaccgttgtcctcgatggccttggctatgttcttgagcctctgggtctttcccattccgagtgggccgactatactgagagcaatagaacttttgtgaccgagaacctccgagattatcatctggaggcgcatatcaacttcctggtagacgtgaatgctctcaacgtcggctattccttcgcttgcgagctgctcaaacgggttgtgagagagaccataaacgtcatatgaatgagaagggtaaaacttaaggccatccctttccatttcacctcaccgatttagaatgtccttcggaatataaaaacctgtccatcggtgagctgatatgattctcctggtaacatgcccgcagggaagggaaggcgatgcaatactcgagctggagtgggcgcttgaaaaggttaaggttcatggaaccgattggaggggtgtcctgctcgctgaaactcccctatcaaaggaagaagcgcttcgaaggctcaaagattttgaaacgcaggcaatccaaagggttgtgccgctggaagtccttgtgagggcctcctttgacgagatagctgatgcagtactaaacctcgctgagagaatccagggtagctttgcggtgagggcaaaagtcaggggaaacaaaaaactctcccagcgggagcttgagagaaagctcggctcgctcatagtcgagcgctataacctgccggtgaatctgagtgatccagactacaccgtcatcgttgaagtcctcgggaagaaagctggagtgggagttctcaggcgtggggagcttctccgcttcgaggtagaggaataggcttattagggtgggcaccgttttcccactgtggtcaaaatgatggacgttgatgaggtcattgagatgctctcaaagctgagctacgaagaggccttagcctactggataagtggggagagggaagaggcaaagctctacaaggagctcgccgagagagcaagggcgctcggtcttggggagagtattgtcaaggtctttgaaaagctctcaaaagactcccagaggcacgccgaggagctgacgaaaatcttcaaggagagcttttcaagggagccgaagactgacataccgccggtagaagttctatcagttctcaacaagttcgagagggcagaccagataaaagaagtccttgaggctgcgatggagagcgagctgaccgcccataaggtttacaagcttctcgccgagaaggtggaagatgaacggctgaaggaactctacctcaaactcgctgaggttgagaggacccattacgaggccctgaaggcggaatacgaaaagctgggtgattgaaatggtcgtggagatccttaacgagataaggaagctggacgagagggagctgttaagctactggattaaaggtgaatacgaagaggctgaaacgtactggaagctcgccgagcgtgctaaggagcttggactgccagaggaagttgtcaacactttcaagaggctcggtgacgagtcaaaggggcacggcgacgagctctacaaaatctaccgccagaactacggggacgagctggtcgaggtgaacgttccgaacgttgaatccctcaacgtcctcggcaagttctggaaggtcgaggatttgaaggacgttttggagatagcgatggagagcgagaagctggccgagacgatatacagaaagctcgcggaggagtgcaaaaaggaggagctcaaaagggtttatctcacgctggcggacgttgagaggggacactatgagtccctgaaaaagctggcagggggtatcgtcaatggaagaccttgaagagactctggaaaggttcaaagatatgttgcttgggctctccgagcgcgaaatcctctcctactggatctggggcgaatatgaggaggccaggatttactgggggctcgcgaaaaaagctgaggagcttaggcttccgcccggtctcctctctgccttcaggaagctggccaaggaatctgaggagcacggggacactctgaagaggatatacgttaaaacctacggtgaagaaccgaaaaaagttgacctgccgtacattgaagcggaggttctctcaaaggcctttgaagacccggagaacatacccaaagttctcgcaatagcgatggagaccgagctcgttgcgatggagctgtacagacatctcgcctcaataacggagaacgaggaggccagaaaggtctaccaataccttgccaacgtagagtgggcccattaccagaggctcaagggcgaggctgagctcatgggcttcagcgttgaacagtatggaataaaagtaaaggtgacggcgtaatcatgccttcccttccttctccttcttcgcggcctctttggccttcttctgctcttccagcttcctctttatctcctcgactttttcaggcttcagagggataaacctgtcgtcgtggttgtcgtagctggccagcaggaagtccttgctgagctggagcgcccctgtaggacagacgtcaacgcactggccgcagtagacacagcgagctgtccagagggccaccttccttatctccggcaggtaaacgaagaccccagctggacagacgttgacgcacatcctgcagccgacgcacttgtccacgttgtaggctatcattcccctgaagtcctcgggaatcggaaccggctccgtctgcgggaagcggtttgtcgccggcttcttgaagaggtttctgagcaccactgggacgagaattggggccttcacattatcacctccatcgctatgaggagcgagccgatcagcgaggccaggaagacgttcttccagaggaagtcaacggcctgcgttatcttcagcctccccgtcacagctctgaagacgctctggacgacgaagagaaccacgaataccttaagcgtgtggaagagcaggtcaacgacgttcgctgagaggccactcagcccgaagtagcccgagattccccacgggaagaatatcgcgacaacgagcgacgctgagatgaaggcctttatcgagtgcgtcagcttgaggagtgccagataccttccgctgtactcgacgagaagtccctccgctatctcttcctcggcatcgggtatgttgaagaacccgacctctatctcgctcgccagccagacggcaaagacgtagaggagtataagggcccctacgaagctcatcggagtccctatctcccatatgttgtgctgatagaatgtccccatgctgaagggctcctcaacgccgagctttccaatgcgccacattattgtgaatatcgccagcatcatggctggttcccttgagaccattatcgtcgcttccctcgctgcacctatcttggcgtacgggttccccgagcttattgcgccgagcatcttgaagaagctgatgagggttaagaggtagatgaagacgatgacgtctcccttgctcgccagaatcggcgtgaagcccatcggcgtgtaggcgaggagagctatagcggtggccaaggccagaacaggagcggccctgaacatgtagttcgcggtgttcggtattatcgtctccttgctggccaacttgaggaagtcgtagatcggctggagtatcggcgggccaattctcctctgcattctggccactaacttcctgtctattccctcccagacgagtgatgcaagtgaaacgaaagtgtagaggccgagcaggcccgcgattgggtaaaccacgttgcttaccacgtccatgctatcacctcacacagccaacaccaagcgggctcgggtctcccttgatatccgggttgatctcgcgcgtcctctttatcgactccctcaggaggtccttctcggtcaggattttcttcttcccgtcctgcacaacggcaaccctgtcggtacagctcaggcacgggtctattgaagcaaccgcaaccacaaagtccgccacctggtcgccgatgactcccctggcaaccgcgaagaggttcgggaacgtcggctctctcggcttccagcggagcggcttatcgcttcccttctttccgcggacgtagtgcaccaactctcctctcggcgcctcgtacctgcctattccctcaccgtcaaccatcagcctcagcttggcgtagaggacgttgtccttcgggaaggtctttatcggcccgtcgggcatcgcatcgagggcgtgctctatgagctcaaggctctgccagagctcccctatcctgacagccatcctgtcgaagacgtcccccctcggcctctctcccgttacatcctgcggcatgaccggctttatgccgaggtccggataaaccccaagcccctcgctccagcgggcgtcgtccctgattccgctcccccttcccgttgggccaacggctccctgctccagggcaacgcgcttgcttatcactgctgtgtccctgaaacgggcctctatcgttggatcgtggaggaaagcctcctctatctgcgggaagacttccctgtagtactttatcatctcctcgatgatccttctcttcttctcgtcgatgtccctcctgacgccgcctatcgtcaccatcgagtagttaacgcggtttcctgagacggcctcaagggtgtccataaccttctcccttgccagccaggtgaggtgaagcagggtgtcgtagcctatgtcgtgggcaagaacgccgaggttgaggaggtgggagtgaatcctctcaagctcgccgatgattacgcggatgtactcggccctctcgggcacctctatgcctccagcctcctcaacggccctcgtgtaggtgtggttgtgagagaaggagcagattccgcacatcctctcggcgaggtacattatttggatgtagtttctcctgagggctatccattggattccgcgaaggttgtaaccgagcttgacgtcaacgtcaactatcctctcgccgtctagggtgagtatgaacttctcgggctcttcaaggcctggatggattggaccgaagggtattttgacccagtactcgactttttcggtcatttcttcgcaccccctttgatgtagtatgggtgacccgcattgtgtaccatctcctctgaaatgcccttatcgtcgaggcggagcgggtagatgccctctgggaagtcatctggaaggaatagcctcctcttgtcgggggcaccctcgaagtcaagtccgaccatctccatgccttccctctcgaactggagcgctatcgggaagacgtcgctgatatctgggagcaccgggtcgtcctttggtgcgtggacgtccacgatgagtgaaaccgcaggagcgtccctgtagtggataaggatgtggctgagaaagcccagctcttctccccagtcctgctctattcctatcgagtagtgggcctctgggtcgagccccttgatgaaactcatcaaagccttgtagtcctccctcggaaccctcacccagaccctctgtctgccccacttgttggtcttcacctcaacgctcgcgctcgggaagcgctcggctattttccttgcaacatcctccgcctttgtcggttctttgacttcgttaacctcggtaatgggattagcttcactcattctcccacctcctctggaacctcccccttaatcatcctggcgagcttctccagggcaagaacgacgccgtgtagaatggcctcaggcctcggcgggcagccgggaacataaacgtccacggggataaccctgtccagcggggcgtttgtgaacgggctctcgtagaagacgcttccaccggttgggcatgctccaacggctatgactatctttgggtctggtgtctgctcgtagacgagtttaaccctctcaaggctctggttggtcacggggcccgtaacgaccagtatatctgcgtgccttgggctgccgacgagcttgactccaaagcgctcagcgtcgtagcgcggtgttagagcggctattatctcgatgtcgcagccgttgcacgagccgctgtttacgtggaatacccagggcgactttccaaggaacctgcagagctgggctattctcttttcgagcctctcgcgctccgatggatttgatttctgcccgttttggttggcgggaactgttatcgccatcagctaccacctccgcagagctctcgcggaaaacccttcatccccatatcagcagcacccccagcacgaaggccgtcgttatcaccaggtagctcgcgtagtcagtgagcaggcctgtgtggtctctcctgagcacagtgaagaagttcttgagggcgtaggttaggccccacatgacgtttcttcccgtgtagtggccctccaggtgctcgaagccgggaattatcctgtccggatcttcgccgctgatgaatatcttcgtcccatctccggtttccctcgttcccattccgcttctcttcgcccacttgtcgaggagataagccaggatgaggccgatgataaagacgaagacgaagtaaatggcatcccaataaccgaacatttcaggcaccccccatcagtgttgctatgtatccgagctggttttcgagggccttagccgctggaatcatgactttgtcgcttatctgccacgggaagagtcccatgatgattattgccaaagccaggattatcatcggccagagcatgctcgcctccgggtctctggcgttcatgaccttctcgctcggccttccgaagaaggtgtagagaaccctgacgtaggccgccgtacagaatgcagttccaattatcgctattgcaccgagaaccgggttgaagatcgcagaactctcgtagatgagccacttgctcgcgaatccgttcagcggcggcattccgattatcgcggccgctccgatgaggaaggcgaacgttgttttcggcattgtcctggccaaaccgctcagttcgttgaggttcctcgttccgagctcgtgtataaccgctccagctatgagggagaggagcgccttcatgagggcgtggttgaaggtgtgatatatcgctccagcgagggcaatatctccagttctgcttccgtaggctgccaaacctattccgaggccgaggaggatgtaacctatctgcccgacggaggagtaggccagaaggcgcttcatatcggtctgtattaccgccatcgcgttgcctactatgagggttatgcaggcgaagattatgatcacccagccgacggtcttcatgctgacgctcgccccgtagatgctgaagagtatcctcgccagggcgtagacaccgcctatcttgatgaccaggccagagagcattgctgaaatcgagctgggggctgctggatgggcatcagccagccacatgtgaacaggagaagcaccactcttgaagagcagacccgctatgaagaaggctaaagccaccttggcaacaacgctcgggttctgagacagcttgatcgcgaggtagcccatcgtcagcgtcccgtactggccgtagaggagcgctattccgaggaggacgagcgagctcgctattgaacccacgaacatgtactttatgcccgcctcgatgccctcccaggtgtcgttcctgaaggcgacgagggcgtagctggctatgctcattatctccaggaagacgtagaagttgaagaggtcgccggttatcgctatgcccagcattccgagttcgaggatcaggattagggtgtagtacttgtccagacccgtgtcgcgcttcatgtagccgagcgagtagacaacggcaaggaacgcgacgagggtcaccatgagcaccatcaacgctgagagcaggtcaacctcccagactatcctgaccgggaagctggctccctggccgaacgggctcttagcgccgagggtgtagagtatcgggccgttttcatagactgaataaaagaccgcggagccaaccaggagagttattccagagataatgaccgcccacgcttctctggcttttttccctgcgaggctcactatcggcattgagaacgctccaaagagcgggacgataatcaggtagggtaagatcgtctcgccgttcatcccctcaacctcctcagggctctcacgtcaagggttccgtagtggcggtaggcgtttatcgtcagggcaacggctagggaaagcacacagacgccgatgactatgctcgtgaggacgagcgcctgcggcagcgggccgaccatcgggcttttgagcgtctcgtacccggtgtaaattggggcggtcgggacttcgttgagctccattctgtagccgaggctgatgaggagcaggtgaattccagcgtctattatgttgagcgccaacacgagcttgagcaggttcctcttcgcgaggaacgcatagattccgagggctatcatgaggaacgcaactatgaactggaactgaatcaagacttccacctcctccagagggctatggcagttagggcactaacaagtcccgtgaagaccttcagtccgactgcgaggttcattatcggcaggaatccagcggaaagcagcgttccaggctttccgttgaagaacgggccgttgtgccagagggtattgtagaagaaggccgttcctatacccagcatcgccgcaccgaggaagacgaggccgccgaggccttcgagggcagagtaaaggtgcttgttgtagcgctttttcatctcgcctaatccaaatgctatcaggaacaggattccggctcctgctatggtggctcctccctgaaagccgccacccggtgtgaggtggccgtgcatgacaacgtaggccccgaatattccgatgagcggtatcgtagccctcgcagcagtcctgacgataacacccatgtcggagtcgttcattcctcatccctcctccagggtcttagaagggcaactgcaccggctatggcggtgaagagaacggtagcctctccaagggtatcgtagccacggtagtcgaacacgatgtcggtaacgatgttcgttccgccgacttcctcaacgccgtgctcgatgtagtagttgtcggtgtagcggtacttcagccagtcttctccgccgggcccgaacttgaggccgtagttggggttcgctatgtagaggagcgcaccgagtatgaacaggagcgacagataagctaaggttctcttcatggcacctcacgctcccacctttccgtcttcgcgatgccgtaaacaacaacggccgtaacaacgcccgctccgacggcagcctcggctatggcaacgtccggcgcgtgcagggtgtagaactcaaggctgagcaagaggctcatcgctgccgaggccaaagccgccgacagaaggtcgcggtagcgtatcgtaagataggccgtgatcagcactccgacgaggattatggcctggatgagcatatcaaggtcaacggcgttcattcggaaccacccccgagcttctcctcgtaggcatcaacaaccgctctaaccggcttgactccgctgaggtgtgccgctttggctatcgcgtgagctcccgtcgggttcgtgagtaggagcgctatgagggcaatgaagctgtggagggccatctggagatacttggagtcccctgtcctgtggagctggtagagggcgtgggtgacgacggcgaagacggcaaagatagtcccgaaggtcgtgcacttggtggcgccgtggagccttgtatagacgtcggggaagcggaggagcgcgaagcttccgaggaggttgaaggtcacgcttattccgaggaagacgtagatgagcacttcaacgtagttcatgccaatcccccctggaggtacttcgctatcacgagcgtgcctatgtagctcagaagggcgtacactatcgcgatgtcgatgtagatcgtcctgtcgtaggccgctccgaggagaaccatgcccgcgacgacgagcgtgttgagggtgtcaacgccgactactctgtcgggaaccgttggcccgagtatgagcctcagcaccgagattaaacccgctatcccaacgagaaccatcgcatagaagaatgccatcatcttcccagcctcctggcccatttttcgaagggcccagcaaccggctccgagctttcgggcctctcaaggccctccggcacgttgatccagtgaacgtagagcgccttttcttccggatcggcttcaactgtcagggttccaggggtgagtgtgatcgagttgctgagaattgtgtactgggcgtcgttgttgaggtcaactgggacgcggactatccccggccttatcttccctgttatgaccctgtaagcgacgtcgaagttggccttcaccatgccccagaagagaaccggtgcatatgctatgaagccgagccatttcacagggttcaggaagcgcgttgagttctcacctaccacgtccttcgtcgcatagccgattattgccgcgaatatcagtccagccactagctcttccgtgctccacagcagtccattgcttcccgctgttaagaccagccacacgatgtaggcgaagaggaacgccactatgaacggcaaactaccacctccagatgagacattttcagcacctctcacttccgatttctcattctgcttaaaacgcttttcccaagcttttgtttggcaagagaaggtattaaacggctcgttttgaaccaatggttcaaatctaaaagttaaattaagaacttcaatgctgcgaattagggggtaataaaggaaaatgcatcaggcgggcttggcaatcttggccaggaagaacgtgcccgctatgtagtagattgaaagcgcaagcggaacggcgtacattgcaccactgccgagagcgctgtcgagtgccattgctattccagcaggtacgagggtcgcgacgatccagaatgctatgaagacaaccaggaagtcaacgatctccttgatgagcctctcggcggtgagctccgggtggctgaggtaccagtagtagaacgcgacgaagaggaagccgccgacggcgttgccgaaggtcaccgggatcaggttgtggaagaactttgtccaggttatggtgtagttgctgaggagtatccccgttgggatcgcccacatgttggcgatggcgtgttcaaagcctatggcgacgaaggcaaagattgggaaccatatagcgagtatcttacctgccccgtcctgaaccctagcagactgccatattgcaaggttgacgagccagttacagccgatgccgaggaaaaacagcgcgagcatgtcctttgaaaccttgcccgtggctatgctcaccgtgacttttccaaaggtgttagggtctccaacgtggccgaagagtccggttagggtagttgccagcagggcaaggaagattgagcctatgaagttgcccccgtagcttccgaaccagttgtagaggacgcacttgaagtcggcgtagcccttaaccttcgcggagctgaggaactgaacgttgccggtccagaggtcagcaccgcctatgacaaccccaatgaggccgacagggaagacggcaccgaggaggagcttgaaggcggatatgtttcccttgtcagggaagagcttggggctgtagccggaagccgccaccaccgccaagaggaatccgaaggcgatgaacgctccagccataaagccggcaaagagtaaccttccgggggttgttctgaacttgggggtggccttcttggctatcccctcaaaggtggtatccacaccatacaggatttgttctttcggatcgaccattcgatcacctcctattcttcataacctttcctcaagatgttccaagcccacgtgataggcccttccgagtggtatcacggagaaaacacagaaaggaacgaaggttcatcttatccctccctacttgctctcatcgtttcatttaccgtgagctttctgcggcaactcctgcagagaacggcccttcccactatctcatcgcgatcaaacattccttccgaaagcatctggagggacttttccagcgatctctctgtgtaatcggcatagttcccgcaaccaggacataggtgaagccttagttccacaacctcaacgtaagcccttttcctcagagagataacctcaaaagttgctatcttaatagcccccgtcgggcagacctcctcacaacgagtgcatggagtgcactttccgatgttgagggatatcttcctgataccttccatgtagtcgtctatagcctgcagagcacccgcagggcaaacattaacacaggcgccgcaaccgatgcagagctctgggtctatttgcgggactcccaaaccattaggaagatgttccaatggtattaaggaacacttcaacgtttcaggcattttcatccctcttcagcacttttggtcgccctaccccccgtttggtatgcgtctccacgagtaaggaaaaagttaggaaactacaaatacctacacacccctgaactgtattctctcgccgctcttggctatctctatcgccttttcggtgaacttttgtctcctcatcctttggatgtcgttgaagtcgccgaagagaagggcatcggtcgggcaggtttccacacacgccgggagctttccttcggctctcctgtgggcgcagaggtcgcacttcatcattatcttgtcaagggagtcaagctctggtattccaaaggggcacacgattccacacatcagacagccaatgcacttctggggggcgagcagaactgctccatccccatcgcgatagagtgcgtttgtcgggcagacctcgaggcagggagccttctcacagtggcggcagttgagggccatcgcggccatttcctgccattcaaagacgtttatgaatgatcttccgttgtgttcgcgctcgcaggctacctcacaggcgcggcactcgatgcactttgaaaagtctataaaaacggtctttctggccattcaggtcaccccctaacaatttcaatctctggtataacgggaggtaccttcttcatgagctccctggcctcttcctccgtaatcttgacgactttgcaggcgcaggccttggtctccggaatcttggccactgggtcgagggcatcgttggtaacgacgttcgctccccagtgccagggaaccgctataacccccttcttgactgtcctcgtgacctttgccctgatcggatactctcctcttcttgtgacgattttgacccagtccccggtctttattccaagtctctcggcgtcctcagggtgtatctcagcgaggggctcgggccacctcttgacgagggccctgctccttccggtcatcgtgagggtgtggtagtggccaacgtacctcactgtcgtcaggaggaacgggtaatcctcgtccggtgtttcagccggcccgcggtactcaacggccgcgaggtgcgccttgccatcgctggtcaggaacctctccttgtagagaaccctcgtgccgggatggtcttcactcgggcacggccagtgtattccagctaagtttgccttgagcctctctggagttatgccccgatactgtggggtgcaggcgttgacctcacgcagaatgtcctctgggccggaatagttgaagcccttcggcccgtctcctgtgaagccagcggccttgcctatctcactgactatccaccagtccggcctcgcctcccccggcgggttgatcgcctggaaactccactgaacccttctctcggtgttcgtgagggagccctcgttctcaagcatagccgcagccgggagaactatgtccgcgaactccatggtcggtgtgggaactatgtcctgaacgaccatgaactcaagcttatggagggccttgatgacgtggttggtgttagcatcgcttatgacagggttctcacccatgacgtagtaggccctgaccttccccttctctatggcgtggcagcctcgatgactgtaagtcccacctctccgctcagctcggttccccagaactcctcgaagaacttcctcccttcaggatcggaaaccgctttgtagccggggaagacgtttggaagtactccaaggtcgcaggctccctggacgttgttctggccgcgcattggggatactccacagccttcccttccctggtagccacatatggctgaaagcgttgcgagcagtctcacgttgtcgtgtccgtgggtatgctgggttattcccatcgcccacgttattacgcccttcccccccgttgcaaacgtcctcgcggcctggactatcagatctgctggaacgccggttatcttctcgacgtacccgggagtgaacttctcaacggtcttggcgagttcatcgaagcccgtgcacctctccctgacgaacttctcgtcgtagagcctctcctctatgatgacatgaatgaggccgtttatcagggcgatgtcggtaccggggtagtgctgcaggtaaatgtcggcgaaccaggctgtccttgtaaagcgcgggtcggccactatgaccttagctcccctctccttggccttgagaacgtagcggaagccaaccgggtgagtctcggcgaagttgtggccgatgatgaagataacgttcgcctcttcaatgtccctgtatgtgttcgtcatcgccccagcgccgaagacggctttgaggccggaaactgttgatgcatggcagagtctcgcgcagtgatcaacgttgttggttccgagcattctggccagcttctgtataaggtagtttggctcgttgaaagtttttgcactgccgaagaacatcattgaattcggatcgtcctttgaatactccttaagcctctcggcgacctcctttatggcctgactccagcttatctcgacgaacttgccttgctccttcgcctttaatggcttcttaagcctgtcccgggcgaggacgtactcaagaacggcgttgcccttgggacagagctttccattttcgtttgagattccgggtatgtcattggcgtactcgatgccaaggggatggccgtcagaactcctaatgtacagcctgcaccccacaccgcagtaggggcagaccacagggacgagcttttcatccattctcaacacctccatcatcgcactgtacatcatgcgtcattacagcactaatattcaacactgtacttttttatccccacacagaactcccgcttctggcttaaaaccgtttttaaatcgcttggtttttaacaaaaggttatgatagtcgaggtattgagtaataaggctatgttaacacctttcgtattctcagaagcactgtggctaacaaaagagtttaagatacttccgaacctccgttccaagcaggaaaaataaaggtcaaagcatcaagcggcgtcagagcatccgtccgactccctccaagttaaccgccgccagccgctcccgtgctatcttttcggcggttcttctcctaactttttcctcgacttcctcgggctttccgaagaatatggcccctgccggacacatttcggcacacgctggggccgttccaagccttcttctatcagcacacatgtcgcacttagtaactgccttgagcttgacatcaaaagtgggaactccgaaaggacaggcggcgaggcacatcagacagcctatgcacttattggggtttattataacggccccatcgctgtcgcggtagatcgcccccgcaggacagacgtccatacatggggctttctcacagtgacgacagtttatgggaacggggatccctgtaatggtgtaatagacctttatgttgggtctgccgccgtgaataaagtcgcagactccttcgcacgtctcacaaccaatgcaaaggctgtaatcaacgtggagtatcctcctcgtcatttccctcacctccccatcagccacaggtgtatggactcggctgcatacaggccgtccttgacagcccttccaacttttgatggccccagaacaacgtctcccgcagcgaagacgccctccctgctggtcatgtgcctgctatccacgacgatccttcccttcctgtcaagcgctatgcccatctccttggaaaacggtggggttggcatctggccaactgcgcagaccatgtaatcaacctcgatctggaagttggagccctcaatcgggattggtcttcttctcccggtttcgtccggctcgctcagctccgttttgacgagttcaacagctctaacccttccgttttcacctattatcctgacaggcattgtcctctccagccacttaacccctctctgctggaggaggttgatctcgtaagcccccgcgggggcctcccttatcgttctgcggtagctcatgtagaccttctccgcccccaggtttatgctttcaagagccgcgtcaacggcgctgtgtcccgcgcctaccacgaggacttttctcccctcaacagggggcacttcactccagtccatatggcccagcttggcgctcttgatcctgaacaggtactcaagcgccgggtagaccccctcaaggtctgaacctggtatcgttggaacgtaggcgttccaagtgcctgtggctatcagaacggcatcgtagttctttaggatctcctcgaactctattctgcgctcaacgaactcatcgccgctctccttgggattaccgaagcataccttcgttctcgtgaagaacttgacgttgtagaccttctcaagctctttgtagccctctctaaccctgtagataggaatcctaaactcgggtattccaaacagcattagacctccgggttcaggcagcttgtcgtaaacatgaacctcgtgtccctggcagacgaggtaccctgtggctgccagaccggcgggtcccgccccgatgacggccaccttctttccggttggctcgggtttttccctacatagaaacgcaaatctaatcccttccatccctaatcaccccgtgtaagcttcgtacttattcgacgccctaaacagcctctttctcttgcattcattacacagaaaggcgagttcagggtttcctccagtttttagaagccggtttgcgagataatcggcttctttcttggtgctgttgagacgttttccgcagacagcacagcgggcaaactccaaggccagctccatactctcaggtctcccctccagtgctccagtggggcaaacttcgttgcattcaaaggcacagtctccgcatttcgcgggctcaaaaagtattctcctaacttcattctcaaaaaccaaaatagccgaataaggacaggcacctgcacacgccccgcacccaatacagagttccgctttcagcacagatatcacctgcgagcccgctgaatgggcttacatcttctttaagttcccagtattttttgaaagaatgcccataaaagcgtttttcaaacggttattttcaaaccaaaagttcaataccgccctatttaagtattgaaggttccaaatccacaaacaaccaaaattgaaccccaaaactcagtgttgttcattatcgctccacaaagaatccacgatgagtttaacttttttgttgacctaagagattttaatcaaacaaaagagtttaaacttttggttttgaatttctgggtttaaaaacgctttttaaggctgtctcttactctcaataaatgaacataattggacgcatgtatgtttatgttcattgggggtggtaaggttgagatacgttaagctcccgaaggaaaacacgtacacattccttgagcgcctgaaggagtggggtaagctctacgctcccgtgaagatctcggagaagttctacgacttcagagagatagacgacgtcagaaaggtcgagttcaattacaacaggacgataatgccgccgaagaagttcttcttcctcccgagggagaagctcttcgagttcgacctgagcaggccggagtacagggaaaccatcgaggacgttgaaccctttgtgatcttcggccttcacgcctgcgacatccacggcctcaaaatcctcgatacggtctacctcgacgagctcccagacaagtactacaaggcgagaagggaaaagggaataatcatcgggataagctgcatgccagatgaatactgcttctgcaacctgagggagacagattttgccgatgacggctttgacctcttcctccacgagcttcccgatggatggctcgtcagagtcggctcaccgacgggccacaggatagtggacaagaacatggagctcttcgaggaggtaaccaccgaggacatctgcaacttcagggagtttgagaacaagcgctctcaagcgttcaagtaccacgaggactggagcaacctgcgctacctcctcgagctcgagatggagcacccgatgtgggaagaacaggccgacctctgcctcgcctgcggaatctgcaataccacctgcccgacatgccgctgctacgaggtgcaggacatagtgaacctcgacgggaacaccggctaccgcgagaggcgctgggactcctgccagttcaggagccacgggcttgtggcgggtggccacaacttcaggccgacgaagaaagaccgcttcaggaaccgctacctctgtaagaactcctacaacgagaagctcggcctgagctactgcgtcggctgtggaaggtgcacctacttctgccctgcaggtataagcttcgtgaggaacctgaggactattctcggcctcgaagagaaatcctgtccaagcgagataaccgaggagattccgaagaggggcttcgcctacgcctcccacataaggggtgatgggctatgagcatggttcttccaaaggagataatgatgccgaacgataacccatacgctcttcacagggccaaggtgctcagagtctacccgctcactgagaaggaaaagctgttcctgttcaggtttgaggatgctgagcttgcagaaaagtggacgttcaggccggggcagttcgtccagctcaccatccccggagtcggtgaagtcccgataagcatctgctcctcagcgatgaggcgcggcttcttcgagctgtgcatcaggaaggctgggagagtcacaacggtcgtccaccgcctcaagcctggagacaccgtcctcgtccgcggcccctacggaaacggcttcccggttgacgagtgggagggaatggacctcctcctcatagccgcgggtctcgggactgcaccgctcaggagcgtcttcttgtatgccatggacaaccgctggaagtacggcaacataaccttcatcaacacggcgaggtatggtaaggatctcctcttctacaaggagcttgaggccatgaaggacttggctgaggcggagaacgtcaagataatccagagcgttacgagagaccctgactggccaggcttacacggaagaccccagaacttcattcccgaggcgaacacgaacccgaagaagactgccgtggccatctgcggcccaccgaggatgtacaaggccgttttcgaggccctcatcaactacggctaccggcccgagaacatctacgtgaccctcgagaggaaaatgaagtgcggaattggcaagtgcggccactgcaacgtcggaacgagcacgagctggaagtacgtctgcaaagacgggcctgtcttcggttacttcgacataatatcaacaccgggcttgctcgactgaggtgatgaagatgagcgagaagaagataaggattgggttttacgctctgacctcatgctacggctgccagctccagttcgcgatgatggacgagatactccagctcattccgaacgtcgagatagcctgctggttcatgctggagagggactcctacgaggacgagcccgttgatatagccttcatcgaggggagcgtctcaacggaggaagaggccgagctcgtcaagaaaatccgcgagaatgccaagatagtggttgcagtcggctcctgcgccgtccagggcggcgttcagagctgggagaaggacaaaccgctggaggagctttggaagaccgtctatggagacgccaaggtcaagttccagccaaagatggcagagccgatctccaactacatcaaggttgactacaacatctacggctgcccgccggagaagagggacttcctctacaccctcggaacgctcctcataggttcgtggcctgaagacattgactatccagtctgtttggagtgcaggctcaggggcaacacttgtgtgctccttgagaggggcgagccctgcctcggcccggtaacgagggctggctgcgacgcgagatgccctgcctatggaatagcgtgcattggttgtcggggggcgataggctacgacgttgcctggttcgactccctggcgagggtcttcagggagaaggggctgaccaaggaggagatccttgagaggatgaggatgttcaacgcccacaacccgaagctcgaggagatggtaaacaagatattccaggaggtgaaagaatgaagaacgtttatctcccgatcaccgttgaccacatagcgagggtcgagggcaagggcggcgttgagatcgttgtcggcgacgatggcgtgaaggaggtcaagcttaacatcatcgaaggaccgaggtttttcgaggccataaccctcggcaagaagctcgacgaagctttagcgatttacccaagaatatgctctttctgttcggcggcccacaaactcaccgccgttgaggccgctgagaaggcgataggcttcaccccgcgcgaggaaatccaggccctcagggaagtcctctacataggagacatgatagagagccacgcactccatctgtatctcctcgtcctgcccgattatctgggctactccgggccgctccatatgatagacgagtacaagaaagagatgagcatagctctcgacctaaagaacctcgggagctggatgatggacgaactcggaagcagagccatccaccaggagaacgcagttttgggcggcttcggaaagctcccggacaagagcgtccttgagaatatgaagagacgccttaaggaagcccttccgaaggcggagtacaccttcgagctcttcacgaagcttgagcagtacgaggaagtcgaggggccgatcacccacatagcggtcaagccgaggaacggagtttacggcatctacggcgactacctcaaggcctcggacggaaatgagttcccgagcgaggagtacagggagcacataaaggagttcgtcgttgagcacagcttcgccaagcacagccactaccacggaaagcccttcatggttggtgccatttcgcgcctcgtgaacaacgccgatacactctacggaagggctaaggagctctacgagagctataaagaccttttgagatccaccaatccgttcgccaacaacctcgcgcaggcgcttgagctcgtctacttcacggagagggcgatagacctgattgacgaggccctcgcgaagtggccgataaggccgagggacgaggtagctttgaaggacggcttcggtgtctcaactaccgaagccccgcgtggagtgctcgtttacgcgctcaaggtcgagaacggaagggttagctacgcagacataataaccccaacggcattcaacctcgccatgatggagcagcacgtgaggatgatggcggagaagcactacaacgacgatccggagaagctcaagctcctcgctgagatggttgtaagggcctacgacccgtgcatctcctgttcagtgcacgtggcgaggctttagcctcccaacttttttaagttttcaagcctattttccagtggtgagggcatggtcgaggagcttgttgatgttgtgattcatgttaaagtcccgaagaagtacgccgaggagttccggaaagaagtcgaagctagggcttggtatctggcccacaagaaggagctctttgagaacctgaaaaagctcaaggggatcatgaagaccgacaagtcatggaaagagataaagagggagctctatgagggacttattgattgacagttctgtcctgattgagtacttcaggggaaacgagcgggctgttggattgattgaacagtttgaagaaagtgatgacgttctttatatcaatgaggtcgtgttcagtgaagttgtttacattcttttaggatacttcttgggggcatctcctcggacgataaagggtcatcccgagaggctacccaaagagctgtccactgttttcaaggtgttagaggacttcggttttatacccacgactcagaatgcactctttaaagcccgcgagctgatagagaagtacgcgctccttcccaacgatgctcctattcttgccacttgcatcgagcacggcttttccttggccacgatagacgacgacttcaaggttccggctgagaaggaaaaggttgaaatcataggtggttagccgtgagagtactcatcctcgccctcggcaacgagctgatgaaagacgacggagccgggctgaaagcgggcagaattctcgcggagaagggctacaacgtccttgaggtcggtacggacatcttccgcctggcgaaccactacaacggtgaagagagaatagtaatcatcgacgccatcctgagcgataagctgaaacccggagaggtagttcactttagtggcgaggaaatattcgagaagctgaaggccgaaatcaggagcgcccacttcatgggtgctatcgatgggctgaagctcctcatggcgctcgatgagaggctgaagagagcggagattcactttatcgggatagtcgcgaaggagatagacctgggcatggagctgagcgatgaggtaaaggctggggttcaaaaagcggtcgagatcgccgaaaaactggcgaagtgacccaaaggtttatatactccgcgactaacccaacaacgggactcttctggagtcttcccgaagggcccccgaaagttgaaagagttggtgttaggtatgtatggagacaggtttggtggatatggacaggaagcccccgttaaggttggggagagatacacggtcaagattgagagccttggaaagggcggtgacggcatcgccaagataaaggggttcgtcatattcgtcccgaacacccaggtcggagacgaggttgagatcgttatcaactcagtcaagaggaagttcgctttcgcctcagtcatcgagtgattgagagttcttttttcactctcatttattcccacttttgacccgtctgttttttaaacccacttctgaacccattccgatggtcagggtttacgtcgagagttacggctgcacaagaaataaggcagacggggagattatggaagctattctgcttagggctggctatgagttagccgaaagtccggaaagcgctgattacgttgttgtgaacacctgtgccgttaaagacccaacggagcacaagatggcgaggagaatacgcgaactgctcgattccggaaagaaagtcatcgctacaggatgcctcgttcacgttaatccagacgttattgacccccgcgtctccgggatgctcggcgtcaagagcatagacagaatcgccgaggcgatagaccttgccgaacgcggaggaaagctggtctcagttgagggctggaaggaaaggaaggtagacaagctcgaactgccgcgtctctggaagtcaggtgtagttttcgttgtgccaataagcgagggttgcctcaacgcctgcacatactgcgcgacaaggtttgcccgcggtgtgctcaagagctacaagcccgaactcgtgttgaagtgggtaaaggaagccctcgcaaggggctacaaggaaatccagctttctagcgaggataccgggtgctacggttttgacatcggaacgaacctggcagagctcctcgacgaaataacagccatcgaaggagactttagaatccgcgtcggcatgatgaacccaaaccacgtgataaagttcctcgacgagctgatagaggtctaccaagaccctaaggtttacaagttccttcacctgcccgtccagagcggcgataacgaagtcctgaggagaatgggaaggaactacacggttgaggagttcgaggaaatcgttagtgagttccgcaggaaaattccgggtttgaatctcaacaccgacataatagtcggctttccaggcgaaggcgaagaggccttccagaacaccgttgagcttgtgaagagggttaggccggacaagataaacgtctcccgctattccccaaggccggggacgattgcagcgaagtggaagcagctgcccggctggaaagttaaggagcgctccaggattttgcacagactccgcctccagatagcctacgagataaaccagacttatcttgggaagaaagttgaggttctcgttcacggtccgggcgagaagggcggaattgatgccaggacgttcaactacaaggagataatcctcgatgccggtgagaaaggggaaataacccgggccaagattacgtgggctggttcaacgtatctgcggggagagatggaaaaaagtgagtgagaactcaggcccactcttcctctggaatcgcctctttcttggcagggattatgcagaggaactccagcgtttctccagttgccttgtagccgtgcggctcgttgggcggaacgtagaggaagttgccttccttaacgtggaactcctcctttccgttggttattatgccctctcctctgacgatgaatatctcgtgctcccagtcgtgctgatggattggaatctcagagcccttcttcatgacgaagtagcgcatcgcgaagttctttgccccgagcttcggagaaacgagccagcggattgtcactccctcaaaacccgtatttttttccgggacatccttatagtgcccgacgaacatggtaccaccataggagattgaatcgaatcatatttaaacgttccccgacgatttggaagggagttaaaggtgatgggtatgaaaaaagctgttgcccttttaatactgtccgtcgtgttcatagccggttgcataggaggcaccaccaacacaaacacgaaaacagcttcaacgagcgctgggagttcaggcataaacttcaagagctacgcccccggcaaggtcctcgccagctggtacgagcttttcaacgagacattctacgtaagcaatggctacgaagaccttgtcaagcactacttcccaaatgccagcgttaagccctcctccgaataccccggaagcggcatcctggtcttatcgccacaggacgtttattcaaagaaaatcctcttcggaaagccagttcaggtgcagaagcttgatttcttcggatacatagcctacaggaacggcatgcactacatcggcccctggcacggcgttgttgcaatattcaactccaaagaaggaaaccctgtaatggtggtctccggcacgagcagggccggagtcggtgcggcactaaacttcctcgcgggtgtaaaatcaggtaaagtccagctcgacaggacggcagttgtccgctcggggaacttcgaggggatgctcgtgaaggagataggggacacgaacctcgacggaatcgcgggggaggatgagttcgttactctccaccagataatattcgacgaacccttccagtactactggcgcgtcgttaaaggagagaacataacagtcagcggaggattcatcaggatggtgaacgacaccaaggtctacatccgtgccctcggcttcaacgtgagcgttagggtgaagaacaacaaagggataaccctcacctatgtgatagacaacatcaaccccaactacgttatggccgtgagtgaccaggaagacgcaatgaaagaggcaatcttcggcggaacgaaggtagtcgtggtctcttctggagacttctcaataatacccgcaaacgttagcaactacaccgttttagcgttcggcgaccacaggccaggaagcggcgagaaacagccagaggtcttcttcaagatcagggacgcaatcaacaaggaaaacggtgcctttgttattgacagcggcgacctcgtgtactcgggcacgatttaccagtgggaggagcttatgaaggcctggaagtggaacaagccggtattcgtggccgttgggaaccacgagtacaatggggagagcgtcaacatctaccattactacttcggcccgactgactacgccttcagcctcgggggctaccgctacatctttgccaacaacgttatgaacggctacaggctcaccgatgaacagtgggcgtggctggagaaagaacttgaaagggcgaaggaacgcggagagaggccagtcatagtcatgcacgcgccgccctacgatccgaggccgagcgatgagcacacccttgacccctctgatgccaagaagcttctcgaacttatgagggaatacaacgcctttggaatcttcggccacatccacgtctactggtacggcacctacgagggagttccgtttgtcataactggtggcggaggtgctccactctacgccaagccagaggagggtggcttctaccactacgtccgtctgttcatgagggacgacggttctattgaggttgaacctgttgaagtctctccctgattttctatttattctatccaccctatatagagacatcttcatgagtatattctactgcggcaagatatttatatagcacaattttgctacctctggtggcggtcatggatccctggttgctgataactataatcgtcggttttggaatggcgtgggccataggagcgaacgatgcggcgaattcaatgagcacagccgttggtgcaaaggcgataactcctaagcaggcagttttgatagcgggagtccttgagttcactggagcgtatttcttcggaaagagcgtcacggagacgataaggaaaggaatcctctacccggacaggataaccgatccaacggtgcttatctatggctcggttgcggctctgcttgccgctacgatctggctggtcatagccactaagttcggcctgcccgtctcgactacccattcgatcataggcggaatcgtgggctacggcatagtctacgcagggttctcaatagtcaactggggcaagatgactcaagtggttctcagctggatactctcaccgataataggcgccataatggccttcctggtcttcaaggccctgaccaagagcatcttcgaaagaaaagaccccgttagaagctccaaaatctggtcgcccttctggattgggctggccttcgttgtgataggcacgatgttctacatcaaggttctccacggaaagagcctgaagactggagtgctcttctacggcattcctgcaggcctcgttgtgttcctgatactcttcctcaccctcagggttaagttcccgtcatctgacccgtttataggggttgagtcgattttcaggcgcgttcaggtcataacctctggctacgtcgccttagcccacggggcaaacgacgtcgccaacgcgatagggcctgtggcggctgtttacgcggtggcaactatggggatggccggaatgaaggttccagttccgaggtggatactggccatgggcggccttggcatagctattggagtggccacctacggctaccgcgttatggagaccgttgggaagaagataaccgagcttaccaacacgcgcggctttacaatagacttctcggccgctaccgtcgttcttgtggcgagctggctcgggcttccgatctcaacgacccacgttgtcgttggcgcggtcatcggcgttggcctcgccaggggagtaaaggcaataaacaaggacatcgttagggatataatcatctcgtggttcgttacggttcccgtggcggccctaatcagtgctttcctattcaagatcctgatgattgtggggtgataacatgcaggtctggaccaagctctttgcgaaaagtccatttaaacctctgataaagcacgccgaggttgccctccaaaccgttgagacccttgagaaggcgctccaggcgtggcgtgagggcaactacgaggagatgaagaagctcgccctcgaagtggacaggcttgaggacgttgcggacaggataaaagaggagataagggactccctcagctcaaagctcatgatggcagtggcgagggaggacgtcctcatatacctccacatgcaggacaaggtggccgatgccgcagaggacacagccaagtggctcctcgttaaagaacctggaaacattccagaggagataaaagaagtcatccttcagatgggcacggagagcatcaaagcggctaagcttgtctatgaggcgatagtccagatggacagggtcatcgagagcgggtttgcagaaaaggagatcgagagggagtacgagatcatacatgagattgagggagtcgaaagcaagatcgacggcctcgatacggagcttatgaggctggtcttccagaacgctggcaggatggactggagcgagggcttctacatcctcaacatagccagaaccctcagcaacatctccgacaaggcgaaggacgccgccgagaggataaggctgatgatgaacaagtgaggatttttctttattgttattgtgtttagttttgctacttatctatccccatccataaagtgcaatgtctcaaagaagaggtaaaatttataatgtctcgtgatcatttctgctttgggaattttagttatcggccgggggatgaaggatgagtagagggggcctcgtagttttaaccagtttgctccttgtggctctcgttgccggatgcatggagggaggaaacttcgtttactcgaagggcaagataattggacctcataaagagctcaggtactcctttaagggacctgtggatttggacgtgaatgtctccggaaacggtccgtttaccctgctgatagtctcctcggacggatcaaaggagattttcaagagggggaacgttaccaaggttaaggagaccgtgaagcttcccgagggttcttggaaggttattatcaggaacgagggaggggattccctaagtctcgatataagtctaaaaggaaagtgaggaacagttgggaatgtcgatttctgaggggacattattttggagggatttgattgagaaacgcacggggactgctccgggtggccgtcaggttcacgctgacgctcttgctggtgacctttttagtgggaacgggcgtcaaggctggacttagggagatggcaaaaaacgatatcctaaaacatcctgaggtttacaaaaacgcccctaagttgggcatgacgccagaggagtactacatgaagtacatagcccccaagaagtacccggaactcacaaagccctcggtggttgtgggctttaatgcactcgtatcgtcggtaaaaccccctcaggacaaaatttggagaaaacttgagttataccagttcaggattccaagaaaagaggctcttctgcgaactttgattctcctctttatctccgagatcattttagtcccgctctcgctcatggttgccttttgggcactaaaaagtccgagggtggctgggctattgaataaccttaccaaggtggttttgggaattcccgcctggtggcctggtgttgtcttcatcctactcatcatttactcgccgctccccaacgatctcgtaatatcccccggaccaggtgccgggctactcgatgtccttgagagcatggtgttccccgttcttacggtcgtcctgacctctttctggtatcttgccgtcgagttttactttttgttaagcagggaggttctcaacccctatgtgagttacaaacgtgctatgggccttcccgaaaacaggattctgatgtccgcccttagggcgatatccgtgccggcgctgtccatatggttttctcacttaatcgaggtcgagggcatagttatcgtcgttgaccacctctttaagcttggagggctgggacaaatgattggttcaagcttctccggttcaatggcagaaaccttctacttcgtccccagcctctttgcattccctctcttggtattcatagtgctgaacctccttatagctatggcagtcgaattcctcaaaaccagacttgacccgagggggattacggcatgagggtgaacaagcgaggactcatgatggtggctgtttttatcgtgttcatgctgggcgcacgtagctcggtttcttcagaggagatgaagcactgggacgataggctttactgggtcgactatccaaaaaacgccctccctgtttggcatccaagagcagacatggggtcgcttaaattaagcgaaggggatgaggttgttgtgtccgtgagaaccctaccgaccaacttggtgctttcaaacgccaccctcctcataatccgtccggatggcctttcaatcaggctttcgggaacgggaagcgtcaactccaacgtcaccttggccgcccaagtcaaagccttcggaagggagctgggcctcgatgaggggagtattgttcttcacgagcctgctcagattctcttcctctctggagatgggactcttttgatgggggactacacaattagagtcgaatctggggaggtagttctattcggcaacgcctacggcctgttgggtaccgacggatatggcagggatctatgggccggctttgtacgggccacatggggaactattgtgctcgctggctttgcagtgctgttcgttatagtcataggcctgccctttggcgtcatgtcaggctattactccaacgttatcggtgatgctgccagggtgcttgtggaggcgtttcactcaataccggcaatccctctcgtcttggtaatgatatacgccgtttccaaggtgggagcgtacactaaactcattatcccagactggctcgccgggatcatcatagcgctcttctttttcagccagtactccaactccgtacggggcatagtggaaaatgagaaagttcaggagtacattgcggccagcaaaagcatgggtgcctcggatgtctacataatattgaggcacattctccccctcgtgctcagttatacgctctcctacgtcagcatgctcttccccagggtggtggcgtttgtttcggtgctcggtctgttcaacattattcctggcactaattggggctcttacacctcagaacttctcaagcagggagccttgatgggtcgctactggtgggcagtcctcgtctcggcggtggtaatagcgttctttgcaatcgcggtgtcaaacgtgctcaaggaggacgttgatcagtggcagccacggctgtgattatgccgtatctccctccagaattagaggtcgaagttggagtgtactccccacgatgccggccagcccattatcccatgtcccttagcggtgttcaaagggtctaaggatgccgcgagggctaaagcgcatgaggaacagacaagaggtaaatttttaagttctccttctaacttttcctgattggaattgaggatatctttaaagtagtgctaaagtttttagatatataaaaagtggctcattagcattcatgcctcctgccaaatcccgattgaattcctgtggtgataaaatgctgaccatcctcaaaatagaagcacgacggctctcaagacccctcctggttgcatcgaccctaaccctgatctccatgctcattgatagtgaaatctcgcccataattccttacttagccctcggcttcttgctttcatcggttttcccgatgggcatctccgagggcattgaaatactgctctctaagcctttccgaagggccgggctcttcattggactcctcctctcccacatcacactgtccctttttgtattcctccctgcagtcataaaacccataagcgccctctatgccgtgtttgcccttcccttccttccaatgggatacctaaccgcgtttttcctcaaaaatccgaagaaggtcgtcctcgtggggactgtgattttcctctttctgacgtttgtcccaatgggctacatagatatgaaggcccaagacaacgctcagaaagcgctgggaatcgagacctttgctgattacgaggccaaaaaagccgagtactctgctatcgtgcactccctcgaaaaggagtacggcaatatggcgttcttctcacccggcgtccagctcgaactctttgcccgcgacgttgcgggtggagatcgagaagatgcatttcttaggttcggggtttctcttggctttacggcccttctactcgcggtttccctccttactttcctccgcctcgaaccaggcggacttctaagaccgacactcccatcactgtacgtccaatcgctcccctggtgggttcggaaggaggtggcggccctctgggcttcgagagcgttcctcgcgctcttcatggtgttgatccttccggttgagggaactcttaaggcgttcttctccctattcctcctccccctggcagtgctggagatcctctcggaagattactccctaatcctcagcaaacccgtaagaaggacatacataaccaggcgtttcctcgtggtttcggccgtttttactcttttcacacctgtttttggcccctccttcccagtgcttctcttcacgtcggccgtcatttttctcatcggtctcttcagcaggaaactggcgctcgtagtgctcccgtttttagggcttttgatgagtccaacgctccaggagaactcaatcctcgtcgccgtcttgttccttattctcacgctacccgttatactccttatccatctgcgcgctctcagaatcgagcttaggggcgtggtcagatgaaaggagccaagctgatggaacggatcggaactaaccatccagttatcgtcttcctcctttctctcttcccagccatcggagtagagctggagctatactatttcagcgtccacaacataacactccccccagaaaagcttggctacttagtgacactcagacttttgacagagtggcttcccgtctttctcaagtacctgatcttcccagttatcctgattctcctcctctcgcgcttcggctcggactttgagcgcggcaacttagtcctgatgctctcaaagccactaacgagaaggcgctacttcctcaactgggtcattgaggggttaaagctcgccttagcttccactattgggatagtgctttcgggagctctcgcgatgttccttcacgacttcgaggtcagggactacgttctcggctcgctcgcactctcgctctcgctgatcggtgtaatcggaatcgccctcctcctgctcccgctcgcgacctcccgagacttcggagtcgttctcggcctcggggccttcgtcatccttgccctcgcgggagggctggactattcgtttatcccgacggtttatctcggaaaggttctttctcttgaaagtgaaatctcgatatctcacaggtccgttggagagcttttagccctctcacttgccctctcaatcgctggaatggagatcttcagactgacggagctcagaggatccagatccctacccgcggaagtgcccgtgggtgtctcctccccactgcgcgggctttacggagtcttcctcggtctgagcctgcagagcaagcgcttcattgcctttgcagttttctcaggcttgatggcactgatgaagttaccctccctcagcaaaggctacacccactacggccctgcaggccttttgaactcgctcattttcaacctaagcggggttcccctgcccctcgtggttctcccgctcggggcgctttcaataagctcgaccgtggagaacggaactgccagagtcctgctcagcaagcccctaaggagaaaggacttcttcctgggaacgctcctgagcgacgtggtggcggtcttcctcggcacggccctttacgctggggttctcatcgcctacgccgttcacctcgggggtggaaggagggccgttgaaattgggctcgtcttcggagttctcctattcctctcgctcctctactaccttgccctcggctacctgctctcaaccctcacagggggcagaaaagcactcctaacctcaatcctactggccttcctgctggacttcgcagtaccgatagcatttatggcagtgtttggacgctctgaagagttcgcgagaaaggccctctacttcccggttccagaggttcagcactctgtcctagcatcggcggtgtctccgaagaaagcactgccgccagggccactggacagtattttagactatgaggcaaacttgcttatgctgatcgtcccaacggtactttacctcgtcgcctcttggttgaagttcaaaaaggcagacctgaggtgatataggtgtggagtctaaaactagaagctgggaacagcatacggcagaagaagttctggctgataacggctctgatggtgctgatctacatcatggctttttatgaaatccaaggcaaccttgagagtgcctcgaatcctcaggaagtcctggcagtgagcctcgtagaatacgtggtagcgggtgcattcctcttcatagggctctacgcgctcatcgctggggcaaccgcgctgaactccgaccttgagaacgggacgataagactggccctcagcaagcccataagaagagccccctatctcttgggcaagttcctgggccagtcggtcagcataatcgtggccattctcatcgccaccctgctctccttcgttataacaaagtactacggagtctcgctcacggggaagctgatctccgacctcgtgctggccaacggtctcatcctcctggcgatgctccagctccttgccctgggaattcttatatcgagcgtgatacgctcccagaacacggcccttggagttgcccttgtcctattccttgtgacttccctggtgatgccccaggttgttgatgggtgggcagagaagaaagcggataaggaattcggaatccagaagaggggagattttctcaaattaaccccggaagaggcctcggcgtaccagcagaggcttgaggagcttcaggaagagtaccacctgaagtacctcttctacgcaccccaggtaatgatgatagaggcgtttgaagacatagaaaaaatctcgttcaataacgacggaacatacacgattgaatacctgggggtcagccactccatagccaaaaatccggccccggttctcataatcctgggcctcacccccgtgtacctcgcgcttggattagtcaggttccttaggatggatttgaggtgatggtttgtgatgagagttgagaatctcgtcaaattctacaaggacgttagggccctcgacggccttaaccttgaggttaaacccggccaaatctacggcttcctaggcccaaacggagcaggaaaaagcaccaccatcctcagcaccctcggcctaatcttcccacaacaaggccgcattcagctcttcgacctagaagtcttcagggatggaaaattcgacgagaacaacctcgtccaagcaaagaagagaatcggctacatgcccgagcatgcgaccctctgggactttctcacaccagtccaaaccctcgatataatcgccgacgccttcaaaattccgaaggccgagaaggagaaaagaatcaaagaactcctagacttagtcggcctaagcgaggctaagaacagaaaagtcggcaaattctcaaagggcatgagacagagactcctcctggctcaggccctaattaacgacccggacctcttaatcctcgacgagccaatgagcggcctggatccaaagggcatcgcagaattcaaagacataatcagggagcagaggaaggcgggcaaaacggtcttcttctcaagccacatcctggcccacgttgaggagatctgcgataccgttggagtcatcgtgaagggaaaactcatcagggaaggaagcttggaagagattaagcgcgagttccttgagaaagcgggctacacgataattctggagacgagcaagcccgtcgactggagcagtgctccctggcgcgcttcacccctcggcgaaaacaagtacaggattgtggccgagagagacatcagggaagaactccacgactacgtagcaaaacaaggagcaaaaatactcaccctacaaatcaaagaacccaccctcgaagaaatattcctaaaaatggtggaatgaacccttttctttcctttttgacaacgataatgacagggtattcctggcacccagaaatagctaagtcagtgagtaagagaacaaaaagagtcagaagttcagatggctatcatcgtcgaggtcatctgaatctcgggcatgcgccttatcttctcggttatgaactggtcaaggtccttgagcgtctcggtctcgaccttaacaacgaggtcgtactcaccgtaaacgacgtaggcctctttaacttcgggcatggcaagaagcttctccataacttccctttcctttccggcggccgtaaccatcagaataaaagccgtcaccatggctatcaccaaaaatattttatcgccggactatttaagcttatcgcgtatgacgttcgaacacatcataagtagtaaaaggctggaaggatttctaaggcacctggccgaggagggcgttggaggcgttgagccactcgccaaggggacgacgagcctagtcttcactggagttttaggcgggaggaaagtcgtgataaagcttcaaagaccagactcaccgaggagcaacttcgaaaaagaagctgaacttaccaaaattgcctccacctttggggtaactcctccgatcattggccttggcgagttcgagggccttccctacctcatcagggagttcgccgagggtgaacctatcctcttcgcggacgtggaaaaggagcatctcttcaggatagtggagaaaaccgcactcctggatcggctgggcatagaccacgggcagatacagggcgggaagcacatcataatcggcgaggacgtttacttgatagacttcgagaaagcagggttcaggaagccaaacaacctgacctcggcgatggcgatgattttcataggtgagaacgcaatatcaaagagggtgcgggagaaatttggtctcgacgagaagttcagggaagaaatgaaagatgccctgaggcactacaagagaaccggaagcctctcacgcctcctgagccttctttctggtctttagcctgtccgcgtatagcgctatcagtggaaccgccagcgccagtattatcaggcccgcccttgggtcgaaaaagtagttgaaggccagtatgaccgccgctgagataactatcatcaggaagaggtccctgtcgtagagcctggacttcgccagaatgttctgctccctcgctgtgtaggccagatacgctggaattccaagcgcggcgaacgctatgccgaggtagttccttgttacaagtgagattccaacgcccaacgccagtatgattccaaccgcggttgtctccctcatggagaaaaactacagttttggagtttaaaaccttccgcaaacgatataagcttcggctcaaacataattcggtgatatcgttatgagcagtatcgaatggaacgagaagaccttttctaagttcgcctacctcggcgatcccaggataaggggaagcaaagttgcctacgttctcacgaaggtcaacatgaaggacaacaaatacgagagcaccgttgtggttgaagaccttgagagaggaaccaagaggttcgttgagaacgcctcaatgccgagaatttctccggacgggaaaaagctcgcattcatgcgttccaacgaggagaagaaggagaccgagatatgggttgcagatattgagaccctcagcgcaaagaaagtcctctccgccaaaaacatccgctcagtccagtggaacgacgactcgaggaggcttctcgttgtgggcttcaagagaagggatgatgaggactttgtcttcgatgacgacgttcccgtctggttcgacaacatgggattcctcgacggcgagaagaccaccttctggatacttgacacggagagcgaagaaatccttgaggagttcgagaagccgcgcttttccagcggggtatggcacggcgatggagtagttatcaacgtcccgcacagggaagggagtaagccggccctcttcaagttctacgacatctacctatggaaggacggagatgaggaaaaactcttcgagagggtctcattcgaggctgttgattccgacggaaaggccatcctcctccacggaaagagggagaagaagttcatgagcgagcacgactggctctacctctgggacggagaacttaagcccgtatatgaaggtccgctcaacacagggagtgcaaagctcgacggcgggaaagtctacttcacggttcccgacgctggaagggtgaacctctacctctgggacggtgaagttaagccgctcatcgtcggcgaccactggataatgggcttcgatgtccatgacggaaggatagcactccttatagagacagcaacgaggctaagggagctctacctctacgatggcgagcttaagcagataaccgactacaacgggccgatattcgcgaagcttaagaccttcgagccgaggcacttcctcttcaggagcaaagacctcgagatagacggctggtacatcaggcccgaactcaatgagggagaaaaagccccggtcatagtcttcgtccacggcgggccgaaggggatgtacggccactacttcaagtacgagatgcagctgatggcgagcaaaggatactacgtcgtctttgtaaacccgcgcgggagcaacggctacgatgaagacttcgctttgagagttctcgaaaggacgggcttggaagacttcgaggatataatgaacggcatagaagagttcctcaagcttgagccccaggcagaccgcgagagggttggtataacgggcataagctatggaggttatatgacgaactgggcggtaacgcagtcagacctcttcaaggcaggcataagcgagaacgggataagctactggctgaccagctacgcattctcggacataggcctctggtacgatgtcgaggtaattggccctaacccgctcgaaaacgagaactatcgcaagttaagccctctgttctacgcagacagggtgaaggcgccgctcctcctcattcacagccttgaggactaccgctgcccgctcgaccagagcctgatgttctacaacgttctcaaagaccttggaaaggaggcatacatagcgatattcaggaggggagcacacggccacagcatccgcggaagcccgaagcacagggccaagcgctacaagctcttcatcgagttcttcgagaggaagctgaagaagtacgaggaaggctttgaggttgagaagattctgaagggggactcctgacgctcttctcaccttatttttccttgacagtgcaagggcttgagagttacaatatctgaaagtcatgttgaatcctacccagttctgcccacctctgaattgatttgacacgaaagtgttaaaaaggccacccaccaacccctccgctacgttaaataatcggaggtcaggtttatggccggcgaaaaacaagagaaaaagctgtattatcacggcctaaaggaacagaagaagatcgacgtatcgaagctgaaatacctctcccttctgctgtcggtgattggggtcgcggtgctcctggtggctgctcagagcgcccaggccccgctgatgaaggtcagcgacgtcactggcaactacatgatgaactacgccgtcgtaaggctgagcggaaccatctcgagcgttccctacgtatcggaatccggcggtaagctctcgctgacgttcacgatagacgacgggactggtcagatggacgtcagggtttactcgccgctcgcggatgaaatggttgaaaagggcgtgatcccgttcccgggagacaacgtcaccgctgaagtgcagctccgcgttagggagacctacacctatgcgatactccaatatctcgggggcctggaatttaataacaagctctattccgagagtcccaaaacagtgatggagctcaccgagaacatgagcaacacctacgtcgccgttcagggcgtcgttaccgagttctccaacgtcagctccggctacctcctgacggttgatactggagttgcgcccgtgaccgtcctcataccgagggttctcctcatcaaaaacaacgtttctgtgaaggttggagacacggtttatgctcctggtatcgtttacctctacaagggaacctcccctgaaatcgtcgtcaggtcgcttgagcagttcaacgtgacgccgatagagagcgcgccgctcgttccgctggcggaagctcctggctacgtcggaatggtcatgtcagttcagggcagcctcacgggaataacctacgagagcggccgctacgtcctcacgctcaccgacggaaccaactacctcgaagttctcgtcccgagggaagtcctcgccaacctcaacccgttcgagctggcaagcggaagcctaatcaaggccgctggaaagatgggtgacgacggcaggctcgtcggcgcgtatctaggggtcattgaggccgtcaaaacggagttccttccgattggagttttaacacccgacatgaagggcacgatagtggcagtcaaggcgaatattgaagacgtccagaacgtcggttcgaacctcaagctcgtcgtgagcgacggaacggggaagatagacgtattcataccgtcggccgccctcagggagctctccaacgagaccctagcagacctcaaggaagggctcggcgttgaggtcgccggctacctcgacgagtaccgcggcagcctggaggtagttgtctacacgggcagcggaataaaggcactgggaaggccagtcggttcttcagaagtcgagcttccaaaggttaaggcctcggagcttggaaaatacactggaaagctcgttgacttcgtcggctccctccagggactcacctacgccaacggaacctactacctgaacgttgacagcgtcaccgtctccatttcgagggacgtcctgatggcccttaacccactcgacgcgggtgaaggaagcgtcctcgtcataagggggttcgtcaaggatccgaacaatctcaagggagagtccctgaccgtgcaggctgcggttccgccagttcagataaagcctgaggacgttacatcggacatggtgggcaaagtagtggccgtcgcgggcagggtcacggacgttgcgaacctcagcggcaacctcaagataacccttggaagcctcccggtgttcgtgccaaggactactgccaacgagctggcctacgtcccacaggagggcgacctagttgagataggcggctacgttgagctctaccgcgacgagcctgagattgtcgtcttccacccagaggccatcagaaagataggggcgagcgggccagttgagggaacggtatctgacctcaagagcgcaaccgagccgctcctcctgacggtcacatgggactccctctcctatgagagcggagagtactaccttggaatccacgacgacacgggaagcacgaccgtgacggcaaccaaggatctcctaccgaacccgctcgaagctgccactgggagcactctcaaactcgttgtcgacccgctctccggcagtgtaacctccctggagattgcaaaagcagttccaccgaagctttaccagactggagaggttacgctcgacatgaagggtaaggtcatagcactcaacgcgacagcagtcaaggtagcggcagttggagacaacctcaagctcaccctcgacgacggaagcggtgggatagcggtgttcataccgaacggtgcagaactgagcgttgacgagggctcagtggtctatacggcaggctacgtggaagagtacaacggtgcaccggagctcgtagtgtacaccaccgaggcagtgaaggtcgagggagcaccatcgcaaggaggaactgagaccaccaaggaggtcaccgtttcagagctttcctcagctactggccaggtgaaccttaccgtggtctgggatagcttggactacgacaacggctactacatcaccgtcagcgacgatacaggaagtgccacactctcaatcagccgcgaactcctcccgaacccgttcgaggccggaacgggaagcaggatagagataacctacgacgccgacgcaaagaaagtggtctcactcaccgtcatcgaggctataccttccgagacttacaagactggcgacgtcaccctcgacatgaagggcaaaacagtaatcgttgagggcacgatcaaggacgtttacgaaggaaggactttcatcaagctcacgatagacgacggaagcggggagctggttatcttcatcccgaagagcgtcggaggagacctaaccttcagcgagggacagacgataagggtcggaggctacgtgactgagtacaaggggacggttgaggtcatcccgtacaccgccgatgccatagaggtgaggtgatggccgtgctccccctctcagatcttttaatctggtcgttcgccggcgtgctcttcggctcgctgatatcctggattccagggttccacatctacaacatcatagccctactggtggcggtcttcggcgtgggtgagctcatgccagtccaggcgttcccgttcttcgcagtgggagccatagtcgcttacgcctacgtgagcgcaatttccagcgtctacttcagcgttgctgacgagagtgcagtgttcctcctcttcccgacacagaggtacctcctcctcggcagggggcatgaggcggtactgctctacctcatcggggccgttgcgggaacgctgatcctcgtcctcggaatgctcttcgtattccccaaggtgctgccgccgatataccaggcgaccagcccgtacatcacctacttcctcgtggccatcgtcctcttcatgttcatgagcgagtggcccaaggaaggcgacaggggcaagacggtgaaggaaaggctctggcttgcctggaggcagatactcggcggaatcttcgtgttcttcctctcggggatactcgggttcatagtcacgaacaccaacatcctgccagcgactagtgcttacacgaggctaacgccgatgttcataggcttcttcggaatgtcgtgggtgatactcaacatactctccaacccgccgatgctcccgcagaagcccgaggacaaagtcgagagcagtatctacaacaccctgaaggccagcttcggaggtgccctcggagggacaatagctgcagtttatccgataatcactggaggtatgggagcaatggtagcggggcatatgacgagccagcgcggcgacgacgcattcatcatcagccagggcgtcaacagagtcctctactacgtcggggccttctcacttctcttcctgccgaacctgaggctcacgaggggagctggagcgtggctcgtcagctccctctacacgcccaagagctactcggagtacatagcggccatcggcgtcatcctgctcgcctctggaataagcttcctcttcacctacgggctttcaaggctcatagcgaggagcttcaacgtcatgcacatcaagaaggtctcctacttcgtcgcggcagtgctcgtcgttatctcctacctcctgacgggctggatgggagtggtcgtgctcttcgtctcaactgccatcggcctaatggcggctgccttcaacacgaggaggagctactgcctcggcggcctcatactgccagtactcctcagcatgaccggacacacagaagtgttcatgcacctgctcggactggggtgatgtgagatgaggggtttcactcactacatatcgggcctcgccgcggcgaccttcttccccgccctagttgccgacataaggatgggcactctggcagcggtcatagcggcggcttcggcttatttccctgacttcgtggacttcaagttcggcaagttcttcgcgaggagggactacgagatagacccggctccatgggacgagaagaagcactacgcgcccaagctcgttaaaataaaggatctgagcgagaagaaccgctaccagttcttcgccatcgagggtagggtcgaggagatactcacaaaaggctcagggacgatgtcctacgaggtctttgatgagaagggcaacgtgaagacggtaacggaagagtacaacacgatagtcttcatcctcaatgacgggactggaaagataaccgttgaggcctttggagacgactacaagatcttcgaggaggagttcggtcagatcgaagagggcaaagaaatgctcgtgttcggttacgtggacgttgatccagacggctcgctgaggttcgtcgtcagcgatgccccgcacccgcagggaatcgccgacatcatagccgaggcaatagaaaaggcctacgaagagggcgagaagatagtcaagatacacaacatccgccttccgggagacgtttacaggcagttctggatacacctcgacccgccgaagagggaggtaagggtcgagatggggccgatagtcacccccggtggggtcgccattgggggcgagccgccggagtacaggaagtacggaatagcgagggtgaacgtgccgttcatcaagacctacccgaagccgacgagaatagactcgttctcagggccagagatagccttcagactcacaaaacaccagggcaagacggtggtcaaggacaggttcctgccctggcaccacggcttcagccactcgatgacgatgggagtgataatcggtgctgtggtcttcctcttggcgaagctcttcggctacagccacgcgactgaccttgccctcgcctcgatgataggccagtggctccacgtcttcgaggaccagctgggcttcatgggcagcaacctcttcccgccgataaccaaggacgtcattccaggatttaagcttggagagagcggcagtggacttaccaacttctcgacggcctggctcatgatagcccttatgatatggaacttcaaccgcttcacagacccgaggccgataccgataagcgacgcaaggctgctcctctacctcatatggccctcgatcataggctttggaatagccatagtcaggagcatcaggctgagaaaagagctggctaaactaatggactactacaccaacctggaagccttcgaagagctggaagaggtcggcgggatttaatcccgctggctcgcttttactcccttttcaggctttcttgccacaaccccaagcgcttcctcgacccttctaacgccgacaaaaccgactctcctcagcctttccatgactcccttttggaggtcttttctcctgtacttcttccccgggttgcctacgtagtggaagagccttccaccaggcttaagaatcctgaaaagctccctgtagaactcctctgagtagagatggcccgccaatgagaagcgcggggggtcgtggatgatcacgtcaaagcttgcttgcttgaacttcttaactacctcaaaggcgtccccctggatgacctggattttccctcccgtgaacagctccctgctccaggggtttatcctcgctatttcaatgacgttggggtctttctctatggttatgacgtaggctcccctctttgatgcctcgatagcggtgtaacccagccccatgcaggtgtcgaggactgtttcaccctccctcggcatcacagtgttcaccttgttcctcgtgtcctggagggggttcatctcctttgttcggtgcattcgaataccgtttatctctatcgtcggtggaatcgttgggacgagcttgtaaaagcctgattcacccgctatggccgctttatacaccccaccgttagaaacgaagtagaccgtcccatcgtctctggctatcttctcaagaacttccctctcaacgagggtaccgtccggaaaaaccgctccttcatcttttatctcgacttcttggaccctgttagttttccttaggtcgaggttgagcttgacatttccccttgaagcgaggagcattctggcctctctgaacgtgatgtaataaatctcttccatgttccgaaatttgaaagggtgttaaaaaggcttcgcctcaaagctggagggttgtcccctcctcgtcaaggtttagcgacttcagtatcctaactgagctgtcctctatcctcaggacgcgcgtgaaggcttcttcaagaagtgcaaggtaccccttatgcgcaagttcataattcacgaagtagaaagttttcctgtgcggattgccaaggaacccagcggccgcgttcgcaaggtagagaacgaacgaaggtctgttgtcctggaggggaataatcctctcggggttcattataatcgtcgtcacgtttttgtttgcgcggtaataactgaggaggttcgaaaggaacttgctcatgaaaatccccggatccttatgcggatccacgtcaattacaatcctcccccactctgaagtgccgcccgcttttatcctggctatgctcttctcgggcacatctaaacccgcaaacttaagccacctcaaaacggggagtgcagagtctattatgtcaatcaccaggatgttgtcccacccgctattttttcctatctcgtagaagagcactgggtagggcgaaatagatgtgtgctcgacgagaacactttctcccggccttaaagtttctaagtactcaccgaacttcaacgctttcacccccgggtgtttttacgaggctgagatctgttcccctcagtcggagaacgtagtcatagtcctgttcgaggctcttggtgaggtattcgctagccactgaagtgttcaggaagataacgtccttcacatcaggatatttcaggtaccttctgtttatcttctcaaagtacctctcaagcttcgggggattgtccatgaaggtaaaagagaacttctccattccgaggactatcgtatgctttttgctctcttccggcacctttttggctatttgagcgtattttgccatatggtaatcaaaatcctctatctcatggacttcacctacgatgttaccaaccctcgtgttcccaatttctttaacaactgggaaatcttcaacctcgatgtttacccccatcatccgcaatttggacgtgaaaatatggagagtgtcgccaatgtccacaatcagaggtattatacctttctctctccagccggtaatgatctcagcgaacacaagctccgggtgatcgagggaagaatactccactaaaacaagccccccgccgcgcgcttcgatggtctcaaggatttccctgagcattgatgctcaccataatctattctggcgttcacctttataaccctttcaacccttcaagaagttgaatattttaccaaaactttcacgaaaaactttataggattttgaacctacaatgagcataggtgctgcaacatgattactggaagggttgaaagggttccaactggtatcgaagggtttgaccccctaatagaggggggttttgttaagtcaaagtcatacctcatcactggccctcctggaagcgggaaaacgacattcggtgtccagtttctggttgatggtgccaaaaggggcgagaaggtagcttacatatccctcgtccaggatcctgaagaggtaataaaggactacgagcgttttgatccggcagtctggaactacgtccagaagggaaacctgatactgtacgacctggggaaggagctctggggttcgaccgcaaagccgccccagtggagcagtgtcatgttcaggataaaagatcttgtccgggaaagcaacataactcgccttgtaatagacccgctcacggccatagacttcccgacttctgaccccgctgagaagagggcagagcttgccacgttcctcaggacaatgagtgccctcgggataaccagccttctgatagcagagctgaccgacctggacaggtacagcgaggagcactatctcgttgacggcgtcataatgctccactactacctggaaggcaacgatatggcaagggcaatccaggttctcaagatgaggagaacaaggcacgagaccaagatgtaccgcctggagttcggaccaaagggcctcgttgttagggggccagttttatgaaggaactgccgaaagggccgctcgacctcaaaaagattcttgcggagggagatcctgtaaagaaggcctaccttctgggctactttatagcgtactacggccataccgactgggtcggcgtatggcgtgagcttagagattccgtcttggagagcgctgaggagagcggcgtcttaaggaaggccattgatgcctaccgcaggggtaagaaagatggcgcacacgacagggagctggcaatcgcccaaggactgtataggccactttccccggaagaggttgagcatgaagtaaagaaaatacaggaaatcagagttttaccccctcaaaccagaatacccaagatgctcagagttaggctgacaggagagccgaggatgctcctgcgctcccagattatggatcaggttagaaccctcagcctgccaaggtttctcgggaggcgttaggtgattctctcgaacacccgttcgaagtttttgaatgttatcccctcaacttccttcttactgaacctctcgtggaggagatttaacagctccggaatctttgactcgttctcaaagccttcaacgctctttccaccccattccctaaggtagtacacgaagtcgaatccgaggcccacgtgctcatagcctatgaggtcggccatatattctatgtgctcaacgtacttctcaatcgtcggcttctccctgtccacgaaggagggtattgcaacggccccaacaacgccgtccctctccgctatcgccttcagctgctcgtcggtcaggtttctggggctgtcgcagagcgccctggcgtttgagtgggacgcaatcacggggaaagatgtgacgtcgagcgtgtcccagaatccagcttcgtttatgtggctgaggtcaacgactattcccagctcttcagcctttccgaccacttcaacgccgaacctggtcaggccgccgttggttctctcaaagacgccgtcaccgatggcgttcctgaggctccaagttagagtcagaactcggaggccgagacggtagaagacctcgaggagctcaatgctctcgccgatgggttctccaccttcgaggccgagccacagggcgaccctgccttctctgatcgtcttctgcatttcctcaacgttccttacaagctcaaagctatcgctttcgtcgatgtccttgaggagggtgttcaacacctcaagcccgtaggctgttgcgtcctttctccgttcgggccgcgtccagatggccataactctggaggttatcttatccccaaagaagcgatagtagttcctctcaagaacccttgttgccccgctctttttctcatcgtaaacgaacgtcggcaggtcggaatgcgcgtcgaatatcatctgctcaccctatctcaatagcctcgatgtcccttaaggtttgtgtccttagtattggatcggagattgcacccgctactttccgggctgcttcgaattctccctgctctgagaaggccagggctatcttacggagcgcttcatccctctttacttgatcatctatgagcctgacaaagtaaagggcctcccgcaagtactccagttctgtcagaatgagtgcaattgaataggcatttgaggggagaacttctgtgttctgaagctcgctcaaggtctggtttgtcaagtctatatattcggggtcgttcaccattttcatccacagtgcaacctcaagctggcccataagcactttcacgcccttaaacttacgccttatgagggccaaagcatagtgatacctgccttccagaagggcctttcgtatctcgggcagtccaacgttttcgactgtctttgtaagcaggagttttttctcaactatcgccgccctctgattcacgcggagcttgtcgaatatgtcaaaagctatcctgtaaaactccctcgctgttctcgaaggaaggtcgtcccccgttttttcaataatctccccaatctttatcagttcatcaaccttcgtcctgtagtcaatctctgcccttgctattaagtcgaatgcctcgtcaaaaagctccattgccccatcgaggtctccagtcattgctacactgcgggctatctccgccacgacctcccccttttcgagcgggtcttctataccactcgcctcttccaaggccatatccagatactcctctgcgccgtcttgatccccaagcttgaaaagggcagcacctatcagtgcatagccgaggctcttaacgtagctctcttttgagttctctgctatgtactccgcatcctcaataacgtcccatacccattctccaagacccttttccgccattatgagcgcaatcttagtgagtgccctaatctgttccactggatcgtagagttctggaaccctttggatggcctcatcaaactgtcccctctcggcaagggcaagtatatcatctatgctcatcatggatatatttttggtactcaatatttataagggttccttgaaatttcaaacctatggcaacgctgacccttgcattgtacaacacttatgacacaaaacgtttgcacgaagcccacctgagggcaatagccagggccgcgcccatagcgtatgcctacgggttccacttggccctcgttggctttccgctcgacggaaaaccgatggagatagcagaagaagtcagcaggcataccacgatcggagatgggggaaagtacctccaggaactggctaaggcaaacaagttccaccttctcgaattccctaagaaggggttccctccacagtttgggactccagttgcaacaactagaaaaccttggccggagaaggagataacccccctcgacctaacgagggaagcgctctcgggcagaagctttctcctcctcatagggcttggacggcacggcctgccggaggaaatctttaagattgcaaggtaccacatggatgtgactggaaagagaacgagcctcgaaacgtgcaccgcgatgggcgcgataggcgctagaatagcaacgtacatggaggcgttaaaatggaagagtggaaaaaagacgtcgcatgggtcgttttgacgatcatcatagtcgccggcatacactcgggcctcaggttcgtcctccataccgattcgcccctggtcatagtcgtcagcggctcgatggagcccgtcttctaccgcggtgacgtagttcttctgaagggcgtcaccgacccgtcgcaggtgagagtcaacgacgtgatagtttacaagcgcccaggttacccctaccccataatccaccgcgttagatacatctcaaccgtgaagctcaatggaaaagaagagacctgcttcgtcacgtggggggacaacaaccctgttcccgatccgccatacccaacttcacaaggctcccttgaagtccgtatgcccaacgggatgatagccggctgcgtccctagctacgccgtcgaggccaaggcagagctcgtgtttccgaaaatcgggctaattccgctgtggataagggaaagaatagggttatgaccttttaaggggatgatgtgagggtaggtggctgagaagtgatgacctaatcggccctgaccctacttctttccaataactattccagtgactatcagaacgagccccagaatcgttgagaaagctattttctctcccacaatgagggatataaaaaagaggctcaggaacggcacaaggtaggctatgctggaggcgaatgccatatccccctcaaccgccctataccagagcaggaaagtgacccccatctcgaagagcccgacgtaaactgcccccgccaggccttccagcggcgggagctggaattctccgctcaccagaaccagcgttgaaacgtaggcaaacccgaagagaaagttccagaacatcttctccacgaggggcctctcgtcgcggaggttcaggagccagtaggaagcccagataacggcactcccaaggccgagtgcaacccccagcgggtcagagaaggtcagggacgtaagctcaccctttgtcgcgataaccagcgcccccgcgaatccaacgaggagaccgagcactgttctcggttcaggtctccttccgaggagcgggatggagagcaggacgagcattaagggccacgtgtagttgagggcctgagcttcctgggcgggcagtctgtcgtatgccgagaagagaacgagatagtaaaggaaagggtttataagcccaagatacaccgaacggagatccctccggtcgagagaaaactcccgggaatggagaagtccgaaaaccagcagggaagttaaagacgcataaaacagtagctgaagtggagtaagatgcctaagcgagagcttgaaagcggatgcgaccgttgaccagaggataacagcgaggacagcatgtttctttgacatcggagaaaaaaatgagagggaacttaaaaagctcactcctccctgaaggcgccgtacttcttggggtcgtagaagggcggagcgactgtgaccgccttcttgggcttgccccttatctcgacctcgatttcaacgcctggaaccgcgtactctggcttgacgaaggctattccgatgcctatgccgaggagaggtgagagcgttccgctggtgacctcaccgatgagctcaccgtccttgtagaccttgtagccctccctagggacgcctttgtcaaccatcttgaagtgcaccatcttgctcggcagtccgcgctccttctgcttgaggagggcctcctttcctatgaactccttgtcccagaagatcgcaaagtcgaggttggcctggagcggggtaacctcgtctatgtccgtgctgaggagctgcttctccttggtctcgtttccgtacagggtgtatcctgcctcaagcctgagggtatccctcgctcccagtccggccggctttatgccgtacttttcgccggcctcaaggatggtcttccagacgtggagggccttctcgggctctcccctcttgctcgggtctgggtggtacgggtttgcatcctcgaagtagacctcaaagccgttctctcccgtgtagccgctcctcgaaaggagcatctttatgccgtcgagctcaacctccttggcctggaaccaccagaggtcgttgatgtctatgccgaagagctccttcgcgaggtctctagctttgggcccctggattgagaacatcgccatgtcgtaggtcttgttctctatctcgagatctatgtcgccgaacttttcaattccgcgcttgatggcgttgaaccaggcgtcgagcttctcgaaggcgtctgaatcacagaccatcatgtaggtgtcattacccatgttgaagacgagggtctcgtcctttacggcacctctctcgttgaggacgagcgtgtaggttccgcttatcgcgggcggcttgcttatgtcgttagtagtaacgtactggaggaactccagagcgtccttaccgcggaagatgaactcgcccatgtgggaaacatcaaagatgccaacgccgttcctaacggcgaggtgttcctcctttatgctggagtaccagatgggcatctcccagccggcgaactcctcaactttcttggcatgttccttatgccagtcgaatatgtgaactctcttgaccattgcaatcaccgataaaactccgacctgagcgttataatcctttccaatgcatggacaaatctaataagcattgaagtacaaaaatatactggggtgaccagaatgtttgagaagattttgtacccgaccgacttctcggatgtatcacttcatgcccttcacaactgcctccccgacctgtttgagctgggtgcaaaggagctccacctgcttcacgtcatagacataacggtcgcagaactccaggcctttgagcttgaagagatttacaaaaacaagctcgaagagcttgcaaaaactctcagggaaaaggggattgacgtcaagacttccgtgaggatcggcattccctcccttgaaatagcggaggaagcggagagcataggcgctgacctcatcatcagtccaagtgtgggcgagaacgtctggaggcagatgttcctgggaagcacggcttcaaacctcgtcagggccacgaggaggccagtgctcctcctcaagtactcaaagaaagacgactcctttgagctccccgtgaagtgttcagagctgttccagaggccgcttgttgcgctggacttctcagagtgctccgaaaaaatcacgaatgccgttgcaaagttcagggagctaattgaaaagggaatcctgctccactcggttgactacggaaaaatagatgagctggagagcaacatagaggcagcgaaaaagcgtctagaggaaattgcagagaaactcggagtggagttcgaaaaggaggttatggttggaacggccagtcaggccataataggaacggccctagccaaaaaagcaacgctcatagtcatcggcaagaagggcaggagcataatcaaggagctcatactcggctccacagcggaaagggtcataagggactcaaaactcccggtgctcctcgttccgtgtgaatgagacctcagactggaacggcttccacatcaacttcggtagctaccctgttgccatcatcggtcggctttaacttttttcagtcctttataaacctactcccgtttgctctcgcccgtcatcacggcgcttgctatcatgtgagccaaccttaagggttcagggataaaacccgttctcgtcgtgaccttaatcacctcagcggccgttttctcgtctaaaccaacagtttggaagtagagcttatccggtacaagttcaacaagagggggagtctttctgagcagggctattctctcttccgcatcacggaagtgctttctcagggcatcttccattgccaggatatccggtttcttcctaacgactaccaccacggggagacccgtctcgttgtggagcctctcaaggtcaacgacgttgaacccggcgtaggttatccctttgagaaggataaccctcaagtccttgaaccgtgatgagttcacggagtttatcatagcgtcggtaacgtcccttccatcaacggttatccagcgcgagagaacgccaacgacctcaagggagcctttcatcacgactccaatcagtatcgtcttttcatgcttcagctttgaagaaaaggagaaggtgccgtcgtcgaagccgagtactctgatctggggcttaacctttcgtatcatccgaagagcaccctcgccatccactcggagtactcgcggttgagcttgtcgagatcaatcctagctatcatcggaacatcgtaggggtggagctcctttatcgtctccctcagctccttccacttgctaacttcggtcttgtagatggcgccgacttccttcccttcctcgatcttgccctcccaccagtacatagcctcgtgctccctgaggtttgcgcagactatcagctttctttccaggagctccctggtgacctttctggcgctctcccagtctggaaacgtcgtgtaaacgatgatcgcctccatatgcccacccaatgatagatatcgggcaaagcttaaatcccttgcgggagattttagaacgggatgtgtgatgaagcgggtaagggcacaccttagaatatacggaagggttcagggggttggttttcgctggagcatgagccgggaagccagaaagcttggagtccacggatgggtcagaaacctgccggatgggacggtggaagccgttatcgagggcgatcctgaaagggtggaggctttaataggatgggcgcatcaggggccgccgctggccagggtcacaagggtcgaggtaaaatgggaagaacccgaggggctggagggctttaaggtcgttgggtgagactctcaagcagcaccctcttcgggcagtacttgacctcacagtagttgcagacgaacttctccttatccttttcaggtgtgtggagtatgagcctcttgaagcctctgattgtctttattttgccaaatgtctcggttgagagcgttccatctatgactatgtaaatcttgcttgtttcttcccctgaggttccttccaaagacctccatgatgggggtgttgtcttcggcgagcagcctgagcacgtctgaaaacgccatctggtactgatccttctcaacgtctatctccaggacttcccagcccataaggggggcgacgtctatcaggctcgggagcgggttcagtctctcaaacacaagcttaaaggggtaggtcttttctatgtactctatcgtatggtagattatcttcctgtttacgccgattgcccttgccagctcgcttatcggtacctcgacgttctttatgtagattttaccgttcttcacgctcagtccgttctcaaacaggaactccgcgacctttctcctcgcgggatagttcttaaaataggcctcaagtatgagcatcatctttgttcacctcttactcatatgtgggtaggaatggatatttaaatcttttccccaagtgttataacctcccagtgcaattcccaattttggtggtgaaagtgaagctggacgtcatcggcatcggcaacctgaactacgacataatattcacgctggaacgctttccagagttccatgagaagatcaatgccagaggtgcccactttggactgggcggtgcagcagccaacacgataagctggctcgcccacttcggccttaaaacgggctacataggggcggtgggaaacgacgacgttggagagatgcacatcaaatacttccagggcatcggggttgataccggcggaatagacgtcgttgaagagccctcgggcgtggcagttgcgatggttgcaggggacgacaagagaatagtcaagtaccccggggcaaacctcaggaggaggttcaagcccgaatacgcatcgagggccaagtttctccacctctcatccaacccgccggagcttatagaggaagcagttaatttcgcgagccagaggggaataaaggtctccctggatataggtgaggcgccgctcccgcgggagcttgagagcaaggtggactacctgatgatgaacgaggacgagtacaggcgcaagtacgggagccttgacccgagtctttgcagggccaagaacctcgtggtcacgctgaacggcggtggtgcgctcgtcagggagggggataacgtcttcgaggtcaggggtctgagtgcgaaggtagttgattcgacgggcgctggagattccttcgatgcgggcgttatctacggcgtcctcaacggctggtccctcctcgactccgccaagcttggaatgctgctcgcgtacctgaccgtccagaaggttggggcgaggagcgccatagtcccgcttgaggaggtaaagaggatagcaagggaagtcggcctggatctgcccttcaataggacttgaggccaacgattctcgcctgcttttcactccatttatagatgagataccccagaacggaatacagaagggatatcacggcaaggtaccaaagttcgcccgtgcttgagccgtagccgtacaccacgacttttctcagggcctccgttgtcggcgcataggggagggccttcgccagagtttggagggccctgggaagaactgagagggggtacattgcgccgctgagggcaaagacgagcatctccaggatgcttatgaagggccccgggtctttaaggtagagcacgataccagcggccgccataccgagcccgaccatcccaaggcttccgaggagcagaaccgggagggctttaaggactaccaggaggtcaattcccagcccgaagagcagcttgaagactgggagatagatcgccatgtaaaggagcgagaggaagagcctaaccaggacgttgccgaggaagaacgttatcctcttcatcggggcggcaaaggagtactccagtgttcccgcgtacagctcgtcaacgacgctccacacaaagccgctgaggaaggtcagaccaaagccgagaaccaacagacctagaaccgcgaatgccacgtagtcggaatacccggtgagcctctggagggcctcggagttcctctttccggtaagtccaagccctatgaggagggcctgtccaacgaagaggaagcccatccctatgtcgctgatgaaccagaccttatagctgaggaacaccctccagctcttcactgcgacgccccagagcgccctgagttcagtaacctccataacctatcaccctggttaacctctctgcccaccggaacaggagataaccaatcagccagtacagtggggcaagaatgaccagccacccaatagagctggaggcctgtgaatatccacctccagagaatatggttctgacagttgagattgcatgagtaaggggaatgaactccgcgaaactccgcacccagttcggcatgagggtgagcgggaagaagacgccagagaagaacagcattccgaactcaaagagctgggcgaacgggcctatatttttcagaagcattacgaggcccgcaaagaggaacccaaaaccaagaaatgccagaagggagaggaaaatcaccgggagggatttgaggataatcacagcgctgagagggattttaaacagaaagacgccaaagagaaaaacgatgagcatgagtattgaatccatgagcatccagctgagggccaggccgagaaggatggccgtcaggctcgaaggggaaaggacgttcgtctcgaacgtacctctttggagttccctccgaactccccatacataggcctctatgggcgatgaagagacccaccagagggtatagccgatgagcgcgtacgtcgggtaatccccaagccctgttgaggcctccagaagcgccgagtacctcccgccgaggaccgcctgcccgaagtaaacgaactggaggagaaagactatgccgacgaggacggaacttataaccctcaggggatagcggaagaacatcctgaactccttttcgatcaccgccgatatcaatccctcagcccccttccggtcagctttatgaaaacatcctcaagcgtcggctcctttctctcgacggagaccactttaacctgatttttgacgagccactcgaccagctttggaaggtcttcctcgtcaacgctccccctaagcactgttctctcttcagtactctggacgactgcaagcttccagggggatttttcgagaagtgctggattgaattccctcaccgcgatttcaactgtttcctcgtctttcacgagctttttcaggccctcgggagtatcaagcgctatgatccttccgtggtctatgatggctatcctgtcgcagagctcctctgcctcgaccatgtagtgagtggtcaggagcacggtctttccctcttcctttacgagcctcttcacgaagtccctgacaaagagagcgctctgaacatccagaccaagtgtgggctcatcgaggaaaagcacctcggggtcgtttatcagggccttcgctattgcaagcctctgcttcataccgcgtgaatagctcatcacgaggtcgttccgtctctcccagagcccgaccagcttcagaagctcttcaattctcttctccatctcggatttcgggacgtaataaatcctcgcaaagtacttgaggttctcataggcggagagcctccagtagagcgtcctctcgccctcggccacaaggtttatcctcttccgaatttcccttgcatctcttatgaggtcgagtccgagtattttggcgctccccccgctcggttcgaggagcgtcgtcagcatttttatcgtagtcgtttttcccgcaccgtttgggccgagcaacccgaagagctctcccctcttgacctcgaagcttatacccttaactgcctcgacccattcaacctttcggaaggggaggggaatcttcttggggtagctctttctgaggttgttaacttcaacggccttcatatctctacccgactaaactcaatccgatatctaaaaaagttgctttcataacttttaaataggcaggtacaagactcattaagagcgaaatagaaaacccttaaaagagcatcgccttaatgatatggtagcagaaggggcttaggctggaggtgagtcctttggaagtcgtaatcgacaacttcaagccaaagattacccgtcctttcaaaaggaaaaacgagtactgggtcaagctcatcactgaggatggggagtacatcatgaagtttaaaagccctctggaggctgaagatgccatctatggaatgctcgatgaccttcaggtttacgggggcaaggtaaaactgaagctccgcgaggggaacgtgatagaaaaaatcgaggttcttgagctttacaagccctctgccaaggagcttctggacgaatactttaatgattgatgtccttttctgttcattatagtttctatggagacgggaaaggtatatatatcattgggccctatttttctattggagtttacccgttaaggcgattgtatccactcagaataaaatcaaactctgggaggctgctgtcagtggcaaagcgcaagaacaaggagctcctcgaaatcgcacaggagataggtggagaagaggccgttgaggtagtcaaggctctcgaaaaaatgaaagaggccaccgatgaagagctggcagaggcaacaggcataagggtgaacacggtaaggagaatactctacatgctcaacgacgaggggctggccgacttcaagagaatcagggaccctgaaaccggatggtattactactactggcgccttgagaccaaaaagctccccgaaataattcgttccagaaaaatggcggagcttaagaagctcaaggagatgctggaggaggaaaccagtgagatatactactggtgcggcactgaggggcatccaaagctcacctttgatgaggcaatggagtacgagttccagtgcccgatctgcggcaagatgctcatgcagtacgacaacacacacatcatagaggaactcaaaagacgaattgaggagcttgagatcgagctgggcctcaagaagaagcccagaaagacctcaaagaaaaagaagtcaaggtctgagtgaatggcctcttaatgaacttcggggatggtgaagatgcgggaagttgttattctggagaaggtttatggagacagaagcggctttgaaaagctgaacaaaaagctccgctcgcttctcggcgagcttgatgttgagtggaagctctcagctgttaagaagaactgggtgaaggtaaccctctcaggggaagacgaagaggtaagtgccaacctcgtcagagaggagttcggcgaagtcccctacagtctgaagaacgtggaagaaggccagagctaccgcggacgcttcatcgaccttggaaaggtcggctacggggcctacgtggacataggcgtgttcagaccggccccaaaggacgctttgttgcccctttactacctcaaaaagaccttcggagacattccggtcagggggatgatacgcaggtttggatgggttgataaccttccagtggaagtggaagtcactagggtcgagtttggagctagggaagtcgagctggccttcaccgaggagcagttgaagcgcatcaagtcatggataagtgacggattcgacaagctctttgttgtcggaaccatcagtgaaaaagtggaggaagcactcataaggacgggtcacggaagggacgttaagaggctggaggaactcggccttatggagaccctcctggttctgaagaagggcacccaggctcctggaatcataaaggccataggaccacacttgcccggagccgtcttcggggcaatcaaatttgaggagaagccctgatcagcctgacggcaagcacagatagagagaagagtgcataaggaagaagctcggatttaaagggtgttaaaagcagtagtatcccagtaacgactccaacgaacaccgttggaccctttttccggattttgatatcttttcttcccccaataatcttagccccaacatacaccagaactaccagctggagcaacgcttctttcgcgatattttcagttataatctcagtatggaatgctccaggataccaaggcgatatccaggattttccaagattgtaatatacccagagggctccaattgatgatagcagtaagtaaggaacgtttctgctgaccctacccgggaatactataacaaagacaaagggcaagagagccagacagggattgaaggccgttcccaccaccgtgaacagcgccatcaaaagcatcgaaaagacccccgaagaagagggggcgaagtttgaactgcacacaattgccaccacaaccgcgaaggccagcaatcccaatatatcgttcgaagtcaggagccactccctaaacgagggcgcggagagcaccaaaaagaacgccacaatacccagactgcgttcccttctatgggcagtgtaagcggttacgccgagaaggacaaagatcaaaagccacctcactgcccagaacagcctctcatcggggggaagaacttccagagtgtgggaaattattacgatgggcacatcattgataggggcgccgttcaaacgtgccagagaaaggtagagtgtttttgaaatcaggtgtgcagggattggttcgagtagaacccattcccctaaaagaagagcacccatcaggaaggtgcttccagcgtagctcccgtcccttcttaaaactaacatcaggataacagcataaacgataatgctcagagtaacaaccgcaatttttacagtgttctcttttatatcaacaaacggctcgtatgtcagataaaggttctcagagcttccggtaatcaggacagtgccattcagcacaatgattgaaggctctagagaagcagagggatcaaggccagtctcgttccagatcttggcaatcaggtcgtttgtataaacgttcccaacgagaacgaaggtatcgtttccgtgtgttttgacagcggagagcttttcatcgacgtaaacagcccatcccctcgaccatgggtcgttgcccggaacaacttgatacgtcagattcgaatcaagaaacttcacgaacgcatctttgttagggcgataactaacctcagcggctgaaacggagcccgccagcatcagtatgagaaacagagcaggaagagccttcttcatctgcctcccgcaattggtatgaaaaaggtgttaaaaagttaatgcagcctggtccagcgcggccccatcgcttcggctcccgccggcctgagccgcgctgaaaaggttgaaatgtaaaacttaaagggtttactcctcagctttctcgcccttcatttcctcaagcttcttaacgagcttctcagccagctccatgaatgcctttgccgccatggtgtctccatagaggactatcgggattcccgcatcgctggcctccctggccttgaggtctatcggtatttcaccgaggaactcaacgccttccttttcggcgagctttcttccaccacccctgccgaagaggtctatctcgttgccgcaatgcgggcagatgaggtagctcatgttctcgacgaccgctatgtagggaacctccatcttcttcatcatgttgacggccttcccagtgtcgagtagggctacctcctgtggagttgtgactatcacagccgcatcaagggggatgctctgggtaacggtgaggatttcgtcgccggttccaggcgggaagtcgattatcatgaagtcaagttctccccactttgtatctccaaggagctgttttatggccttggtcacgagggaaccgcgccatatgacaggctgatcctctggaacgaggaagcccatgctcatgaccttgataggagttacctgacccatgaagtccgccattggggggatcatctcaaaccttccatcgtccattctctcggcaagaacgtcggccttgtcaacgccgagcatcttggcgacgttcggcccgtgtatgtcggcatctaggattccaacgaaatagcccatcttcgcgagggcggcagcgaggttgaccgcgactgtgctcttaccaacgccgcccttaccgctcaggacggctattttgtacttccacttcttctgcttctcctgaatcctctgggtgagcggatcggcgccaagtccgcctatgttgagggtaggagctttgatcgtcatctgcaacacctccgacttaggttttcccaagggcttaaaaggtttgtccagaaatttgacagtactgcccacatttgagtaattagagggggacaacaaccggaatcccgtgcacctccccgatttcgacctccgttccgtaaacctccctgaacaatgaaggcttcaggatctcacggccaccgtccgcaacaacccgtccctctgaaatgaagacgaacctctccgcaaagcggatggcgaggttgatctcgtgcatgaccatgataacggttttgcccccagaagagagctcgcgcgcaagcttcatgacctcaagctggctcctgatgtcaaggttgttcgttggctcgtcaaacataaaaatctcaggctcctgtgccagggcgcgcgctatgccgaccttttgaagttcgccaccgctcagccccctggtgggccttaaggcgaggtgatctatccccagctttttcagtgcgtttttaacgacctctacatccctcttcgagggcctcaatcccatgtagggtcttctaccaagcagaactgtatcgaacacggtcataaaacccggttccgttctctgcgggatataggccacaagcctcgctagttcgttcctagagtactccccaattggccgtcctgagatataaacaccattgcacctgaggattccagagagacacttcagcagggtgctcttcccggcgccgttcgggccgagtattgcgacaaactccccatcctcaatcttcaggttgatgcccttcaggacttcagtgccgttgtaggagtagtgaaggtttctggcctcaacagcggtcatcttcgtccctccatcctgacgaggaggtatatgaaggccggagctccaaggaatgatgtcactatcccaacggggagtacagtgggggcaagtacaagcctcgcaacggtgtccgccgtgacgaggagtaaagcacctgcgagggccgagaggggtatcagaaacctgtagtctccccccgctatgagcctgataagatgtggagctatcaagccaacaaaccctataaccccaacgaaggccacactgatggcagttatcagggcggcaaggaaagtggatacgaggcgaaccctctctacctccacaccaacgcttttggccacttcctctccaactgcggaggcgttcaaatcccacctcttcacgatgaagtatgcaaacaccggtgcaaagaccaggagcagtataacgtcctccctccaggttgctcttccaaggtcgccgaagctccagtagaccatcgccgctagctggagttcatccgcaaagtactggatgaaggtcgttagtgccacaaagagggagctcatagctactccggcgaggattattgcctctggggaaagtcccttgagctttgccagcaaaagaatcacgcccacagcagccatggcaccagcgaacgcgaagatgaccactgcatacgggttgtcgagcgagattctaccggtgctctccgcatagccggcaccgaggattatggcgagagaggcaccgaacatagccccgtgggagactcccattgtgaacggactcgccagggggtttctcaagaacccctgcattaccgcgccggagacggcgagggaagcaccaacgaaaagggcggcaactatacgcggcaggcgaaccttccagactatgaggtaagcgtttccgccctcccttccaaggagcgtgtttatgacatcacccgtggacagtgagtacgaaccgtgggacagagagtacaggctaaccaggagtgtgagaagaagtaaaaagaggccgatgaggaactttctggcgatgtatccctcgtagtccatgggcatcacggtgaagttggcagtgagtacttaacggttccgttctcgaagtctatctttccgaagccgccgaactgctccttgagggtttcatagaccggctttccaacgaggaatgcatagatttcgtccgctttcttcactggatcaacgtcgctgaagcgctccgggtagagaacttttccaatgtagtaggtatctgctatagccgttccgaggttggtgttgtagaagttgaacgggagcagtccgtacaccctgccctcttttagggcgctcagtgccctgtagaagtccgggttcttcctatagtcgtcgaggattattttcaagccgccttcatcgatgaagaggtagtccgggtcttccttgaggagccactccttgtcaacggtcttccagccggggccgagggaagaggctatgttggtgaggttcagcacttcgaagggggcgtagtcgccgtaggtgctctctattccgtgggcacccttgtaacctatcccacctacgtaaacccttgggctcttctcacccttcatcctcttctgcaggtcttcctggacggagtttaagaagtcaacgagttcctttgcccgcttttccctgtgcagtattttacctgccagctgtattgattctatgagctgaggatcgttgaaacctttcattcctcccctcgcaccgtagctgaggacaacgactggaatcccagtcttctcctgaatctcatcggcctgctccttgcttatgaataccgctattatcacgtcaggggagacgttggcgagtgcttcgaggttgggaagctttccagggcctcccgggcctatgctcgggaggttcttcagctccgggtgagcgatgatgtagggccttccgtaggagtacttcttctcgaagtcctccactcccacgaccatattgctcgcgttgaggtagacgatgagcctaagggctcctggcccgatggcaacgaccttctggacattcacaggaacctggacgattctgcccagggagtctgttacggttatgtactgctgtgaggctttctctgccccatttgaggaagtacccacgcaaccgcctgcaagaactacgaacagcaccagaagaactgccatcaatctcttcatttcaggccctccattcgagtttggttatcccccctgggattttccggggatagaactggtgagttttcaaggggtggaacactccgactcggagtttccctatgtactggagcacaattcccatacgatcatcgggcgtgttcttcattgtgtcaccgaaacccaatatagtaacacgatttaaatgctttttggaaaattagtgttcttaacctttggtttgtactgggttttaaaaatggcggggataactttcaatggtgatttcatgaagcgccttgagtattcagcacacctgaagtgggacggcaacgtcggaagtgaagcgaaggtgagggagtttacctttcacatagacacgaacacggacggccacaacaaaggaccaaacccgacggaatacctcttggccgctataggtggctgtctgactgtcaactggggcaggctgatcaagaagatgcgtctcgacgtgaagggctttgaggtagaggtcaggggctggcgcgggcttgacgagccccagctgaaggagataacctacaagatcaccgtcttcactaacgaggacgagaaaaagattatgcgcgttaaggagctggccgagaagtacgggacggtcttcaacaccgtcggggcggagaagataaagggagaagttgagataataaagccggcagatccgtgagcttaagatgatcctatggcatcttcttataaccgatgtgtccaaggagtaaaggcgtgcatatgcacaaagcttatatttgaaaaatgattcatggttgtggtggtgatagcatgagaatcgcgcttcctgtagatgaagaccttggactggaaagtccgatgagcggacactttggaagggccaggtacttcgccttcgtggacgtggaggacggcgagataaggggcgttgaggtggttcctgtcccctttgaggagcacggcccaggtgatttgcccaacttcataaaggaacacggggccgaggtcgtcatcgtctacgggatgggaagacgggcgatggaatacttcaaccagtttggaataacggtcgtaaccggcgcctacggaaaggtcggcgatgtagttaaggccttcatcgagcaggttcttgaggttgacccccactggaaggagaagatagagcgggagaaggaaaagggagggcactgcgagcactgattgtttccattttcattcccgttctctccattctttctatgctctttttgccatttaggggttctcaactgaacgttcaaaaaacgcttaaaaacaaaaatatggcgatttcttcaggtgaagaaaaatgagaataaacgtgagagattttgcaccgagctggtttgcgagcgttatgggaacgggagccctggcgctggtcagtaaggcatactcctcgaagcttccagcgcttggcacgttttcgaaggcactggtgtatttgaacgccgcggtcttcttcattctcctaataccctggctgctgaggtggatcaagtatccctctgaggcgaagagagacctctaccaccccgtaacgagccacttctacggaacgatgccgatagcgatgacgatagtggcgataaacctcgcaatggtcggccacagggaaatagccctcccgctctggattcttgggagcattctcgtcgtggtcttcgccctcctgataccctacctgtttttcgtgggtgagggggtagatgtaaagacgataacgccagcgtggtttataccgccggttgggcttatcgtgatacctctcacggccctgccgttcctcccgcagtcccaaacgtggagagaggtttttattgcgttcaactacttcggcttcggcgcgggcttcttcctctatctggccctcttcgccatagtgatgaggcgcttcataacccacgagctcctcccgcccatgatggcgccggcagtctggataaacctcggaccgcttggagcgggtgcagtggcgctgttaaacctcgttaaggtactgcccgttgcaggagaggctttcaagggctttgcctttatcctctggggcttcggactctggtggctcatcatggctatcctgatgacgctccactacctcagaaacctgcatctcccctacagcctcgcctggtggggcttcatcttcccccttggggcctacgtgagcgcgacctacaacgttgggacgagcctcgggataggtgcaatggtggacttcggttttgcactctactggttccttctggccctgtggctggtcacgggggttaaaacgcttctccacgacttttcctcgtgattttccatttttctccctaatcaaaaataatcagagaaccttgagaaccatcttcagcgctatcaggtagagaataacgccgattaccttctttacctgctcggaactcatcttgaagtgcatgagatgtgttccgagccagccgcccgttatagcggagattgaaacaacccctaggagcttccagtcgagagcgcccataccccagtaagtaaggaaaccgctcagggatgagaagaagaccaccagagccgttgtcgcggccacttttttcggctcgtagccgagcattatgagcgtcgggcttattataccccctccgccgacgccgagcagtccgccgaggaaccctgccaagcctccgatgagcgagccctctacgatatggttcccatctccgtccctcggcctcggcttgaagaagatcatcatagtgccagagtacaggagaaatattatgaagatccagaggacgtattctttgggtatgaacttacccgagtaggccccgaggggagcaaaaatcgtcgccataaccagtatcgggagaccgaagcggtggtcgagcttgccgtgcttgatgttcttgatcgtcgccgaaagcatcgagagggtgtttatgaaaaggccagtgggcttcgcaaccatgaggggtattccgagccacatcatagtcgggactattgctatcgcgcttccgactccgccgatggagaagatgacgctcaggatgaaagctatgatgccgactgctatgtagtccattaggctcatctcatttttgttgtcatgccaaatgaaatgacgctcatttaaaaagttttttaaatgttaaaacagatgctctcatattttagggagcacgcttgaagtggaagaattgagaaaaagagaaacgctcactcgcgcctcacgtccagcccgaaccacaccttagagcagccacctgagacgccgcagacgtcaaagtccagcgaccagtacttgctcgggattcctgatgtaacgtcccagtcgaagtagtcgtcatcgaagactatcgttatcccaacgttacccatcgggtcgtcgtcgttgccccactttccggcatcttcttcccagcctgagtactccatgtagaggaatggaaccctagcgtcgtcgcgctccagcatggccaagccgggcttcagggagagctcgttcccgctgaggtacttgtggaagagctttgatgccgagcagggctggcggttgaaggtcgctccctcgcttgagctcaccggataggagtaggcgtagccggctggagctaaaacgttaacctcgacgttgtggagcccctcagtttcaccgaggctctcaaagccagcgcaggccctcgcatagtagtaatactcgtcgtcccctatctcggtgtccttcgtgaagtccacctctaggagctccgccttgaggttgtcgtacttgagaagcctcggcacctccacctcgtaaatgacgtaggttacgcgcatgttgccgtccctcgattctgcggtcacgcggtagcccctggtgaagtcggcctcgttggggtggagcacgtagacggcgtttccgaccttgtcgggttccgctccagcaagccagttgaagacgctcccccagagctcgtccccgctctggcccgtcgccagccagttcatccatgtagctcctttgtaggcgtagtccgccaccgtcccaatctccccggtggccattcccacggcgaagtccgttaggtagcctaccgttttggtgacgtatttcccgggctcgtctctatcccagcccgctgtttcgaggactatgatcttgtacttcttcgcctcgtcaatgggcatcgcgaggatcggatagccgttcacgaagggcatgttgagagagcccgtcatcctatcgtcgtgatacaaaagtctgctgttgtcctcagcctcgacccagtggccgattggatagccgaaggtgtagatggagctgtggtttatcggccaggcctttccatcgggccaggtcattccgtaggcccacgaggagagctgtatttccccctccgcatagtccccgttctcctttacaaagacgtcctccacaacagccaccaggtagaggtcaacgtccttctcgatgctcattccctcgcttgcgtcaacccagaggttgctctttgctggaaagcgctcgatccagttcgtcatccagaagcggaacttcctccacgggacgaggctgtagaagttctctatcctgagactgaccttctttcccagctgggtgttctcaacggtcacgtttccatctctgaaaaggctcccggattcatctttcagctcgtagtttctatctctaacttcaagtatccagtcggccattccgtcgtcactgctatcaataaaccctgtgaatgacagccaggtgtccttcgttacgtagaactcaaaaatcaggtcgtactcgctgctcgtggtcctgatgctcactggctcatcctctataccaaagaaggcgctagtgtagtagtctatcctgccctctttggcctttatcacgaagctctccttcgatgggtaggtgaaggtagaaaacttggagctcatcggaacggcctccatgctcatgtaggtcttctccggaaagattgaggagaagttctcgaggatgaagctcgcagaggagcccttaagctcaaccgtcccctcctggagctttagagggccgtttccggtaatctcgtagagcgtgaagctccctccgcttatcccgccgtataggtggacctcccagcgcttcccgaactcgtctccctcgctcagcttcatcacggttggctggtacgttaccttcttccccgttacgggatccataatgaagggtacatgtatgtactgactaaggaggctctcgttcttgaagtggagcgttagagtcacgcttttcccgggttccgttgatgacgtggccagaccaacccactcgataacgtcctcctcgcccggaacgcttgccatagagctcagagggccaacgtaagtgaggttcggcgggtttaggggcaccagctggagaacgggctcgagtgttatgttgaggagaatatcctccggcagggagaagccggggccgctcccatcgatggtcttgttgtcctcgcatccaaggtcctcgtccatgtccccggtacatatcggcaatccatcctcgtcgaactggacactcccattaggcgtcggcgtttccgtaactgtccccgtgcccgtctcagtattggtttgagtgaccgtttcagtaacagtttcggttgtggttgctgtcccagtgtctgtctcgcctatatgatcagtggaagtgcttacgctcgttccagtttcggtcgtctggccccctccagtggaaacggggccgttctccacgcatccgcctatgagaactaacccggctagcaacataaaaaccagaacacggtaggttcttttcatcacgacacctccgctccaaaccggagcagaaaagaaaaactggatgcccatagcggtttggattgcttttattttgtcgtcattttatttaagagttttctctagcttccatttgcctacatccaaagcttctggacacttctgcccaaaactcttggttgataacctagatatatgaaaaatattttaaatgaaaaagattcagcataaattgaggtgggtgaaatggccgatgttaaggctcccgtcatcgggagggacgctctcgggagagaggttaaggacctaagcgttattccgtggtggggggttgatagaaaggagatagagtggtatccaaagataaactacagcgtctgcgcccgctgtggcctttgctttataacctgtggacggagggtcttcgactgggacaccgaagagggaaagcccgttgttgcgaggccctacaactgcatggttggttgcaacacttgtgcaatcctctgcccatgtaacgccatagagttcccaccaaaggagtacgttaagaagctcgtcatagagcacgggatcataagaaaggcctttgagataacaaagcccctgacgaaaaagaaggaagaaagcacgaacggagctgagagcgtgttcaatccttgagaaggtttagaacgtctttgacattttccccggattttactttaattatcttaacgccccccgcctcaagtattgcctttcccttcgggcagtccataggggtcagcagtacgttcactcccaggttgaccagaaacatggccaccttagaaccagctccgtagggctcctctcggtagggggttctcgacaatctccacgctttttacttctccatccttaagctccaccagagtgaaggtctcggccctcacgaggctctcatgcactctgtcttcaagcccacctctggatgttgggactgctaccctaatcacctttctcaccgcagatcgtgtttttatcctcacaccgcccagcctcgagctgaaccgtcacgtgggttatcccgaagcgcttaagcctctcctcaatctcgtctattaacctctgcgcctcgcttatcggcatgtcgttaacttcgacgtgacactcaaagtggatctccttctcccctatccgccatacgtggaagtgatgggcgttcctgatacccggaatactctcgatttcgcgttttatctcatcaagatctaaatcaggagccgcttccatgagcacctccacgctctccttcagtatctcatagccctcgcggaggatgtaaaccgagattagaaccgtgacgaggggatcgatccagagaacatcccatcgtattatcgcgattccacctatcacgaccgcaaccgaagagagcgtgtcgctcaggagatgcaggtaggcggagcggacgttcatgctctcgtgggcgtgctcatggagcaggagaaccgagattaagttggcgaagaggccgattagagcaaccccgagcatcagagggccgtctattggctctgggttcttaaagcgcttgtaagcctcaacgaggaggaagagcgcaacaccgaccaggacagcggaattaacgaacgcgaccaaaatctcagccctcttgtagccgaaggtgtacttctcgttcttctctcgctcgcctatctttatggcgagatagctcgcgaggatactcattgaatcgctgaagttgtgaagggagtcgctgagaagggccaaacttccggagaggataccaccgatgacctcggctagggttatcacgatgttcagggcaaaggaaaacagcatcctgcccttaagctcgccgtggtgatggtgggccactttcatcccctcatttcgatttccgttcactcgttcaaaagatttttgttatgtaaacggatggtttaaaactcagacctttttaaggtagcactccaataggaactcggtgataccatgcacgagtgggcgcttgccgatgcgatagtaaggacggtcttagattatgctcaaagggaaggggcaagcagggtgaaggcggttagggttgttcttggggaactccaggacgttgcggaggacatcgtgaagttcgcgatggagcagctcttcgccgggacgattgctgagggtgctgaaatagagttcgtcgaggaagaggccgtctttaagtgcaggaattgtaactatgagtggaagctcaaggaggtaaaggataagttcgacgagaggattaaggaggacatccacttcatcccggaggtcgtccacgccttcctcgcctgcccgaagtgcggcagtcatgatttcgaggtcgtcaagggaaggggagtttacgttgctggaataaagatcgagaaggagggagggtcatgaacgcgatagacccgagggagatagcgataaacgcgaggcttgagggagtcaagcggattatcccggtcgtcagcggaaagggcggtgttggaaagtccctcgtctcaactactctcgcgctcgtcctggctgagaagggctacagggtcggcctcctcgacctcgacttccacggggccagcgaccacgtcatcctcggctttgagcccaaggagttccccgaggaggacagaggtgtcgttccgccgactgttcacgggataaagttcatgactatcgcgtattacacggaagacagacctacaccgctccgcggtaaggagataagcgacgcgctaatagagctgctcacgataacccgctgggacgagctggactacctcgtcatagacatgccgccaggtcttggcgaccagctcttggatgtcctccgcttcctcaagagaggcgaatttctcgttgtcgctacaccttcaaagctctccctcaacgtcgtgaggaagctcatcgagctcctcaaagaggaaggacacaaggtcatcggcgtcgttgagaacatgaaactccgttcggagcagctcgacgacgagaaggacgttgaaaagctcgccgaggagttcggcgttccctacctggtcggcataccattctaccccgacctcgacgcgaaggttgggaacgttgaagaactaatgaagacggagttcgccgggaaggtgagggagctggcggggaggctttgattttcatttttgaatttcgaaagcttaaaatactcctggggagtacgcgttaatgcaatgagcgaggccgtgaaccccaaactctacagcattgaaaaacttctggaggacaaggacaagagattgctcgtttctgaggtagtccttaagctggctgaggccctgggtgtgaccgttgaagactttctcggttacatggagtggaaggagaacatggggaaacttgagagggctgaaaaagaagcccaaattccagaatcaatccctgtagagttcccaacagaggatgcccccgaggggcttgaagaggctctcaatgaaatcgaggaggacattcaaaaatggcagaaaatcgagaggcggctgaaggagatggggttagagttgtgatagagacttcggcgtggatttcttttctcctcagcaagaatccagagaaaaacgcagttgcgtttatcctgaacctcatgcttaatagggccgtggtgaattacatctcgaaggaagcgctcgaagaggttgagcagaagttcgcccacccgaagataatggggcttcgctcgggctttgccccgcggaatccactccaagacccagccatcctcttgaagcttataaaagaaatcagcgtgtttgttgagcccaaaacgagactgtcactgtgccaagatgaaagcgacaacaagtggcttgagctcgccctcgaaagcggcgcggatgcaataatcacgtacgaccgagacctcttagacatgaggaacgacgaaaagatacttcagataggagactttcaggtatacatcctcagggggctggaattcattgagctgtaccggaaaggaattttcagggggtattgaataatgagcgtccttgaagatgtcttctccgggaagacgcggatcgtaatctgcgggatcggaaacgacgtgaggggggacgacgccttcggcgttctcgtcgccgagaggctgaaggagctggtgaagaccccagatgttctcatcctgaactgcggcgagatgccggagagctacgtcggtaagatagcggcctttaagccagacttggtggtcttcgttgatgccatccacttcgggggtgagattggggagtttataatcgccgacccgctgaaaaccctcggggaagctgtatcgacccacgggcttcctttgaggattgtggcgagctatattaaagagcaaacggggagcgatatagtcctcatcggctgtcagccgggttcgacgggcctctttgaggagccgagcgaactgataaaggaaagggcggagaggctggctgagctgattgcggagattctgaagaacaagtaagaaagctatttaaaactccgtgaaaatttttgatcgtggttaagatgggcacgataacaatccacgtccctgcaggaatcgatccaagaattgcacggggctttgccaagctggtggaagaaaggctcagagaattagctgagctcaacaatattttaaagaactccacgcttaccaatgaggacattgaagagatcgcaaaggacataggggcgaggaggagggctttctttgagagaaagaatagcggttgataccaacgtgctcttctggttttagccatcctcaaatcatctcaatgtatccggattgtctcgggttctcagtggagtgagcctccttaaatcctccctcgtgttaacgttgaagaagctctccctccagccctctggcagtttttcaatctcgatgtaacaggcgtcgctctcccttatagcctggtttatagcgtagtttctggactttatcctctcctccaaaaaatccctgaaagaacttgagtaagcggcgtggagcggttcaaggtagccgttgctccacctcggcacacaggctggctttttggcctcttcaaagcgctcgacgatgaagtctatgaactccgggacgaggaggggcatatcgccggcgacaacaaaggcgtcaccgaggctcagggcggtgaaaatcccacccatcggcccgatcatcagctcatcaaccacaacatcgtgcccaaaatccctgagcttctccgcgttttcctttgatgcaactaagactatctcgtctattttctccgcctgctccagcctctcaatggtgtagaggaggaggggctttccgctgatcctgaataggagcttgtctccgccgaagcgtctgcccctccctccagccaagactgctccaatcatagtcatcacacagtttggggttctaaacccctggtttaaaaaagccctataagagccttgcccaactttaaagtggtgagaaaaatgtgccttgcagttcctggaaaggtcattgaggtaaacggccccgttgctgtcgtggattttgggggagtaaaaagggaggtaaggcttgacctaatgccagataccaagccaggagactgggttatcgttcatacgggctttgcaatagagaagctggacgagaagaaggcgatggaaatccttgaggcttgggcagaggttgagaaggccatggaggggttctgatggaggagccctttgaggcctaccgctcgcgtgaggtggccatgaaactcgttgaaaagatcagagaggaagcgaagaccctcgacggtgaaatcaggataatgcacgtctgcggaacccatgaggacacggtaacgaggcacggaatccgctcgcttcttccggagaacgttaaggtcgtcagcgggccgggctgtccggtctgcataacaccggttgaggacatcgtggcgatgcagctcatcatgaggaaagcccgggaagagggagaagagataatcctgacgaccttcggcgacatgtacaagatcccgacgccgatggggagcttcgccgacttaaagagtgagggctttgatgtcagaatcgtctatggtatctttgacacctacagaatcgccaaggagaacccggacaaaaccgtcgtccacttctcgccgggctttgagacgacaaccgctccagcggccggaatgctcaacgtcgccgcccaagaggagcttgagaacttcaagatatactccgtccacaggctaaccccgccagccgttgaggtgctcctcaagcagggcacggtctttcagggcctcatagcccctggtcacgtctccacgataatcggagtgaagggctgggagtacctgacagaaaagtatggtatccctcaggtcgtcgcgggcttcgagccgaacgacgtcctcatggcgattcttatgctcatcaggatgtacaaggaaggcgaggcgaggataatcaacgagtacgagcgggctgtcaagtacgaaggcaacgtggtcgcccagaagatgatagacaagttcttcgaggtcgtcgatgccaagtggcgtgccctcggcgttttcccgaagagcggcctcgagctgaggaaggagtggaaggatttcgagataaggagcttctacaaagtagaggttcccaagaacctgcccgacctcgaaaagggctgccgctgcggcgccgtgctgaggggactggctttacctactgactgccccctcttcggaaagacctgcacgccgagacacccggtcgggccgtgcatggtgtcctacgaaggaacatgccagatattctacaagtacggcgtgctgttctgacttccttattttttgttgtacattttgggcctcattctaacggtttcataagagaactacctcatcatcttccttctctggaagttcttcctcaaaaaactaggaagagaaaacaagaatcactcacccttctgagtgagcagtgccctgagcttcggcgccctggctccaagctccctgtcgagcatgaagaggccctgggggttgtcgccgattatcttgagcttgtcgactatcgccttcgtgctggcctcctcctcgacctgctcctcgacgaaccactggaggaactggtaggtagcgtggtctttctcctcctgggcaagttcgacgagcttgaatatcgactgagtaaccccaacctcgtggaggtacacagcctcgaaggccttcagcgggctctcgaaggtctgcttgggcttctcaatcttctcaagctctaccttgccgcccctgtcgaagatgtagtcgtagaacctcatggcgtgtccaagctcctcctcggcctgggcctccatccaggtggcgaagccgtcaaagcccatgtccttgaagtaggccgctatgcccaagtagaagtatgcagaaaacagctccttgttaagctgttcgttcagggccttcagcattctctcgctcagcatttccatcacctcacttctctgttgttttcgaacgttataagtttatctatcgaactaccatcggagctctagcaggagagcagtaccaccccgagtgattgacactgtgatgattccacacatttgtggtgtctaaatgtcaaatatttggctattttttgactcgattttgtcatctgttcaaaaagaagtgtgattaggataacaaaagttcattaggagaaccaaaaaggttatattccttaactgcattggacaataacgagaacaaacacccatagctgggtattggaggtggtgccaatggcgaagacgacctttgaggaggaaatctaccttagggccctcactggaaggctggttggaaaggccctcgcagacctcgggctcaacaaggttgccgtcgttgccagcaggaacataatctgctccagcatagccaccgcaaccgaggctacatacataaccctcagcggaggagtgacctaccacttccttgcagaggcaggcaaggaggcggacatcgcgaagcgcgtcaaggagttcgccccgcaggttacagtcctccagttcggtggtgagaccccgatcgaggagaccaagaagatattcgtagagaccctcagacagttcgccgagcaggacgttcctggagcattcgtcgtccacgtcaggatattcgcggcaggaggactcgccgaggcccttaaggacgagaagatcagggagtacctcggtaagaaggatctcttcgtctacaccgtcggcttcgatgagggcaaggtctacgtcaacaagatactcctcgacggcgaggagatcaagctcgagaagatagcggagtaccaggtcaccctcgagcacgccgacctgctcaatcgctccctcaaggacaggagcgttacatttgcctgatggcgctattccgctttttccatttctagcctatctcttgaaggaactcttttccgaattctgtttcccataatggaggctctcgtttcgtagttggtccagaaggatgacagtgggcaccaaaggttcagaactccattatggttttcaacttttggttttggaaaggtataaaggctcagaaggtcaaaacaaaaccggtgagaggaatgaaggcctatcacattcacgttcaaggcatcgttcaggcggtcggattcaggccgttcgtctacagaatagcccacgagcacaacctgcggggctacgtcaaaaacctcggcgatgcgggcgttgagatagtcgttgagggcagggaagaggacatcgaagccttcatcgaagacctctacaaaaagaagcctcctctggcgagaattgaccggattgaaaagaaggaaatcccgccgcagggtttcgaccgcttttacattgagaaaagttccaaagggggaaagggcggggattccataatcccacctgacatagccatctgtgacgactgtctgagggagctttttgaccccaccaacaagcgctacatgtatcccttcatcgtctgtacaaactgcggccctaggttcacgataattgaggacctcccctacgaccgcgagaacacgacgatgaaggagttcccgatgtgcgacttctgccggagcgagtacgaggatcctctcaacaggcgctaccacgccgagccgacggcctgtcccgtctgtgggccttcatacaggctctacaccagcgacgggcaggagatatacggcgatccgctcaggaaggcggccgagctcatagacaagggctacatagtggccatcaagggaataggaggaatccatttagcgtgcgacgcagccaacgaggaagtagttgctgaactgaggaggagaaccttcaggccacagaagcccttcgcgataatggccaaagacatcgaaaccgtcaagagcttcgcctatgtgagcccagaggaagaggaggagctgacatcctacagacggccgataataacgctccgcaagaaggagcccttcccgctccccgagaacctcgcgccggggcttcacaccattggagtcatgcttccctacgctggaacccactacatcctcttccactggagcaaaactccggtttatgtaatgacttcggccaattacccaggaatgccgatggtcaaggacaacgagagggcttttgaggaacttaaggatgtagccgactacttcctcctccacaacaggaagatactgaacagggcagacgacagcgtgataaggttcgttgatgggaagagggccgtgataaggcgctcccgcggcttcgtgccacttccaatagagatacctttcgaatacaacggcctggcagttggcgctgaactcatgaacgccttcggcgtggcaaagaacggaaaggtctacccgagccagtatataggcaacaccgggaaggttgaagtcctcgagttcatgagggaggcaatagcacacttcaggaagattctcagggtgaaaaaccttgatctcatcatagccgacctccatccggcttacaacacgacgaagcttgcaatggagatggccaacgagctggacgtggaactccttcaggttcagcaccactacgcccacatagcgagcgtcatggccgagaaaaacctcgattctgtcattgggatagcgctcgacggcgttggctacgggacagacggaaacacttggggcggggaagtcctttatctgggctatgaggacgttgaaaggttggcccacatcgactactaccctctcccgggcggggatttggcgagctactatccattgagggctctgatggggatactgagcaaggtctattcgattgacgagcttgaaggtgttataaaccgctgctgcccgaaggccgtcgagagcctcaagtacggaaaggtcgagttcaacgtcgtcctcaaccagctcgccaaggggataaacacggcctacgcttcttcaacgggaagagtcctcgatgccattgccgtcctcctcaacgtcgcctacaggaggcactacgagggagaaccggcaatgaagcttgagagcttcgccttcaagggcaagaacgacctgaagttcgaggttccagttgaaggagaattgataagggttgaagagctgttccagagtatccttgaggcaattgagggggcatcacccgcggacatagcctactccgcccacctcgccctcgcgagggcctttgcccacactgccgtcgaaagggccagagagttcggagtgaagaacgttgccctgagcggaggagttgcgtacaacgagctcataaccaagatgataagaaaggtcgtggaggcgaacgggctgaacttccacgtgacgaccgaggtgccgagaggggacaacggggtaaacgtcggtcaggcattcctcggtgggctctacctcgagggctacctaacgaaggaggatctgatgctgtaagatttaagttgagaagggacaaagttctttggggtgaaagcatgggaaaggtgatcaccattagggtacccgactgggtaagtgaggatttcgtgaggagggtagaacgactagttgaggaggagatagagagggctttcgcctctgggagggtggatagggaaacctatctccgctttatcgagacgtacagtaccacggatgacgttcttcttgaaaacgatgaagaaatgctctcagagatgagaaaaaaggagaaggcgaggataaatggtagttattgacacaaacatagtcataagacgagttaaggcgggagaggaaataagagagaacatcacagaggttaccgtggttgaatatccccctgtcataacctatcggaaatttcatggagaggtacttctgataacccgaagaagtattgcaacggctgtagaacttcaaagaaggctcagaaaaattggaagaccaaaacagtttgcggacattatgattgcggcaatatgcataaccaatggtgaaaaactcataacccacgattctgacttcaaagacatcagagaggtctcggaactggatgtggaggtcgtataatgcccgttattccaaaagaagagctcctcaaaattctgcgggacgtgaaggcaaggctccaagaaatcctcggagagaacctagtcgagatcatcctcttcggctcctacgcgaggggagaggctgaagagtggagcgacgtggatgtactcgtcgttgtgaagcggtggccgacgcttgaggagctcgacagaatggcagaggcgaccaataagtatgccatcgaaaaaggagtggcgatatcgctcataccctacatcgagaaaccggacatgagctcggacccactgatcctcaacgtgatgcgggagggcataaaagtatgatcaattaccctgccataatacgcaaggcgaggagtttttggacttcacacgctcatacctgaaggaaaaaggtctgctgggtgattaaaatgggtgaaaagataaagctcgaacacggagccggtggagaaataatggaggagcttttgagggacgttatcctaaaaaccctgacgctgaaatccgccggaggcatagggttggatgcactcgacgatggtgccacaataccctttggagacaagcacatcgtcttcacgatagatggacacacggtaaagcccctcttcttccctggaggagacataggccgcttagcggtcagtggaaccgtgaacgatctggccgttatgggtgctgaaccgatagcacttgcaaactcgatgataatcggcgaaggccttgatatggaagtcttgaagagggttctcaagtccatggacgagacggcaagggaagtccccgttccaatagtcacgggcgacaccaaggtcgtcgaggacaaaatagagatgttcgtcataaccgctggaataggaatagcggagcacccggtaagcgacgccggggcaaaggtcggcgacgccgtgcttgtcagcgggactataggcgaccacggcatagccctgatgagccacagggaaggtatagccttcgagaccgagctcaagagcgacgtcgcaccgatatgggacgttgtcaaagctgtcgccgagacaatcggctgggagaacatccacgcgatgaaagacccgacgagggccggactgagcaacgccctcaacgagatcgctcgcaagagcaacgttggaatcctcgtgagggaagctgacatcccgataaggccagaggttagggctgccagcgagatgctgggaataagcccttacgacgtcgcaaacgagggtaaagtggtcatggtagtcgcgagggagtacgcggaagaggcccttgaggcaatgagaaaaacggagaagggcaggaacgcggcgataatcggtgaggtaatagctgactaccgtggcaaggttctcctcgaaacgggaataggtggaaagaggttcatggagcctcccgagggagaccccgttccgaggatatgctgattttctactcttcttcctttgagaagagggcccagaaggtcgccattgaagccccgtacaggaagcccgttatcaggaaaggcatcgtgagggagcggtcgaatatcacccctccaatgtactgacccatcccgaaggttgccgtccacgaaaggtttctgagtgctaaagccgtcgagcgctcctccgttgagaagaagcgcatcatgaacgcgtcccatatagggttcacgatgttcatcaggatcgtcctgatgatgtagacgagtgcggcgagcggaaaactcggcaggaacggcattccagcgatgagaagcgtggcactgccgttgaatgcaactatcgtcctaacgctcccggccctatcagccaaagccggaaggagaaaggtgccgaggcccattatgaactgctggatcgcgaagaggccgcctatgctttccaagctagtgccgaacttcctgttgaaccacaggcccatgtatggaatagtcactccagcccctagaccgataagggcgctgggaagggagaacttgaggatttttaccacggtctcgcgctcaaattttatctcccgaccctttctgtcaagtattgggtgcactagggaaataacaaccagctgaataagaacaaagactattgagaccacaagcgtatccctgtacgggttcttcccgtccagaaccccggggagaaaacccccaagtagagtcccaaaggctgcaccaaaagttcccatggcggagttcatggaaaagaggtagtgtctgttctcatcgctcgcctcctcgctgaggagggacatcaaagcaggcccctctagtgccatgccaatccctaggagtactgaagctatggccaggaagtgaaactcgggcagaaagacctgcaccagccttccagacatgaaaaatatgagtgctaggattatacttcttttatacccaatttttaccgcaaggggccctgtgaagagaagcagagcggcctgggctatagttgagagtgagaaaagcacgcccatactcgaatagtccattccgagggacttgaagtagaacgggactatgaaccaggctatattgccccctaaccagccgaagaaggagtagatgaccaccagataggcgtcgcggctgaaagacagataagtcctcatcaacctccagctcgactgggcctttataagcttgtcgaaacgttaagagcccaaattaaaatactctcccatttcacatttctgtccttaaccttgggttcaggaaatccgtataagcccaaaatccaacatccacttcggtggtgggagtgataatcgccaaaccatgcactacgatgaaggggatcgtgatctcgggctactcctgggagaagccgataaagatagacctcacaaagacagcccagtgtctccgcgagagagggcacagcgtgaagaagctccttccaggaatgatgctcattctcgaaatggagggctatgaagtcagtgtttatccaagcgggaagataatagtcaagctcctcgatgatgccgagcttggaagaaagatcgccgagacgatctatgactgcgcgggaatcctggaggtggtcgcatgaagataccggacgatattagaaaggacataccgctcacgagcgaggtcatttactttgacaacaccgccacatcactcacaccaaagccagtcatcgaggcaatggatgagtactacctgaagtaccgcgccaacgtccacaggggcgtccacaggctctcgcagatagcgactcacaagtacgaggagagcagaaaggtcgtggcggacttcatcaacgcgaagttcgaggagatagtcttcaccaagaacacgagcgagagcctcaacctcgtcgccctcgggctggagcacatctttgagaagggagacaagatagtgaccacaccgtacgagcaccactcagacctactcccctggcagaggctcgcgaagaagaagggcctcaggctggagttcatagagggcgacctggaggggaacctcgacctcgccgatgccgagaagaagatcaagggagcgaagctcgtggcagttcagcatgtctcgaacgcccttggagtaatccacgaggtcgaggagcttggaaagatggcgaaggaggagggcgcgatattcgttgttgatgcggcccagagtgctggccatatggaggttgatgtgaaaaagctctacgctgactttctgggcttttctggccacaagggaccgatgggaccgactgggattggtgtcctctacatcaacagcgagttcttcgacgtcttcgagccgccactcataggagggggaacaatcgaggacgttgaccttgactcttacaagctggcagagccgccggagcgctttgaggcgggaacgccgaacattggaggggccataggcctcgccgctgggatccgctacatcgagaggattggaatagagaagatcgaaaaacaggagcacaagctggtgaagcgcacaacagaaggccttgacgagcttgaggttccatggtacgggccgcggaacctgaaaaagcacgctggcgtcgtcagtttcaacgtcccgccgctacatcctcacgacgttgccgctatactcgacgagcacaacatcatggttcgctccggtcaccactgcgccctgcccgcgatgaagaagctcggagtggagggaactgttagggcttcattccacgtctacaacagcgttgaggaggtcgagacgtttctgagcgttatggagaatctgataagaggtttgagaggttaaaggggcatcctgccccactccacgtttaccgtttcaggggtgcggtagatgaaggccccctcccccttgtggacgtgcttcctgctcggccccggcggtacgccgctggtctcgtaaacgaagctctggacgtcggggtcgtggtagaggagcaaaacgggaccggccaggttgaggagcgaatcgagggcgtactcgcttgcaaccacggttactcttctcagcatcggttttgtgagcagtgggagcccagcgccgcctgcagaggtgtagcttaacacggccgcgtcgttaaggcccaccattgttttcctcctcttttcaagggccgccgcgagcacgaggaaagctgtcccgacgagggttatgctgtgcgcgttgccgaagttcactaggacatttttcccaagctcggggacgtcaccggagtagaggagctggtctatggcgctgtagctctcggctattacttcagaggcttccggtgtgggaaaaggagggagatttttcatcggattgcctgatgctgacatttcagaaaagtttcaagcgctgtcactcttctgtttgcgctttgaagtattcttctaccctcttaatgagaagctcgttctcgaccttttttccaattcgcctaaagaccaccacaattatatgagagctgaaccatgttttgtcttcaattagctctcggtagctctcttcatcggttaaatcgctttctcttactgaaacaagtattttataactatccaatctcttgattaggacatactcttcatcctcccttccaggtctttcaatcagctcgtagagaccgtcctccaagtctaagagttctttcttcactatggtaacgtccgaaggaacgatttcaagcttttttcttttcacagtctcaaccaaccattcgtagaaaaggaactggttgttttcttcaaagcctgcatctctgaggtcgtggtcgtctgtgtaaccacagatgaggaccgccccaaccctcatcagctttccgagaaacttcataagttcggggcttaggacgaacagccacctgccggtggagactccaatctggaggagcgtcatgttctcctttgagtacgtttcgacctcaagccagtcaaaggaatcttcctcggtggttttcagctcgtagtgcagttctcccactgcaaccagcctaaatcccctcatatcaaagatgaacttcaggtgctcttctcgtctttcccgctggtacgcgagttcgcgagtgtacttgaactcgcgcgagagcttctcaagcacttctccccaaggcctatcaaacacggcgacaacataatacgtggttcccataccactccccccatggttcattcattaatgaaaaataaagaaacaggttcggtcgaattctgaagctaggtaacgcacttcaacgtccacaccaaacctggactttatctcctttggcaggtactgggtgtagtaatagtagccccttatgttctcaatgcctccagcatagtacacctcaatcttttctgattcccttattgatggcgtactcagcgtactttgcaagctgttcccgcttattttatgtgcgtttctcttgcaccctatcaccactctctcagaacccttcctggcaattatgccaatttctgttttcatcccgtgtttgatggcaatggttagagcatccgcaggcacctcgcccctgagagcctcctcgaagccaaagaagataaaggggaaagacatgagctcacctcccagatagctttacccttttaagttccttttctgcatctttgatggcctcatcgatggccctcaggaagacgttctttgggactttgacggccatgccagaatacaggacgaatgccagcaaaaattctccctttccagagtctgccgcgtagagaacttcaaaggggtcataggttgaaagggtaaagcgaacgaaaggaggagctgctcctgctgagagctttttaaggcccgccagttcgcggagaaggcccctatcctccggcttttttgcccctttggaagacagcctcttgatttcaccatcaacgttccactttacccgccactcctccgcaggcagtttgccatccgccacaaacgccttgagaagtttaagctcctcaacgtacccttcgagattaacaaacgcctccagtacgtacgtgctcccgtaaacttgaacttcgtactcgtccatgatatcctcaggttcaccgaacatctcaagaacttcatgcgaaggcggctttagtttgaacctgagccaccccatcctcacgggtttattattgagaaccgctttcaggttctggatggaagttcggattgcctcgatgaagttgtcacgggtgagctgtacttccccaccatcccgaagggtcaggtgaacccatccaccctcagccattatcttgaggtcccagagctttttcgggagagcatccatcgagtggagtgcctttagggagcttatgaattcatccagcgtcactgggtcttcactgatgaaaactggcccctcttcgagcaccagcactggaaatcccctatctccctcctgtaggaagaatgaaaaagcaaagattgaaatcacctccctgtcaatatctccttgaagatggtgggaatgccgtaactatccggtacatcccccacttgattctctcaatcactaccaccactttctttcccagctttggggaatatttaacaagtactattctctgttttccactgataatgtctccgcatttaattttgtctgggttttctataaccttgcccatttcgtttaaaagatccacggcggaaatgtgagtgaactgatcctttccaggctttttcatgatgtggttgaaaataatatgttttgccccttttgcatcaatgataacatctcctccttcgaatactccacaatcgaggtttgccccattgaagtgtgccctgaaacccctgtactccctgtcaaaatcctctgcaagctttttagcatcgttggcatcccagccgtttaagtacgcttgtgccaagagtttgccgtactcctttgggctgaataagtcttctacagccttgacttcatccctggttattgttatgaccgacttcactatgacggtttccttctttagaccgccccattttttcttaacgtacccatagccaatctctacttccgttccccagaagttagtcttaacgccctttgcgagctcctgcccattgtaagtaatcctatctggaatttcacttacaaacccctcagtgaactcgctgacaggctttgagtacaagtatttggcaattaacgccacgaggcttccaaccgccactacccatcctacaccggggacaaaagcctctatgaagggctccacaacaactgtagcccctccaaactgcggccgtacctcgtctccgggtttcttctcaggagttaactctgacggaaccgttacggtgccgttcactgtgctgttgacgaggttcgccgttgcactcgcaccgctgaacgccaatcccaaaatcaaaaacccgaagagcatggaaagaattttcttccacgaaacccaagaagccacacggtatcaagaattttaaaagaaaaagaaactgaaaatcactcctccagcttcgggagggtgacatcaacgccgagggtcttccacatggccttgatctgctcgcgcagctcatcgattgcctcaggcctcttgaagaggtgcttgaacctgccctggagcttgaggtactcctcgatgggcttcttgaactctatggcgactatcctgccgccctcgcgggtgaccttggcgcctcctccgggcggctggatcttgatgttgaagaagtcgccgttctcgatctcgaagagcggccagacgccggtctcgatggcaaggcgagctatctcgacacccttctcgagcgggctcttccatccggtcgggcaggtgcagtgaacctggacgaaagccggaccatcgaccttagcggccttcttcatcttcctgacgaagtcgaaggggttgccgatgctcgcggtggcaacgtacggaacctggtgggcagcagcgatgagggcgacccacttcttgggcttgtcctcaccgattgagtactttccgggcggtgaggtggtggtccaagcaccgtagggggttgaacttgacctctggattccagtgttcatgtaggcctcgttgtcgtacatgaggtagacgacgttgtgcctcctctcgagcattcccgagagggcctggagaccgatgtcggctgttccaccgtctccaccgatggcaagtatcttaccctttctgccgatcttcttccaggccgcttcaacaccgctggcagcggccgcggcgttctcgaaagcgacgtgcacccaggggaccttccaagcggtgtacgggaagactgccgaaacgacctccatacagcctgtggcctgggctatggcgaatgcattgggatcaccgtatttctcctccatggcctcgctgaaggccttggtggcgagcttgagagcggtggcacagccacagccggcacaggcggcgtgaccaggcgcccagtactcgcgagtggtaatcgggggtttcctaacggccattttcctcacctcacagtatctccttcctcaggccgatccagttgacctcatcaaactcctcaccgttgagggccttctgggctatggccagtgcctcgtcgaggtccttgaatgtgacgtccctgccaccgaggccgaggatgaagtcgacgatcttcggcctctcgtcaaggttgacgagggccctgctgaagtcctggaagagtgctccaccaacgctgaaggtgacgttcttctcaaggagcgcgagaaccttggccttcttggcgagctccctgacttcttcggtcgggaacggcctgtaaacggtgagcttcgcagcgccgaccttgaggcccttctccctgaggtggtcaacgtactccttgagggttccggcgagtgaacccatggtgacgaagattatctctgcgtcctcagtcctgtactcctcgaccttctggtattttctaccgaacttcttctcgaactcggcgaagacctcgtcgatgaccttctttgcattctcgttggcctcccagacggtgtatctggcctccatgtagtgggccgggaaggcgagggtgccctgggttatcggtctctccggatcgaggtaggcgtgcttcggctcgtactcaccgaggaactcgtcgacgacctcctggtcgggaatctcaactggctcaactgtgtgggtcaggatgaacgcgtcgaagccaaccattgccggaaggagaaccctttcgtcctcggctaccttgaaggctatgagtatgaggtccagagcttcctggttgttctcggcgtagaactggagccatccagtatcgcgctcgcttatcgtgtcctgccagtcgttccagatgttgatcggggctgaaagggcacggtttccaacggcgatgactatcggaaggcgcattccagcggcgatgaagagtatttcgtgcatcagggcgagaccctgggaagcggttgctgtgaatgttctaaccccagcggcgctggcaccaacacaggcggagatagctgagtgctcgctctcgaccttgatgaactcggcgtcgagctccccgttggcgacgaattcactaatcttctctggaacgagcgttgacggggtaatggggaaggccgcgataaccttgggcttggccagcttggccgcccaggcggcagcctcgtttgccttcataacggttcttatcggcatctttcaccacctcacttggtctccctaaccataactatggcatcaacagggcattcgttggcgcagatgccacagcccttacagtagtcgtagtcaaagaccgggtagccttcctcatcgaggtagatagccggctccgggcagtagatatagcagaggtagcagcgagtgcacttgtcgcggttgaattcaggcataaaaactctccaggaacctgtcttgttgataacgctgcttcccgggatgtaagctatcgctccgggcgtcatcttttcgctgtactccttctgaaccctctcaatatcggccttaaacggactctcagccatatgtatcacctcgagtgagttatcatgtggactttaaactttttccaaagggaaaacgaaagctcagccgaagacctcggcgagcttcttgagcttctcccactcgcggagcacccactcctggagaacttggatgtcctccttggtcatatacttaaagcgaccctggagcttgaggaactcctcgatcggctttggctccttcttcgggtttggcatgttaatcctgtacttgccctccttgtactcgaagagcgggaagtaggccgtctgaacggcaagtctggctatctcaatgctcttgtcggtgggtgagcgccagccggtcgggcacggggcgaagagctggatgaagctcgggcctggagtcttctgagctgttttgagcttccttatgaagtcctcagggtaggcaacgcttgcagttgccgcgtagggaatctcgtgggctatgacgatgtctatgaccttcttcttgtgcctcttctcgaggaagtgcctctttcctccgggggtgttggtcgtccatgctccgtagggggttgaacttgacctctggattccagtgttcatgtaggcctcgttgtcgtacatgatgtagagagcatcgtggcccctctcaaggaagcccgagagtgcctgaaggccaatgtcagcggttccaccgtcgccggcccagccgacgatcatgacgccgtcttcgcccttgacctttatgcccctggccttcaaagcggcctcgatgccgcccaggacggcaccagtcgtctcaaaggccgtctggaacaggttggcacccagggtgttgtagggccaagcaccggctataattgttgaacagcaggccgggattgcgaatatcgtcttcctgccgtaggccttgaggacgtacctcagcccgagtgcagccccacagccctggcaggccgtgtgaccggcatagaagtgctcctccgccgggagcgtgagctttttcttaatctgctcgggaatctccatctttctcacctcttaaggtggtaccagtccacctctacgtcaagctcgcccttctctatgactgccttcatgttctcggctatcttcctaacgtcgttcaccgtgaagtccctgccgccgaggccgacgatgtagttcttcatgagcggcttcgcgtcggtgttgtagagcgcaccctttgcctccgtgaagagtatgccctccatgccgaaggagtagttcctgtcgaggactgctatgccgtcaacgttctttgcaagctcgtagagctcctccttcgggaacggcctgaaccagcgcacctttgccgctccgaccttgtagccctcctgcctgaggatgtcaactgcctccttgacggtgcccatgagcgaacccatacccatgaagacgaagtcggcatcgtcagtcctgtaggtctctatcatctggctgtagtcccttccaaagcgctcgccgaactccctacccacttccttgatgaccttcttggcctcctccatggccttctgtatcttgtagcggaactcgtagtaatctgctggagtcgcgagagaacctaccgagaacggctccctctcgaagtcggccaggtcgtagagtggcttcctcggtggaaggaactcgtcaacgagctcctgcggaatcatctcaacgacgtcgtaggtgtggctcaggatgaaggcgctctcgacgaccatagcggggaggtttaccgtctcggccaccttgaaggccataaggacgccatcgtaaacctcctggttgttctcggcgtagaactgcatccagccggtatctctctgcgcgagtgaatcggtctgatcgtcccaaacgctccacggcggagccatagccctgttaacgtccaccataactatcggcagccttgcaccgctcgcccagtggagcatctcgtgcattaaagctagaccctgggcagaggtagcggtgaaggcccttgctccagcagccgaggcgccgatacatgcggccatagcggagtgctcgctctcaacgggaacgtactggatgtctgcctctccgttggctatgaactcggctatcttctcgatgatgctcgtctgcggggtgatcgggtaagcggcaacgacctggactctcgcgtgtaaagcggcataggcagccgcgtagtttccgctcacgacctttctgatcggcttgtactccatctccaccacctcacttctcctccttctccatggttatggccttggtcgggcactcgttggcacagattccacagcccttgcagtagtcgtagtcgattgccacgtagccgtcgggcttgatgtatattgctggctccgggcagaacttccagcagatatagcacttgacgcacttgtcctcattgaccacagggatgaaagtcctccagtcacctgtgaaattgctaagggtagtcccaaggcttattggcgcctcggggtactggtcgacggaggtaaggactatcttctttgcctccgcctttttctccccaaacagcgtgttcaaactcctcccctcctcctaaggttaaggaaagcaaaggaaaatcagagctcgtagacaacggtcttgttgaaggcctcttcggcggccttggcgttcttctcgccgagggccccagagaaggtctccttaatggcctcctggacgctctcaagcttgacgaggcctgtggcctttgcaactgcaccgaggatggccgtgttggtaatcgggagtccaagtatttcaagggctatgccggtagcgtcaactagggcaagcttgcccggcttcttcttgagcttctcaaggacttcctccttgctcttctcggtgttgacgatgactattccgccgtccttgaggccagcggtgacgtcaacggtgtcgagaaggctcgggtcgaggacgacaacgacgtcaggctcgtagatctgggtctttatcctgatcggcttgtcgtcgatcctggtgaaggcggtaaccggtgctccacgcctttcaacaccgaagaacgggaaggcctggacgtacttgccctccttaaaggccgctgaagctagaatgttggctgccgtaactgcgccctgtccacctctaccgtgaaaacgaatctcgatcatccttcctgcctccttaaaggttttcactttgggttagtccgaaacatttatttaggtttcggtatctccctaagaccttctcgacaggcgtctttgggtaagtgtgaacccttaagctcgccgatggtgttttacggtcattgtttctcgaaaactttttaacggaaactatatagtctatatatcaactcaaatcgggggagggaacatggacgcactggctatagccatcgtggcagttgcgttctacatcgcctggaacataggctcgaacgactcggccaacgcaatgggaacggccgttggtgcgggaatactaagcttcaggcaggcaacactgacaatagcgatattcacccttctcggcgcctacctcaaaggctacaaggtcatgaagacggtcggtaaggggatagtgcccgagggatacctcacaatggaaatggccctcatagcacttctttccgctggagtgtgggtgacgatagcgacaatcaaaggactcccagtatcaactactcaggcaatagtgggcggtgtcattggtgtcggtctggctacgagcgcgcccgtaaactggtggacgctgacgaagatagccgctgcatgggtcgcatctcccgtcctctcgggaatccttgcgataatcctctacaagttctactcctacgtaatctcaaagattaagagcgtctcgacaattgaggccctctacaaggcgcttgccattctcggcggttcttatatggccttcaactttggaacgaacgaagtggccaacgcctccgggccaatcgtcggtgctggctttatggcgccaaaaactgccggagtcctcgtggcgttaagcctggccgttggggcactgacgttcagctacgcagttatgcacacggttgggaagaagataacggccctcggccctgtttcggccttcgctgcccagttcggctccgcaatggcggtcagcatagcaaacgttttcggccttccagtcagctccagtcagtcgatagtcggcggcgttgtcggcgtcggcctcttagctggtaggggagtggacagaaaggtaatcgtcgatatagtcttcggatgggtggcgacgccgctaaccgccatcggaatatccttcgtcctgctcaagctcttcgccctcgccggaatggtttaacctctctatctcggcccccattttcttgatctcgccgaccattccagtctggacgtaagcgtctatcctcgtcttttcaccgtactcgactgacagaacttctccaacggagtttatgagtgccatcactgcagggactttctcaggctctttcacgattatcctgaaagcaccgtacttgggcagtttaaggacgaccctgtttaatgcatccatgagttcctcgaggcggccctccctcgccgagattttcaccacgtcctcaaggcttattcccctttcgcgggcgagttcccatatcagcctgaccttctcctcggcgtcagcttcctctatcaggtctatcttgttgagggcaactatgatcggcttttcaagggccttcagctccctgagcacctgaagagaggccaggaacttcctccgtatctccccccaaggctcgcttgagtccagaacgaggagaactatgtcggccttcactatctcttcaagcgtggagtggaaggcctcaactatgaaggggggcagaccgtcgatgaacccaacagtgtcggttgcgagaatcctcttcgtgccgagtctgaagcgcctcgttgtagtgtcgagtgtcgtgaacatttgattcttcgcttcaacgttctcatccgctaaagcgttgagaagggttgattttcccgcgttggtgtacccagcgagggcaacgaggacgaagccggcgttctccctcttctttctcttaacctctctgtctgccttaaccctctcaagctcgtcccgtattttgcccatcctatagcggatgtgcttgaggtactgctgggtctggtactcacccatgcccttaaaaccggccctgtcgccgagccttatcctcctgatggcctccttgaccagaggaatttcgtactggagcgaggcgagttctacttgcaacttagcttcctttgagtgtgccctcttctcgaatatctcaaggacgagctgccagcggtccattatctcaatcctgagctccttccagagattgtaggcctgactcggagtcagtctattcgcaaagatgaccttgtcgggcttgagctctttaacaagctccttgagctcctcgagcttgccaggccctatgttgtagcgtgggtgctcctccctgttctgctctactatggccagaacctcgtagccagcgctcctcagcagttcttcgaactccgccctgctcaggcgctcccttctggagtttctgatgacacctattgccctcatcacactggagttgtttgggcgggttaataacctttgggctaaccttaaaatagttcataacgtaataattaagggggagactatgctgagcctcgcgcttttggctgttataaaaggtagtgacctcatagtcgataaagagggcctaaaggaagatattctcgcctggaggctaaaggacgttaaagctctggcagaaaaatatgacaaagtgttcgctgttctcgtcgagttcttgtatgacgacaaccctcacgtaagggcaaacgtgctccagataataaaagatatgatatccgaaggcaagatgtcaaggccgcgccttcagagggttcttccgagaatccttgagctggccagggataaggatgagcgggtcgcactgaaagccatcgaggtaataaacacccttctcgagtcgggagacctaagtgaggaagattacgagagggtcatggagacccttcaggatgtcctcaagtcgggagtgccgatacttggagaatacgccgcggagggcctcggaaagctgggggcaaacgttgttgccatagcgtacaagctgataaactggctgttctctctcattggctcgagcaaaaaacgcgacgtacagagtgcggcaatcacggccctaacagagatagcaagcaagacaacagactcgaacatattgaacagagtgttcgacggaatcactgatcttctctcccaccccgacccgtacgttgtggagagggcgctctactcaatcgacagactcctaacaagggagaaggagctttccacgagaaacaagctgaaggcagtcagcaagatcaaagagcttcgcggcgacgttaagctcggccttcttgcatcccaggtcatggagaagcttgaaaaggccaccaacattgccgaagaaaccatcgagagcgagggcgttaccaaggcccttgaggtttcccagtactcgattgacgacgttgaaaagctactcgacgctggaaaagcagatatagtggcagagatggccaagctggatccagcagtcatggaaaaagtcctctcaatgctggagagtgaggactacacgagaaggatggacgccctctggatcgtctcaaagttaacatcccatcttacccccacggacgcctacaggatcctgccgattctcggagagttcctcaagtcaaagaacgcctgggcgagggaaaccgccgcaaaaaccctggcggatatccacgccctgtacccaggaacttccaaattcttcgcctccctcctggacgctctcctgaaatcgggaaatccaagagacattgagggggcacttgagttcatggccaggctgtcagagaagattcctagcgaagacatgcgcgaaaaaataacaaagctgatactccgccttctggacgacgagaaagctaggggagtagccctcaagttcctagcaagggaagcccagaaactccttgaacttgatacggaagtgctgttcaccataaaagacaagctcaaggagctttacggctcggaggggggtaaatacgacgagataatagcgggcctgatagacgttatcgacgacatactcaagatgagaaggcagggaatcgtggcgaacgtttagttttcaaccttttgttctggaaatccctttaaatctgccgttctaacttataccggtgatatttatggagaacggcgacgttatggttaagttgaaagagattgaggagctcctcgaaaagctcggtaaagagcaccctaaagagatagcggcgttctcaaggttcctccgcgagacccttgacaacaaagcccttacaacgagggagaaggagctcatagccctagcccttggaatagctgcaggctgcgagtggtgcatctacctccacacccagaaggccctcgaagccggtgcaaagccggaggagcttattgaagctggcctcgtggcggttctgatggccggcggcccggcgttgatgcacctcatcccgctcgttaaggccatagagagcttccaaaaagagcatggggagtgaggatcacccctcagtgagcttcaggatagcctccgcgaggtctcctttcgcttcttccagcgccttttttgcggtatcgtagtcaactcccgcctgctccatgacgagctttatgtcatcctctgaaatttcaaggacttctctcacttcctcacttccagggattatctggtaggtcttctctccctggacgaccatcacggtaacggccggctcctttaagattatctccttgcccttcatcctcagaactacttcttccacgccctcaagctcctccatcttaatgcccagctgcttcatgagcttcttcatctgtctcgggttcattcccatcatagcttccaccgggtagagttgtcgggggattttaaaaaggttgagaaaatgagaacccttaaagcatctttctggaataaacaagctcagtgagacgatgcccgccgttccacaatccgtgcccactgagagagggattgtcttggccactctaggactgctagtgatggcggttctctactgggcactctcacggtggataaagggatacgtggaaaggaaggagagagcttgaggaagaagaagccaaaaagaccgaagaaactggaatcatcccagtcaggaaaaagatcgaaaagtactggggcatcgtgaagggggagaagctaaacgctgaagaaattgacagaataattgaaggattgtaaaggtagaaacaagagaaaattcactccctcttctcgtcttcagggaactttgaagtttcttcgttcgccttcatgatcttctgcctgtactcctcgtacttctccctggcctcttcggccttctctgtctcgccgaggtactcgtaggcctctgccacgtgcttccaccacatcgggtcctcctcagcttccttcaggcagtactcgaggaacttcccgtaggcttccctggcaaggtcttccatgccgagcttccttgcgatgttcccgacgtcctcccagaatactccttcttcctgggcttcgcccttgtaatactcaagggccttttcccaggcttccctggccttctcctcgtttccaagctcctcgtagagtttagcaacatcctcccagaaccagggctcctcctcggcgtagcgctccagggccttcgctgccctctccatgtctccggccttcttccagtactcgtgggcctccttgaggtagtaggtgtccttctcctttccatagagctgctcgtatatttcagctgcctttgcgtactctcctgccttctcgtaggcccaggccgcgctctcaagccagccgagctttatgtacatctccgctgccttcaggtagttgcctgccttctcgtactttctggctgcctgcttgtactttccagctctttcgaggctttccgcgctcttgaagcggtcaacaagtccaaggtcaggctcgctgatgtaccagattccgaaggcaaccaccgctatgaagaagactattatacctgcgaccacttcgaggttcttccaagtccagctgaggtagaggccgtaggcgctgatggccgtgaaaacagccagtatggttccatacttccagctctcggcgtagagggtcagcgcagtgaagaagccgaggccgagcgtgaggccgaggaaaccaagaacgagtatcacctggagcagaagcttccagccgccgtaccagactatcccggccgctatagctatgactgcaataagaaaccctatcaggtaagctttcagcttgtccattctttcaccccctcaatttccagcaggaacttcttttcctcaatcccggagctgtagtaaccaataccatcgtgtgcaacgaccctgtgacagggaacaacgattggatacgggtttctcttcattgccccaccaactgcccgcggggacgtgttgagcgcctttgcaaggtcaccgtaggttataacgctccctcttttaacgttttttgtgagccactcgtaaaccttcttctcaaagggtgtaacgccctcaaaggaaagttcccggagaaagctggcattgtcgagctccccaatcaggactttgaagaccttctcagggtaatcgctcggctggacgtcgagtgatatgctgactcctctcttccccaggtgctcggcaaggtcgtggattcttttcatcagcgtgcccctgtcgaaggcgaaggctatcccctgcaccctcccagagaagattacaccgatccaaaccactctctccccgactctaaacttctccacgctcagcatcggcattcctccagccttttaagggcctttcttagaggcccgatgagcgtgtggacttccctcccgtagaggaacgccctgccaacggccctctgaaagaccttaacaaagacgtcccttctctcagcatcttttggatagtcgagagtattgagaagtttttcccaggttcttacaagcgcttccttctcctccctggtagctggctttaatgcctcaacgtatggctctggcctcttcttcgacagctcgtacaagactaccgctgcggcctgtgcgaggttcataacggggtactcctcgctcgtgggtatcgtgagggtgacgtccattgcatcaagctcctcgttcttcaggccgatgctctcacgcccaaagaatattcctacctctccagggtagtccttgataagcccaaccagctcccagggcatcagcggggctctatgcgggataaagcgctttccgggctttccagtcgtcccaactgtgaagtcgaagagttcaagggccttttcaaatgagtccagaatcagggcgttttcaaggacgtcccgcgcgtggacggcgtaggcgtagctctcttcggtcaggttcgggttgatgagcactaaccttgagaagccgaagttcttcatcgtcctcgctatcatgccgatgttcgccggcccctcgggctcgaccagaacgaccgatatcatcggtaggtctttaagggagatgctttaaacggttgtggtggttggatgaggcctgaatttgggcttgtttacctcccgctctcgctcgcggtcgtgaaaaagcgggcccgtcccttcgttggaggaagcgtagttgcctttgcgtggacttatccgctccaggacgacctgaggtatatcctctcactgctcgggttagttctgttcctcctcggctggccctttgagagacagcccgtgaagttctgggagaggttcgtgaacgcggtcatcggcggcaccgctctggcaatagcggtgggtgcttaccagacgggcgaggactttgcactgcttggaatacccgttttgctgctcatactgaaaaacagggttctcgcctctgcggggcttttaccagcgtcagccctctacctcataggaagctacgccgttcctgagaacctaaagctggcactctgggtgattacgctggtctattcactccaccatcttaggaagctcgcgaggtgatagaatgaggatatacgttctcggtgcgggcagtatcgggtccctcttcggcgctcttctggcgagggccgggaacgacgttacactaatcggacggagggagcaggttgatgccataaacaagaacgggcttcacgtttttggtgccgaggagtttaccgtgaagccaaaggccacaatctatgctccagaggagccgcccgacctgctcatcctggccgtcaagtcatactccacgaagacagcccttgaatgtgcaaggcagtgcatagggaggaacacgtgggttctaagcatacagaacggcctcgggaacgaagagcttgcgcttaagtacactcctaacgtgatggggggagtgactaccaacggggcgatgctggttgaatggggaaaagttctctgggcagggaaaggaataactgtgatcggaaggtatcccaccggaagagacgactttgttgatgaagttgcttcagtcttcaacgaggctggaatagatacgagcgtaacggaaaacgcgatcgggtggaaatgggcgaaggcgatagtaaactccgtgataaacggtctcggcaccgttcttgaggtcaagaacggccaccttaaggacgatcctcatctcgaggggatttccgttgacatagccagggagggctgtatggtcgcccagcagttggggattgagttcgagattcatccgcttgaactcctctgggacaccatagagagaacccgggaaaactacaactcgacgctccaggacatctggcggggacgggagaccgaggttgactacatacacggcaaaatagtcgagtacgcccgctccgtgggtatggaggcgccgaggaacgaacttctctgggtgctcgtcaaggcaaaggaaaggataaataggggtaagaccagaaatattagcgaggggtgttgagaatgtcactgttcggtggaaaagagactgacgtctttgaggcaattgacaagcaccttgatgtcgtggagaacgctctaagggcgttcagggagctggttggggcttaccttgatggggactttaaccgggcgaaggagctggaggaagaggtctcaagatttgagaccgaagcggacggacttaggaggagcatcgagctgatgctctacgagggggcctttctcccggtcagcaggggggactacgtgaggcttagcgagctgatagatcaggtggccgatgccgccgagagcgcgtcacacacactcatcctggccaagcccaaagtcccgacggaagttaaaggggacatactcggcctcgtagattccgccatagagacgtttaaaatcctaaaggaggccgtcaaagccctcaacgaggatgtggacaaagcccttgagctggctaaaaagacagaggacgccgaggaaagcgccgataaaatagagtacgacgtgaaagaaaaggtctttgagagcgagaccataactacctacgcaaagttaatatggaatcaagttctgacgaaaatcggcgacatagccgaccgcgccgaggatgcctcggatcaggtcatgctgatggcaataaagaggaggggatgaaggatgaaggttctcgttgccgctccgcttcacgagaaggcgatagaggttttgaagaacgccggctttgaggtcgtttacgaggagtatcccgatgaggacaggctcgttgaactcgttaaagacgtcgatgcgataatcgttaggagcaagccgaaggtaaccaggaaggtcatcgaggccgctcccaagctcaaggtcataggaagggctggcgttggcctcgacaacattgacctcaaggccgccgaggagaggggaattaaggtcgtaaacagtcctggggctagctccaggagcgtcgccgaactggccatcggccttatcttcgccgtcgcgaggaagatagccttcgccgacaggaagatgagggaaggcgtctgggccaagaagcagtgcatgggaatagagcttgagggcaagaccattggagtcgtcggcttcggaagaataggctaccaggttgcaaagatagcgaacgccctcggcatgaaggttctcttctacgacccgtatccaaacgaggaaagggcaaaggaggtcggaggaaagtttgctgaccttgagacgctcctgaaggagagcgacgtcgttacgctccacgtcccgctggttgatgcaacctaccacctcataaacgaggagaggctcaagctcatgaagccgaccgccatactcatcaacgccgcaaggggtgcggtagttgacaccgatgccctcgtcaaggcccttcaggagggctggatcgcgggagcaggccttgatgtcttcgaggaggagccccttccagcagaccacccgctcacaaagcttgacaacgttgttctaacgccgcacatcggcgcctcgactgttgaggcccagatgagggcaggcgtcgaggtcgccgagaagatagtggaagccctcaagggctgactctattttgtcaaactttttaagtatcctttctcatttttgatcggtgggtgtctattgaaagacctcgttgaccctattgttgatgccatcaaactcgcggtcacgacaattccaggggacactgttaaagcactcaagcaggcctacgagagcgaggagagtgaaatagcgagattcaacctcggcaacattctgagggcgattgagattggaaaatccaggatagttcctgtctgccaggacacggggacactgacattcttcgtgaaggctggcattggaagtccttacctgggcgagattgagagggcgatcatagaggcaacgaggagggcgacccttgagattccgctgaggcccaacgccgttgacgtgctcactggcagaaactcgggcgacaacacggggaagggcgtaccggtgatccgctgggagctggttgagggaagcgacgttgagatagccgttctccccaagggcggcgggagcgagaactgctccgccctggcgatgctgactccagctcaaggctgggagggcgttaagcgcttcgtccttgagcgggtaacggagtgcggcggaaagccctgtccgcccataattctcgggatcggcgtcggtggtggggccgactactccctaaccctagccaagaaggcccttctgagaaaggtcggcgagagaaacccggacgagaggatagcggagcttgaagaagagctgctcaccgaggttaactccctcggggttggccctatgggcatgggagggaagaccacaaccctcgatgttaagattgagattgcgcacaggcaccctgcgagctttccagttggtttggttgtccagtgctgggcgaacaggagggccttcctcaggataaaggccgacgggagggtcgaggtttggcagtgaagctgaagacgcccctgggcgaggaagtcctggagcttagagcgggcgacgtcgtttacctttcgggaaggatttatactgcacgagacgcggcccacaggaagattctggagctctcgaagaaggggaagcttcccttcgagcttgaaggcgcagtaatctaccactgcggcccggtggtcagaagaaaggaggacggatggaaagtcgtctcagcgggcccaacgacgagcgcgaggatgaaccgatacctcgacgaaattctgtccctcggcgtcaggggaataataggaaagggcggcatggaggtcgggcctttcgttgggagggccgtctacttcgccttcactggaggggctggctctcttgcggcggagagcgtgaagagggtagttgacgtttactggctcgacgagctcggaattccggaggcagtttgggtgcttgaggtggaggacttcccacttctcgtcgcgatagactctagggggaactccctctaccgctgaaggtctttcttttttcgttcaatggttcgatgaaagccgagtagaactccctgagcctcctcgtgtgctcctcgacccactcaccgcttacctttctccccgcaacgccctctttcatggccacttccgcgactgccctcgcttccttcgggaaaacgtcaggatggagcggagaggggattatgtaatcttcgcccagctcgtcatcgctcacgaccgaggctatagcctcagcggccgccagcttcatgcttggcgttatgtcttctgctttaacgtcgagggcgcccctgaagattccgggaaagccgagcacgttgtttatctggttcgggaagtcgctccttcccgtggcaacgatccttgctcccgccctcttcgcttcttccggcattatttcaggaatcggattggccatcgcgaagactattgcatcgtcggccatagccctaaccatatccggggttactatcccgccagcgctgactccgataaaaacatcggccccttccatcgcctccttcaggccgccctctatcccgtggacgttgtattccgcgacttcgcgcttgtacgggttgaggtcctccctgccctcgtgtattatccccttcctgtcaacggtgactatctccttgacaccaacgctgtggaggatcttcgctatagctatcccagccgcccccgcgccgctgatcgcgacctttatctcgctgaactttttgccaacgagcttcagggcgtttatcagcccggcgagggttacaacggccgtcccgtgctggtcgtcgtgaaaaactggtatgtcgagcctctccctcagcctctcctctatctcaaagcatctgggtgctgagatgtcttccaggtttatcccgccgaagccggggcttatcagctcaaccgtcctgacgatttcgtcaacgtccttcgtgttaatgaggattgggaaagcgtccacgcccgcgagcgccttgaagagaacagcttttccctccatgacgggcattccggcgaccggccctatgtccccgaggcccagaattgctgaaccatcggtaacaaccgccacggtgttcggtatgacggtgtactcgtctggatcggctccgttggctatcgccttcgagggctcggcaacgccgggagtgtaggcgaggctcagggtctccctgttaactggtaccttcggtatgacctctatcttcccatttccaggaaagttgtccctatggaattcgaggggattcatgccaccacctgaggtagtgaccccccagatgttaaaaactcaccccttccactggaaaataaactcatttttgtgtaacaacgtacctccccgtgctcactggacgccctagatttcatgaccaaaactttttaaagcaggggagggttcactaataccgggtgtgggccggtagctcagcctggtatgagcgccgccctcgcaaggcggaggccgcgggttcaaatcccgcccggtccaccacatcagccctttcttacgaaagcgctggcggaagaggagtatgcgcttttaagcaggcttattttatgagggtttactttcaattggccaattcaaaggatttccccacagtatagcgctcgaagagcgctaaaaagaaagttcgaaatcacaattagcaagatattttgagagcaaacccaagcgaacttgctttccgggcgagcatacgctcctcaatacggaaagttcgagaagagcccggagaagtttcaaactcaaacacagtctttaagaagcagttagaaacattccgccagcgctttgcaaagcaaagggctgtatggcgcccgggccgggatttgaacccgggtcacgggagtgacagtcccgtatgatgggccgggctacaccacccgggcgcatgatagtggccggcggcgttcccggtttcccgccccctctcggagggcagtacacccgggaacgctggcgggcttaacttccggggtcgaaacgagaccgggtgtggccccgccgctatggccgccgtgccgataaccactccaaggatgggtttataaatcttacggtgaagttctcctcaggtggtagcatgggactgcttgaggacaaggccctcgtggaggcggcactttttgtggctggaagaccgctgagcctgaaggaactttcaaaggcacttggaataaaatcactggagtacctggaaaagctgatagagcttatagcggccgagtatgccgagaggaagagcgcgatagaggtcgttagagtgctcgaggacaagtacgtgatgcaggtcaagcaggagtacagccagagggtcatccacctcatgccgaagccagacctgagaactggagagctgaagaccctggcgctgattgcatacctccagccggtcgagcagagcaagataatcaagctccgcggcagtcaggcctacgaacacataaaacggctcgttgaaatgggcctggtttacgccgaaccatacgagaggacaaagctccttggaacgacgaagaagttcgccgaactctacggattccctgagaacgatccggttctaataaaggaggccttcaaaaaggtcgtcaatgccgaatacagcgacctgatggccaaacttgagggcaaaggtgaagaaaaagaagaggaagctccgtccgattgaagtttttctaggccctatagttttcccatttctgcttttgggcaaagtttttctcctttagcctcaacgaagtccttggagaaagctttaaatactcatattgccaattactatcagggtgagtgctatggaagttctgacaaaggacgagataatcaaccggattatccgggagagaggactttcgaggtctgaaatcgaggagaaaatacgtgaactggccaagatgcacggtgtttcggaaaacgctgccgccgtaatgctcgcagaggagcttggggtaagcctcggaaaggaagaggagatgctgtacatcaaagacctcgttccagggatgacgggagtgaacatagtcgcgaggatcaagagaaagtttccgccgagggaatacacaagaagggacggttcaacgggcagagtggccgaccttatcatttacgacagcacgggccaggcgaggctcgttctctgggatgcaatggtggcaaagtactacgacgacctgaacgttggcgatgtaatcaaggtcatagaccccactgtcaaggaaggaatgaggggcgtggaactccacgcaaacttcaggacgaggataatcaagaacccggaggacccgcgcgtcgaggagattcctccgcttgaagaggtcaggagctataactatcgcagggttcagataaaggagcttcagggcggtgagcgcttcgtagaagtccgcggaacgatagccaagctctacagggtgttagtttacgacgcctgccccgagtgcaggaggagggtggactacgacccgtcaacggacacttggatatgccccgagcacgggccggtgaaccccgtgaagataacggtcctcgacttcggcctggacgattcaacgggctacatcaggacaactctcttcggcgactccgcggcggagctgatcggagaagagccagaagtcattgacgagaagctcaagaagctcatagatgagggactgactccaaaggaagccggaaagaggctcgccgaagacgagtactacccgctcattggaaaggaaatcgtggttaggggaagcgtcgtggaggacaagttccttgggaccctcttcaaggcaaggagctgggacgaggttaacgaaaaggccgagatagagcgcgtgaggagggagctctaccgcgagctgaaggagtacggccttgagtgaggtggttgaaatggaggaaacgaggtttagaaggagaaagcccgcagttgagaggaagatagccgagataaaagaagacgacacccgcgtctcgctcatcgggaaggcctttaaggtagacaagatggactacaccttctggctcgacgacggcacgggtgtgatcctcgtcgagagcgaggagaacgtcctcccggagaacggccagatagtccgggtaatcggaagggtcatcagggaggaggaaggcatccacatcttcggcgaggtcgttcaggacttcagcgatgcagacctcgaggcccttgaggaagtgagggagcttgaganagaagatccttccgaaggttgaggggataatcgagttcttcggaggtggtgaggaatgaagaagcgcctaccagcgagcagggtctacatcagggacatcctcgagggctactacgtcaggagcgacggcgactttgagccgaactacctcataaccaaggacgcgagaaaggtctaccgtgtcaaggttgtcgccaccgtcgtaagggaacccgtcataagcgacgacgagacctacggaaagttccagatagacgacgggacgggaacgatatgggttctcggcttccgcgatgatacgcgcttcataaggctcgtgaagaagggtgatttggttcagatcataggaaaggttgcagaatggcgcgacgacaagcagatactcgttgaaggagttgccagggtcagccccaacttctggatactccaccgctttgagaccctcaaggagaaggtcgagcacgccgagaaggccaagatagccttcgagatatacgacaggtatggtataactgccaaggctaaagtcatagccaagaacaagggtgttgacgaggagctcctccagacgatagacgagctgtacaccctgatgcttgagcagaggacccttgaggaagagctgttcgaggaggagaccgaagaagaggaggagaaaactgaggagaaccccgaggttgaaaaggccaaagaggccatcatgaacctcctgagggagaagggcaaggccctgtcccacaagttcatcgtgaagaagctgtcctcagagtttgatgaagaaataatagaagaggcaataactcagctcctcgccgacggcgagatctacgagccggagataggcttctacgagccgctctgatctttttcttttaatactgttctctcattgtcctgatgaccgggtcgtgtatgagcgtcgaagtgatgctgtccaccatcctgaaaaactcgtcctttcctctttcaaggtcgaggctctcaagctttatcagcctgcactcgtctccgagtatccactttccgaggagaatcttctccctatctccctttctcatgtctatcctgacgagaccgtagggtatgtcggccgtccaccagttggctttgaaggttattctccacccggccttctcaacggcttcggctagcttttccatcgtcgttccagggccgtgcggcgtcttgaacgttatgacagtccagagttcgtccttctcaagctctctaatcagttctttctcaaaatccatatccatcacctcacgagcgaagctatcaggaaagcgaccacagccaggaacacgctcaccttgaggagtatctgggcgcggtgagccgtctccctgtcctgagacctcagtatgaggaacgcagagtacagtattacagcatccacggggagcatggcgagatagccaaggcctatgccagccttaatgggcaggaaagacgctacgacagtcagaatcgcgaacagagcgccgacgtaggcagccctctttctcccgataagtatgggaagagtcttagcaccttttgccatgtcaccctcgatgtcctctatgtcctttatgacctccctcgcgacgttaacgaggaaggcacacagggcgagcgtcccagcgaggccaatctcaccaacggctattgcaccgtagaggggggtagcgccagttagggaggccacaacgacgtttccgataaaaggcatcggtttcagcttccatgcgtagatgaacattgtcacgtaggcaacgatagccagcaggaagtcccagatgtttatgaaccaagcgaggacaataccagttgcaaagagagccactgagtaccaaagagccgcttttctactcatggcccccctcggaagcggtctctcaggcctgtttatcttatctatctcgtagtcaaagtagtcgtttattgtgttcccgcccgcacacccaaggaaaaccaccaagaacacgaggatggcggtttttagctctggaagacccccagcggccactatcgagcctaagacacccactatcccagcaagcaaacagttgtggggtcttgtgatctcgatgaatgccttgaattccattaggggcacctaactaaattctgtcggaagtttttaaaggtttgctaaagctcatcgcgccgcaacaggcccagctcctccccctcttccgtgacccgtatgcgcccaaagcggatttctctgactcccgagaggtctctaacgggagttagaatctgaagtcttccctcgctgaagttgatccacttgaggactccaactcccatacacagaccctcgccgtctatgaggcccacgagcaggttgctcagcttttcaaaatcgatagccttcagctcccgtgagtgagcacgcgggaacttctcaacgtccgccttaacgacggtatagcccttgttcttccagccagccactaccagccacccaaaggccttctcaaggagttcattttcatcagcgttcaggggtatcccgtggaagagggaagtgccagttatggcgacctcagatgcgctgaactcaacaagctgggagtctctgaaatagttccgccatttctcggcacgcagatttctcctctcttcaagagggtatctcttcacggtttcgctgacagccagttcgattacccccccatacggttccagagccttaaccaggcctgagagttctcccgagtgaataaccgcaataatgtcaggttttaccagctctgccttaagacgcttcatctccgccccaacacccgtaacaaagccagtcgtgtctatcaaaactacgtcagcaacgtttctagcgatttccaccatgcgttttactccaactgccatttcacctataaactgtgagggagcagtcgttccaacgaagtagtgtgccactccctcaagctcgctcatgctctcaaaaggcccctcgggaatggcgaggcttatcgtcccgggaggaagaacacccttttggccgacgtcagagtccaccacggcaaccttaaaacccagagacaggagttcgtttccaagaaacgttattagcgtgctcttcccgctgtccacacccccaaccaccatgagcgtaaacggcttgttgtagctcgctatactctccaggagtttaatcctatcctcagggacgtcctgcgtgtacctggccttgttcatggtttcgaattccccctgcaggttaaaaatgttggccatcggcataaaacaggaaaacttataagtttgacttctgttccagtgattaccgaaaggttaagttttacatttatcgaggttaaatttggaaaatttggaggtgaaactaatgaacgaaggcggcacactgacaccacgccagctgaagcttttgaaaaagctctaccaggacgggagaacaatagaggttcacaccgttgaaaagacacaggacgagctgtcaaaggagcttggaataacgaggcaggcccttagcaaccacctcaaggtgcttaaggagcttggatacatcaggacgggcaggggcttcatagatctaactgacaaggcccttgaactccttggagagaagaaaggagacgtttttgtcttcgttaaaatcgaaccgacaaagagaaagcaggtctacgaggccataaggaagctgaacctgaagaagatataccgcgttacaggggacatagacctgatcatcgaagccgataagggcaggctggacgaaattttggaggagatagcgtcgctggacggcgtaaaagagacgaacacgcatctcgtccttgagacgctatgactttctccttttcttttccatcagggctttgagggcgtcgaggttctttccaaattttgcggatatcgggacgaaagtctcattgacctcgccgtagggaacgccaaacttttctgccaggaagtttatgaccgctccaacgttctttaccttgtctatcttgttcacagcaacgatcgtcggtatctcgagctcacggaggaactggtagaactccacatcaataggtatctcgccgcgcttctcccagcgttcgatgatttcgggagcggcctttccgtcaacgacaagaacggccagttctattctatctgcgttgtcctcgatgaagtgcactatctcgtcctttatcctctcctggacttccttcggcaggccgctcataaagccgaagcctggaaggtcaaccacccttttcccgcgccactcaatctcaatcggtcttcgggtaacgccggggcgctttcctctcttgaccttttttccagtaagctggaatatcagggtgctctttccaacgtttgagcgccccgcgaatattatcatcgttccaccacccgcgttcttcaactcagggtcgtttataaaccttggcggaaaggttaagtagaagttggacgtaaaaactgcggtggtgttacggtggaaggggatgccaaggcaaaccagctcatcaacaagtttgtaatctcccttaccgaaggaaagatactcggttacgttaccgacatcaacgttgaagttgaaggaaacaagttctacttcatcctgaagatgaaagaagttgaaaacctcggaagcgggcagagcgtttttaccagcgagaggaagcttaagataagccccgatgatatagtaaacgtcggcccccacgtcataatactcggaaacggcaaagttccgccgctccgcgagatagagaggcttcaccagatagcagaggagtataacaacctcgtttcagagcttgaggccaaagaaaagctgattgaggaacttaaggaggagaactaccgcctcaagagggagcttgaggagctccagcgcgagctcagaaagtatcaagtcatgaaggaggacttcgagaacctcaaggagcaactgataagacaggagggccagcttgagatggcgagggactacataaggctcctagagggcatgaggggagacatcgacaagataaagagcaccgtggaggcactcatcgagaaacagcttgaagaagtagttaggggaataatagacgaggagctcaacgcgaggggattaaagaaaacgagcttcctttagccgaatatgcttgagccgaacatgtggagtatgaactcaaaggcgatcagcaggagcgtcagggctataacgcccttcgggctgaccttgactgccctggtgtcctcgtcaaagaacctcatcagacccgcaccagttggggggagcgtcgccttttcctttgccatattttctcaccttctccagttcttcagttggtttatttaaatttcacgataaggtttttaaatgcaccgcttaagagcggttgggaaaggggctaccccaatgaatcccgctgatgaatggaggtgggaggaatggcgaccttcaagctggttatatcgaacccgaaaaacggagttgcgaagcaggttgagataagcggcccagaggctgacaagcttattggaaggagaataggcgaggaaattccggcgagcgagctcggcctcaacctctccgagatattcggtgaggagattccggccgacgccaagctcaagatcaccggaggaaccgacaaggacggcttccccatgaggcccgacgtccacggcccgaggagggttaagattctcctctcacgcggccccggcttcaggcccagggagaggggcgagaggagaaagaagaccgtccacggcaacaccatcagcccgaacatcgttcaggtgaacatgaagattgtcttctgagcttctccctaattttgctcgattgaacttcaaccgctttcaattctttggtcccatccccatgtaactcttttactcaggcttcttctacctcattttaagagcaaaacacagctcttaattaaatttacactccaaaaagaaatgatgaattttcacttatttgaagagaaaagcttataaggatgaagtgattagagtgtactgcaaacaatctcaaagaggtgaacgcagtgaagtggaagaccgtagtagccatcataattgggttgctaatagttagttcaggattgaagcctgctattgcaaaatctttttcttttaagccacattctataggggtctacgatccacatccaacatttaacgatgacctgaaggacgcagtaccagtctcagcttatcttcatattgacatccgtggtggtactggtagtctcgaggggaagttgttcataaggcatgaagttattcaaataaaaaagcgtttttcattagtccaatctaacgttttcaatgggtatgtaatgattttcaacaacaaccctagcgacaaattgacaggacttcagggtaacgtttacacgaacgggacgatattcttattctttaaggacaagcatggaggtcttttatttatcagtatgtacaatccaagtattccctcaaaactctcaaaattaagtattcctagcaagaacgttagtgagaacgaatggctctggaagcttggccctacagtcattaagacaaaaactataacaaagactgtggggaagcccgtaaccctttatgattccagcaaatctgttaattctatgtcagctatggtatcatctagctggctatcttcaacgctcgttacaaagtggtttgaagttggatggtggatattcaagaccaaatatttcataacgctagaatttagagtatatggccctccatcccttacaagtctttctcctcaagggacatatcaagtggaagtggagatatacaatgaaggaacagaatcaggaagtgaagatactcctctcttaatcggagacagcgctcaagttggcccagaagctgtggaaatgggaatggttgttccagaggagtgcgatagaatcatgccaataactcatcattcagcatcacactatgcactgactctaggagatgttggattatcctttggatttgctcttggacctttatctcttgacccaataacagcaatttcgctagttttctctggagggctcaatgaggacattaagcctacacacccagttaatgcaattcacataaaatacaatgacatgtatgctttgcacccaggagagtacattggaacaaagcaaatagtcgtgaactatgaatatcagcaatattccggtgttaaaccttttaaagtgaaatttaaagtgcctgtttattatcagctaagtgcatcgcaggggctccaacaggttggggtgattgaaggagtagtttatcactatgtcaaccataacaacaccagttagttgttgaaaaattgtttttgattttgtctgatatttatttttacatttgatataactaaaggggggaggcaagatgaatataagtaaaaaaatctcggctgtgtgcattgtggttttagtgctctccgccttttggtggcacaaggcgaatactttgaaaacggagtactccgggagtgaaaggtcgtatatcgcaatgtggatctcccaagaagccgccttcattagagctttctccgaagatgccttgaatttcatcaactcctcgaactacaccggggccgttgttagtattaagcacacagagggggtaatgatgtcctttagagagccattatatatgattactctgcataaggacggatttaatacgagcatgcttaaaatgacacaaaccgattcctgtgtcaatttccttgagctgtctgcggaaataatcccccgcggagacgacgatgatatcaaggtagttaaggagggactcaccgaaatatggaatttttcagatcagctgctaaaacgataccccctcagtgctcgggcctcagaggagaccctcagaagaaactgggagcttcagaacaaatgcagaatcctgctggaaaaattggagaataaaggttaaagcggttaacgcctcgattcgacgcaggagctcctgcggcatttggggcttagccatttttgccccatgcacaccccgggcttctttcggtcgattctacgcggaaaaacgctactctaaataaagtcatgcttagaaaaagaaggagtttttatatcgactaaaaggaaagatttataagcatattttgtaaacttaatttcaactggtggtcatcatgagaacgataacaagaaaagtgggggtctctgcccttatagtcgttctttctttcttgacgggatttctcctcggggtcaacttaggggggatactcccgcttgcactctatctcgtgggtctgctgttgagctccattgcggtggcgttcgttgcctccaggcttgaagttggaccaggggacctagcaaggaccgccttaatcatcgtccccgccgttcttgcggccgttctaggactgataaggattgtggcctctttcttcgaggcacctgcgtcaggtccaacagagggcgaggggtctatgatagtgctactattcctcctactcccggccattctgctgggccttctggggagtctctttgagctctccctctggaagagggacgggaactctcccagctgacctttaatcttttgccgttactcttgaaaaaacgtgaatacaatgcaagcaatctcaatgagaacaacatagatccaggagaattttacagcgtgaaggcactctccaggctgtccgacctctggaggtatcgaaaatgaagctctacgggactgaggtttcctttatcacctttttacgcttttgggttagcgagctggttttagcactccttggcggatactttggaagtaatggtttttatccagaggcgctcctgatgacgggaggggtattctggctcagcttttccgccattacttggctggcgtgtatggagtacaaaaggtccaaaaactgctcattagaagccaaaatgggagctatattcttcgcaatcatccctgcatccaacgtcctcgtgtggattttcgggttttacccgtattcaaccctgataatctcactgctctggacgctcctagtgttcaaagtggggataaaactcggcgccaggaaattcctgcgaattgtccaagaggaagagtgaacattcacgaccctgcaggaaataaggatgcctccagaacatagccgaaaataaaatccaagccatctgtcaaaatcacgaggaatgtccatgaagaaaccttaataagcgcccgccttttctactcattagaggtgagagagatggcgaagaagaaggagtttaggcaggccgaggttaacatcggtatggtcggtcacgttgatcacggtaagacgacactcacaaaggccctaactggaatctggacggatacgcacagcgaggagctgagaaggggtattacaatcaagataggctttgccgatgcagagataaggaagtgcccgcactgcggcaagtactcaacctccccggtctgtccctactgcggccacgagactgagttcgagaggagagtctcgttcatcgacgctccaggccacgaggcgctgatgacgaccatgttagcaggagcgtccctcatggacggcgcggttctcgtcatagcggccaacgaaggagtgatgccccagacgagggagcacctgatggcccttcagatagtcggcaacaggaacatagtcatagccctcaacaagattgaactggttgacagggagaaggtcatggaacgctaccaggagatcaaggagttcgtcaagggcaccgtcgctgaaaacgccccgataatcccgatttcagctctacacggtgctaacgttgatgtgctccttgcggcgatagaggagttcataccgactcccaagcgcgacccgaacaagccgcccaagatgctcgttcttaggagcttcgacgtgaacaagcccggaacaccgccggagaagctcgttggcggtgtcataggcggttctatagtccagggcaagctgagggtcggcgacgagatagagataaggcccggtgtcccctatgaggagcacggaaggataaagtacgagccgataacgacggagattacatcgctccaggccggcggtaggttcgtggaagaggcctatcctggcggtctcgtcggcgttggaaccaagctcgacccgttcctcaccaagggcgacctgatggccggaaacgtcgtcggaaagccaggtcagctaccgcccgtctgggacgagcttacactcgaagtccacctgcttgagcgcgtcgtcggaaccgaggaggaactcagggtcgagccgataaagaggagggaagtcctcctgctcaacgtcggcacggcgagaacgatgggcctcgtaactggcctcggaaaggacaccgttgagctcaagctccagatacctgtctgcgccgaggtcggcgacagggttgccatcagcaggcaggtcgggagcaggtggaggctcatcggctacggcttcataagggagtgacttttctttcccaatttcaattttgaagtcctggtggttcttatgagcgaaagccgaaggcgggagtggctggtcgttccagacacgaactttctcctcgttcccggccagtttggtgtggacataatcagcgagctccacaggattctcgatgttaagttcagggtagtggttccaaacgtcgtcttggatgagctgaacgtcatagaaaggaagtctcgtgggagagacttaatggccgtcaggatggcgaagaagctggcggagaggtttgaaactgttgagatcggccgctttggggagagacctatagacgaccagatattcgacttcgcggtgaggaacgagcgcgtaatcgtctgcacaaacgacaaggggcttaagaagagactccgcgagaagggcgttccagtcgtttacctccgctcgaagaagattctggagcttgaggggatgcttgaatgagctgagtttttgaattccagtgcctattctggcccacttaacagctcgttttatccacttcaccgttcaaaacccttaaaactaaactttctccagtttcgggaatgggaggtgagaaaatgtacacggaagagggacttctgaatgaaatccgcgagcttatggacgatgatgaactctttgagatgtatgagagagccttcagggagtaccactactacttcgacacgacgaactacatcgtcctcaacgtctacaacttcaacgaccacgggcccattcacgtcctactgacgacgaggagggccctcgagctcctcaggataatcaggaagttcagcatccagacgacggctgaaaagcttggaaagcccttccgctggagcaagttcatcgttgccttcggcgcacttttccacgacatcggcaacatgatacacagaacgccccactaccagttcagcgttttcctcgcggagccgataatagataagctcgtaagagagtttgaagagagagatcctctgctcctcaaggccttaaccctcaacgccatctatacccacgacgagcacgtgccgtgcaccactatagaaggttctctggtaacgatagccgacggctgtgatatggaagagggcaggagcaggctcgtccacaagaaggacaaggtggacatccacgccgtttcggctctcgccatcaagagggttgagatcaaggaaggaaatgaggaagagccaatactaatcgagatctggatgaagcaccctgcgggaatcttccaggtggacgagatactgaccaaaaaagtcaagagctcgctcctcagcggaaaggtcaggctcaggatacacactggggcagacggggagatattcgagaaagtcgtctaaaggcttttaatctccctgccctattctcctccatgtccctcaccgacgcttatcgggacctcaggtacctcctaaacaggggctatccgaagaagagcgccctgaagttcgtggcagaccactacaggctttcactgagagatagataccttctggcgaggtgcgtcttttctgatgcatggatcgccgaggtaagaaggaaacttctaaagcccggagagcttgagggaaaggttttagccgttgacggcttcaacgtcctcataaccctcgaatccgtcctcgacggcgaggcgatactctgcgaggacggcctggtgagggatttgaagtaccaggggaagtacagactgaacgaaagaacgcgggaagtggttgaaattgtcgttgaatcactttccaggctgaaagtttccaaagcgatcttcttctacggcaagaacgtcccaaagagcggaatcgtcaggaaaattaccgaggaagccatagaaaaatacggcctgagtggggacgtgaggctcgtaaaaagcccggacttcgagctcaaggcctttagcatagttgcaacggccgacgtggggataatctccagggtggagcacgtttttgacgtccccctccacgtatcagggagacttggagtagagatcaggaatatttttgatatatttcaagtcgaaaagcgctaaattaaataatattctcggagtatacccggaataactacaaactagatttggagttttgaaaaacccttaaatagaatgagggacaaaattacctcaaggcatcatgatgtattgcccgctttccttttctgcgggtcttggagggaaaatatatgaaaaccctgacaactacgctggttgttttattgctggttggtttagtgttggcgagcggctgcactggtggaggaaataatgagggaggcccttcctacacctcgcacgaagaaatctccgggggttcttccggatcaacctcggaagaaactacgggtacttccgagtcctactcggcaacctggcagaccccgtgggacgcctaccaccccattagcctgaatgggggctcgtactatattacagaagttgagtacaccttcactctcaagacttctgacggcgaaaagacattcaacattatcaaaaagcgtggctacgtgaaggcccacgtttacgccgaggagaacggcgaaaagaaagacctgggtgagtttaacctgttcgcctactacgggaagataatccccgtaactggaaacggaacgccctttgagtacatagtaatggtcagggagagaagcgaggacagcgacaaatacttcttggagccagtaccaaacttcggagtcctcacaacgggaagcgccgttgtggctgaggcaaaatccggaaattcttacttctactggagcaacccaggagctataggacagtatagcgaacttccatacaccgaaggtgacctgaacgaagtccttggggacatggggagctacctctacaccttctggctttcgatgttaagctcaggggtctggagcggtctggaggatcgcgacctgatgaaggcagaggagtacgattacagcttcccaccctttgcgtaccattacaggatagacccggacgggacggttacctttgatggtaatgacttcggggtcagcaacgttgaatggagctactctttcggaggggttactctccaaggaagggcagagatatcgcccgctcttccaatccccgttgagaccgaggggacgttcgttgacctgagctcgggggcaaaggcatactcaaagataaaaattgaaggtctgaagctctcaaaggagttcggtggaataagcgtgagcatcgagaagcccacctcggaaggcacgagtactgaaacagctagtgagacccagacggaaacttcagctccctcagaaagttctcaaaactggcagagagcctgggacgcctcggaaccaatagaaatccatggcaaccagtacctactgaaaagtgtggcctacgacatcacctacaagacacagaactgggaagtgcactacacgatggagcgcggctacaacgagaccgatgatggctacgttgcctacgctatagtccatatggacgacggctcaacataccgcttcgaggtctatacctcaaacatagatgagtacacgggctgggttctctggattccctccgtcttcgagctgattgagagtggatccagctttgaaaaatacaccgtacaggggccaaactgcggctacacctacggtgagagcgggatatcaggggacatgaactgcggtatggagataactaacagcctctttgaccagatatgggacgtttacaacggcttcgcgggcggaatctacggcgatgtcgtatacgttgcagacctctcctcgaacggggaaggctacacagtccagaaagacgggagcgtgagttttgctgggatgacattcgacgagtatgtaattcagtggagcggcctcatgcagggttatgtaaccgccaacggaaagaccgcggttgttccagagcttccaattcctgtggagatcgaagcttcattggcgatgccagagggggcaatgtacttccacatcacagtgaaggatgtggagctcgccccggcgagctaaagcttatatcctttccttcccattttcttccatgtttggagagcacgaactcaggactcagttcatcaaaatagccgataaaaaaatccaccttctcgaggataagggggggatagtcagatataggcgtgacgattttgaggtcattataaagaacaacggagaaaaactgaaagttctccctgccccggccttgggctacggggtaaagcttctcatgataaagttcagggacccccttgtaatacccccaaaagacgctgtagctgggttcgttgaggctcccatagaggttgacgttaaaatcggcgatctaacaatcgatcacttcattctcgggaaggagaagtacgccctctacggtgccatagaggccggtgtaatctgccgctatcaggttagtcccttctacaccgaggaaccagaatccataggggtggcgaagctcatagtctccaacccctcttccgagtggaagccacttgagagggttgtcgtcccaataaaggggacttcaatgtactacgagaacacaaaagcctactatcccttacttcttgtcacgctcaagaaccacagcccggaggtaaacaacacgggaaggccgccaaaagagggcctgaacgcagttggaaaaggcctttcgctacctaacttcctgatgaggtggtagcatgggggctgcgaacactacctccctctggaatcagggcgttctggggaaaaagcttctcttcaccttaaccacaggcgccgttgtaaaggcggttttaatcctcgtggtgggccttgtaatagcgaaagttctcaggaagtatttgctcagtcttgccagaaccacaaaatacgtctggataatcaacgaggatactgcatcaacgcttcacaacatggtggtggtcgttgctcttgtttactctctcgacgctcttggggtcctctcaattaccgtggctggcaccagcctgagcaatatcctcgctgccttccttgtgttctacttctcctacgtccttgccaaaaagtcaaaagactacatcataatgcgttcttcaaagcagaaacttccggaagttcagctcaaggcgaagctctactactataccttcgtcacgctggcgttcttcatagcccttaacatagccgggctgagcgggaggctctcgacgatagtggcggcggcggggataacgggtatcgtcctcggttttgcatcccagacggtagttgccaacttcatctcgggcatattcatgtacttcgacaagccgcttaagataggcgaccccgttgaagttgccggttattcgggcgttgtccacgacataaggattctctcaacgaggataaggacatgggacggtctcctcgtcaggattccaaacgagaagctcttcaacagcgacataaagaacctccagaaatatccagcgaggcgagtggacataaccgtcggcatagcttacaaggaagatgcggggagggcgatagaggtgataaagaagaccctcgatgagatgccctatgttctggcggagccggagccgatggtcttcgttgataacctcggggacagcagcgtcaacatagccgtaaaggcatgggcaccgagcgagaagtggttcgacgtgaggtggcagatagttcagaaaataaaagaggctctggatagagaaggcatcgagatacccttcccgcagagggtcaactggttcgcggaggagctgagggtgaaggtggagaaggactgacccaactcccccatttttctatactcaatagtcctgagatctcttgccctttaaagccaaacgttgggcaggttggatgacatgaataacttattattaccattcttgaacccagcagtatcaacaccaatatcaaaaaattttatatgggctaaattaaatttagtgtaagcatgcagaaacagcatgcggtgggcaatatgcgaaaacacgcaggattacatatcaggagaagggttttatctcttttcgtggttttcctcgccatctcaactctgagtatagtggtgtcctcaagaccatactgggcgactccggggacttattttgagtacacagccaggggagatcgtgcggtaattatcgaatgtcacaacggaaccctctattttggaacctatggtgtgctcaggtgggagatactggatgttgccagagaccaaatcgagctaaaggcccagctcagggtttacaacctcacgatgcattatcagagagcactaaatgctgaggagggcctcataaaggccagggaattaatcgagatgtactcgagtctgaacttcacgcaaagtggtccctgcagagttgcagaggttcaggctgggagagtcaaggtatgtgaaagggccgatggtgttctcatagcaattgaagagacaaaccaaacttactggctatacgcaggggataacggagccactgagggcctgttctcaaatgcgacgatcccaaatttgtcgaggtctataactttcaacgtgtcccttacggacaattctgttttacacaacggcaaaaggctcggaatgaacacgctgtttctgacagatttggatgtagcaggaagaaccattatgaacgggtggttcataaacgaagtcagggaactgaatgcgacagtccacacgagatttggagccttcaaacccccgattgtcttggtaactacgaacttttacgggaattcatccaacttcgcgctctacgatcctggctcgggagtcttaattgagggatacaccccggtatcaccgatctgggaactgttcggtttcaagagagtccttttctcggatagggagcacttcaacaggacagacgaccccataatcaaaagcaaggatatatacgggttcggaatggttctcgaagatactaacgccttttattctgaaactggaatgcttgaaaacgtccaaatacccctcgatgccattgccgtgtttgtgctggccataacagttttcttggtgattggttatgaaagggctaaaactcgtcgtatgggaaagcaatgacccaataaagggttacattctcgtaatcctcgctggaatctcggcctttttcatgaagatgaacctaataaaagccgtgccactcattttatcaaacactccacagtcgtggcttcataattctcttttcattatgttctcagtgagcacgtacgtcccggtgagccttggtgtctcacttttgacggccctgacaataaggggagaacgggacgacggcagttcctactttctgtactcactccccgtgtcaatccggacaataatcctctccaaaatcgtaggggtctacgtgcatttcctcgcactcatattgaccacacacatcttgctcttttcactccatttctcatccaccaatagcctcaaggttgtcgcagcacattttcacgttttactcgccttttacgcttcggttctcctctatatagtaagtctgtccgcactcttctcggtgctggttccaaatgccccaatcgcaagcatgttatcgtttttcactgtctttgtcctcacatacgtgaaaattttcaacccagttttgacactccaaaatattgcaatagaaaacgagctgaaaacgctcttgccatacctagtcgtttcagcagctctcatccctgcagcaatagaaatttccgctaggagggacgtgagatgaacgcctggaaactcgtcccagcggtaatttttctggtcaccgcagtgtccatagcgttccaacttacaactgataccgatgatgtccggtaccctgttctacccctcggggcaactgaagtatcatgtttctactcccccacttctgcgttagttgagatgtcctttatgggccagggtgatgggagctacacaataatcgaccttgatgagaataaaaccccaaaggagggcaaaattacaggggagattatcagggttgtcctgcctcacccaggttattatggtgtggtcattaacgggtcgtattcaggcagcgcaacaatacgggccgtcgacgtaggcttccccacccagaactggcgggcgcacttcctgacgctctctctagcagtaattctaatgtcgctcggcttctggagggagaaggatgattgggcgctttgaggatgtttccaagagaattggaaacgtcgaaattctgaagaacataaatctggagatagacagtggggtaaccctcatagctggcccaaacggaagcggaaagtcgagcctcataaaactgctggtaggcttttggaggccgagcagtgggagggtgaccctgcttggaaggaatccctggaacaacccagaaattaagcggatagttggaatcagcatagaccctccctctcttccaaaataccggaaaggaaaggatttgatcaagtttcttgaggaattaaaagggattaaagcagacagaaatcttatccaaagactgttcccctatacagcggccctaaacagacccgttgcagaatactccagcggaatgaaaaaacgcctgagcattcttttagctttattgggggagaacgagcttctaatccttgacgagccattttcgggccttgacgttagtggaatatccgaggttgcaaggatcatcaaacagagagccgcgaatgacacgaacatgataatactttcccatctgtggaggccgatctataacatcattgacaggaccgtggtgctcgttggcggggaagtggcctttgcaggggaaagggatgaagggatagagttccttcagaggctcggtatttaacaagcccgtactatacgagattcggatctccttttttctatcagtgcgtagaagaagcctatggttctgtgcctgtggggccaggccctcatggttcccttgaggaatcccgggtcgtatggtccgtttaagggcacaagctcggccccaggatgccgctcaaggaaccactttacaacttcctcgttctcctcgggaagcatcgagcacgttgaatagagcagccttcctccgggtttcaatagcttccaagcgctctccatgagctccttctgaagggcaaccaccttggggatgttcttctccctgaggcgccatctcagctcggggttcttcgctatagtgccgtcgctggtgcacggggcatcgaggagaaccctatcggcgatttcttcgccgagcagctctggggcgtttctcccatcggcttttatgacctctgctatttcaacgccggttctcttgagaacctctttcatgcgctttattctggcgctatctacatcgaaagcatagattttacccctgttttccatcagttccgccatgtgggccgtttttcctccgggggctgcagctaaatcaacaacggtctcccccggctttggtgccagaaccagagaggccaccgcagaggcttcctcctgtgctatggcatagcccttgttaaagagccactcagggttgaaggggtcgaggatcctgattacagtgtttaccctctcacttctctcgaagcggacgcccttctttcttaggtagttttctacctcttcaacgctcgtcctgagacgattcacccttatgctcgtcggaagagtctcgtttagtgccctgagaagttcttcggcctcttcaccgagaagggcgcgcatcctcgctatgaaccactccgggaagaggtactcccacttgagccgcttctcctcggtgtcgagctttggcacgtagttgacgaccctcggcaggaggtcgtagtagtaatagccgacgtaggggtgcgttctctttgagaggaactgggcgacccccttgaggtgctggagggtcctctcgctcggctcgcggaagacccccacttcaacggccacccttaaagcggccctcagccaggggtcgaggatgagcggagaaactcctacaagctcttctataacctcgtctatcaaaccgagacgcctctggattgagtagaatattccagtcagcttcgagttttcccagccttcgattctgtactttgagaaggccctcctcttcgcctgctggctgggcttaacttcctcgccgagcttgagggcctctatgagggcatagagctgtctgtcgctgagcttgagctttggcacagaaccacctgtaaaaagttccgagttcggtttaaaagctcaacccttcaggaagtcggggaggtcggagcggtcttctgtcagcattttgagcgtcttctctccatacggaacgggcgaatgaggctgtccagataactcctcgatgaacaccgcctcgtactcaagtccctcctttctcagccgccttgctgactccctggcctcggtcggcctgagggcatagtacctctgggcgctttttacgagcgcgctgaaaacctccctggcctttgacgttattatggcgtcgggggcggactccgtgagggcctttaggggagagtacaggtatcttatcacatcctccatgcggagggggattggagacgtgaggatttcgagcaccaggtcaagcgccttatcaaatatcacgggattattagaattcaggagatacgatacctctcttacgacatcctcggcacggattccgggtatggattttgcaaatttaagcccaacgagcttcaagccggggttatcacttttcataagctctaacacaaggttttcaacgtcccgataatccgcgggaggcaacttatcggccgcatcagcaagctccagccagcgggggtcgttttgttcaacgggagtatcgagcatgaccttcagaaggatccgcagatcgccctttgtggggggctcttggaggaggagcaccttcataaccctggcggcttttaccgctgtcttcctgtctttcgtaagcaggatgagaagacgcggaaagagctccttgtatatctccctgttcgttcgaagggacagcagttcttccaagatagccagaactctgagctggaagcgctcctcatcgagcaggtgaattaaagtggtcagtatatcctcgtccgcctgagccatggagatcaggcttttagcatcccatgattcaagggtcttgatgatctcatcgtggaccatacacgttccccctgtacactacaccaagttgtggaagattacaatatagctttttcgattttccgctcaaacctgtaaacatcaaccagtatcctctcaagcctcttcctgtggaagtggaactgggccgggatttcgaagggcagtgtcaatcggtgggttatgacgaacccgttgtccctgacgaaggcctctataaatgccctcacctcgggctttgcaaggtgaatcgagtaaacaacgtcgctcacctcaaaggccttgatgaggaaaggcctgtcggcgtgctttacctggcttccaaagggagggttcattatgactgtatcaacatttaccgagaactccgaaacgtccgcgtttacgaactcgattttgtcttcgacgccgagtgagcgtgcgttctcacgggcgatttcaagcgcttctttgtccctctcgacggcatagacattttcagcgcccagcaggactgcaccgatgcccaaaacaccggtaccagcacccagatccgcgatgaccttcccctcaacttcgccgagggagtgggctaaccacaaaagctccgcggccacatcaccgggagtcctgtactgctccagttctggtttgggactctcaaagcccctaagcctggaaaggagcattgcaaggtgcttttttttcattttcactttcatcccagccactgtttgagaaaaggtatttatatcattagcgcaaaagtgcagtagggggagagcatcaatggaactgataccaaccggaatacccagtcttgataaggccctgaacggcgggttctcgaggggttcaacgattcttcttgcggggaaccctggaagcggcaagacacatctcgcaatccacgttctctacaacaacatgaggagggggttaaagggggtttacgtctcctttgcggagactaagaagcagttctacaggaacgcgctccagagcgggatcgacctgtcgaagatggagggggtcaacctcttcaggttctacgacatgctgacagtccccaaagacgagcttgagggtatgattgcattcctcatcgacgatatcgtcgagttcaagccagatataatagtttttgactccgttaccgtgtttggccagatgtttggtgaagagtacctgcgctctttcctccactccatcatagggcgtctggtcaacgccttcgacgcgctggccatcctcatagacgaaataccctacggtgagaagagggttggatttggtcttgaggagttcgtcgtggacggcgtcatcgttctcgagctggagaggatgggcgaggtgataaggaggtacctcacgatacccaagatgcgcggcaggccgctcaagcgcgccgcctacgagtacgtgataaccgatagaggcctcgaagtcctcgccattcccgagcttgagttcactgagagcgaagctccaaagtccaggctcaagaccggaattctcggtctggacgaactccttggcggcggcctttatgagggcagcataaccctgatagcgggtccaacggggtcaggaaagacgatactggcccttaacctcgcgtctaacctatcaaaatccggaaaaaaggttctttacatagcctacgaggagagcctcgcggctctaagggacactctggaaaagctcggccttgaggagaacttcaggatagtctcgatggttccggagggaaggactcccgtcgagtactatgccctgataaaggacctcattgaaaaggagggctttgacgtcctcgtgatagactccctatcagccatggagagccacatggacgagaaggagttcataaaggccgtccgctacctccagctcctaacgaaggagaagggggtaaccttcgtactgacatacatcacggggagtacctacaagctcgcaaccacgggcttcagcaccctcgtggacaacctcatattcctgacctacgacgtgcctgagagagtcggggagtccctaaagaggcacatcctcgtgctcaaggcgaggcgctcaaggaacgacccaacgctgaaggacttcaccatcggcgagggggggataaggattgagtgaaatgaaggccgagctcaaccgcgccctcatagtcgcgactgctaaggagctcctgagccagttcggcccccacttcctaccgacccttgaggcctacctcagggccaaatacaacgcaacccttgagatagccggtgaagaccccgcaaagttctacagagccgtggaggagctgttcggcgagttcggagcgtcaatgttcttctacaacctgctgatggagctccacctcaagccggataaaagggacaaggagaccgtgattgccctcctgaagaagttcgctggtgttgaggatggggagtgagctcatccgcatacttaaggagaagcactccttcctctccgtgatgcttgagagcatagagagggccatatcgaacatagaagagggcaaaaaccccgaggaagtctattatgccctcaccaccttcctcggagagttcccgactaaggcgatgctccagaagctggccgacgagaagggtctcggaataaaagtcaaagacaaggagagcgctatcgaggtcataaagagacttagtggataaccagtgccttggacttcgaagctatgttctccagaattcttatcgcgagcttctgctcgtcgggcgaggcggtctttttgatttccttcagcttctccacgaacggcccaaacagggagaccttctccacaggtgcggacccaaccagcgcgtcaagcgtgaggagggcatcgaagcgcatcccgtcattttcaaggtattccaaaaggcgggacaggaccacccttgcagtcttctcgtcccagattttcgagaagtagtagctgaagaactctagtgagggcacaaccctttcttcgtcccccgataggtaccactcaaggaactggcccactatttcgtcgccgtagggagccttcggggcaatagcggccagcgtcctaacggccctgaggcgcatccacctgtttttagaggaggctaccttcatcaatggctcgaccgcaggttttaggatgaatgccttcgtttcgtcgagcttctcggccagctttgaaagtgcccagagggcgtccatcttctcgaacttgtctccttcctcaagctttctctccagctcgaagataacctcaggttttttcatggccagctcaataagttcggaagtttttccagatgttatggccttttccagctcctttttagtctcttcgtctgacatcttgggggtttgtcccgatttttctacgtgctttgtcagtttttctcttcccgttttcttcctgccgaactgggatatgtgcgggactttcagggacttctgggccttggcctcgggtggcggagaaaggtattttggcccgggcaatactctctcgtttatcctcaaccgctccttctccatcttttcaagctcctccgccagccagttgagtacgtaagtatcacccaccgccagagcaaggtcaatggcctcgtaaaagcgttcgtttatcagaagctcctggattttctgttttgcctcctcgggccggtttttgtagtatctgtatattgcatcctcaagcttctccgccacgagccgcgccttgtcgcttacaccaggtttgcctttcagtgcaaggttcttcacgagggtcagaacaccagcaacgtcatcgataatctcctcacgcaggggatagtgagccacatcaagaagcagggtcaaagcgaagtctatcagggggatatcttcgacagtaagcatgtcccgaacctcggaaaaaacggtctttaaaagggcagggtctcccgtgtaagcgctcgtgtttaaaaggagcctgagccccatggccttgagacgggggttcttggagtggaggagacgggagatgatgtcgtgaaccctcgggtccgaggaagttatccggacactctccaggatcggcgggatttcgaggaggacaacctcgttcctgcgcgcctttacgaggtctttgatcgcatgaccgagcttcacaaagctctcagggtcaagggggagtccagtaatgagggcttttattgccctgagagcgtagattgaaactctatcgtcgttctccagagccagcgctatcaagtcgtcaagggttctctttaggattctgaggcgcattatgtcgggcattcgcttcaaggcctcttcaagggtcataaccgccgccagcttcatctttgagtctttgctgtgaagaaaagacagaagcagtgtgagggcttcttcgttgctgagaacaagctccgaagcttttttgatttttctagactttaggtaaccttcaagaagctttgaattagcagacaccgtgcaccgcccgattattttctacgccaaaccttattaggatttcgtcattcgaacataaaacatgaaaaattttaaaaattcaagcagggtgttgaatcagtggcgcaagcttataccaataggctcgtcttcccttctctccgccccgagaatctcgtcgaactcgtagtcttctctcagcccgaggagaatttcaacctccctcggagtaagcacgggcttcctccagttctcgtagtcgtctattggaaccctcgggcaggcaacgacgacgtaggcatcgaagtcgaagccctctaaagcctgatagcttatgtggttcatcgtcaaaagcctcgcgtactttccgtactcacggaggagtttaacaaccctctttgcctctgctaggcggagctgaccctttttcgtgctcgttatcacgccgaacctctgcgcatccatcgccttggctatctgcgcccagcgcttccttacgagcctctccgcttccgtgtccatccagatggcatcgcccgagtaggggttgatcgcgagcgttggcttcttaacggccatcgcaacgccaatcgggtggaagtagcccgcgcctataaagagaactccatcggcgtcaaccttggcagcgctgaagttgcacccaagaacctgccccggccagctgacgcgagaatctcccctcccgattaagacctcaaaaccgttcttttctaggaactccttcgccctttcaagcccgtggatgtgctgggccgtcgtgacgaggactatccttttcccgagcttcctgatttcttcgaggttcttctcaagggctgggactacgtcaactttcgcgaaagcaggcacgaagatagtaggaacctcaaggtggagctgcatgtaggagtgtccgagatgaatcagcgcgtcgcacccgagcctctttgcctcactgtcggccggatcacaggcaccgtagttgatgtctccgcttattatcgcctcaattccgttctcctcaaggaagtcagctaactcctgagcctccctcttgaggccctctggagtctggatgagaaccctgtgagcgttaagcccgcggagcttttcgagtacctcgccgaatggaatctcatgcattgaactcacccgttagagtttcgaaagagccttttttaaatctccactattcagttccacagtacccggacatgaggtattcatagtttccctattattgcaccataatgttccaaaactaaaagctacgtgccataatttgctatgggacagtacaaaaacccaaggtacgatcccgaaactaacactgcgaagtaaaacttattaactccccctgccctcattgttctgcccaataaggaggtgataaaatgagaaaggttggaatagcagccctggtgctcctccttctgggagcgacccttccaagcgccagcgccggcgacctcataaactacatctgggacaccagaacctaccagcacccctacccgaccgacatcagaccgggcgacctcgtctacggccacagcccagacctcttcaacgccataattccaggcttctgggtgcatgttgcgatagtcgcctggtacaacgacaccattgacgactggatggttatagaggccaaaataggcaagggcatcatcatcagcccgctaagggagttcctcagcaggtacgacatcgtcgccctccagcgcgtcaagacaaccgacgacgtcaggcagaaggcagttgagttcgcctaccagcagctcggcaagccctacaactacaactacatcggcaagccggaggtctacgacgacaagtactactgctcccagctcgtctgggcggcctacctcgtcgccagcaactaccagataaacctcgacgagaacgacggcggatggagctggaagtacttctactcggtcgctccgcaagaagtttacgacgacccgatgacttacaccctctattacgacgaggcctgattctcttctttttcttcttcgttcccgcataaagcttttatactcctccacccaataatacctcgaagttcgatgcatcggggtgatgggtatggagaccgttgaaggaattatggtcgtaacgaccgaaacgattcccggctaccgcatcgtcgaggtcaagggcatagcgaggggcggcatagtcaaggccacacacataggcagggacataatggccgtcctaaggaacatcaagggtggcgaagtcagagagtacactcaaatgatggcagaggcgagggaagaagctttaaggaggatggcgctccacgccaaggagcttggcgccaacgccgtagttaacgtccgcttcgcaacatcaaacgttggttcgagcgtggcagaggtctacgcctacgggactgcagtagttgttgagaaggaggagtgaacatgtacctcccgccgttcccgctcctcggcgggcttctggcatgggctacggtttacttcctcggcttcaagaagcagaagtgggccgagctgatcctcggtgcggtggccttcatactggcgatggtcgtccagaacccgattcagcagctccctctcatcgggatagggataaggagcaacgccgacgttatcgccagaggaactgtctttacactcggagttgccctctggctggggctcgtcgcaggtttcgttcaggagggcgtcaagtacttcctcgtcaaggacaagagcccaaacactgcgctgttcgtcggcctcggctttggcataatggaagtcctcctcatagtgattacaccaattatcgcggtagcggctgccggaggaaagctcgacgttcctgctcttcaggccctcctctcaatggtggagcgctacttcgcagtcctcttccacgtagggacaacggtttatctagcttacgcggccaggaacggcttcgggaagaagggctttctcatgatggcaattctgcacggcttcgttgatacgattgccgcctatgcccagttccttttcctagagaacaaagtactggcgatgaagttcacgattgggctggaagttatcttcgccgttatcgcaatagctttaatagcctacacactgccactagctaggatcgaagagcccgaggaggaaaaggtaatctggtgagaggctttgcttggaaagagcgaggaaaaggcgctcaagaagctcagaaaggagctccgctctggcctctactcctttttagtcctctctatcctcgaaagggaaggagagctacacggctacgcgatacggaagaggcttgaggagctgagcggcggaaagctcgtccccagcgagggggccctatacgaccttctgaagagcctcaagaagctcggcctcctccaggacagctgggccgaggccggtggaagacctaggaagtactactcaatcaccgagatggggaggagtgttctcgcccaattgcgtgaggagataagggtaatcgaatcggttcttgagaagctggagggtctctaatgagcgagctggtcttcgaagtcttcatctcactcacccttctggctgcgggcctgctgaccttcgccttcaggaacaggaggaactacttcatcggcttcaggatcggctacacctacatgtccgatagggcctggagggaaaccaacacctttgcggggctcttcatgatggtcttctcagttctactccttgggcttgcgctggcgggcctgggaattctcaccttcatactcacaatgctcgcgggggtcgtcttcctcacggtggcgggtttcagagtagccaaaaaggcctacgaagaggaagagctgtcaatagaagccccagaaaagccgtctgaaaagatagaggtcaacgttagaccatatctggtgattcagctcctcgggctggttgcttatatcatcctcgcggctatcctctgggataaactccccgagagagtcgctatccacttcaacgcctctggagaaccggataactttgcctcaaagaccctgggcaccctactgttcccgcttgtggtttacccgctcttcctcgtcatgacctacttcctcagagagcccgccttcgcaccgctcctcaggttcagcagaaggggctggaaagccttcgcggagtttacgaccgttatggcccttgggctggtggccattgacagcctggtgctcctctacaacgccggccaagttccatcgagctggataggttattccgtctggacttttctgatagttaccatcggcatgattttccgactcttttgggcgaggggtgagggaacgtgaacccctacttcatctttaggattctctacggtgttttcctcggactggccttcgtgatagggggcatacttaccgcaacctccaagggcgaacctgggatagggttcagaatcggctacacctacctcagcgagcgggcgagggaaagggcgaacaggataaccggaatcggtctaattgcccttggctgttatttatgctctcctcgttcttcctgccgctatacggcatgtttgtcctcctcatcgggggagtcgccgttgtcttggcgatcggctacatcgtggccaggcgcgagtacgagcttgaggacatctccagggaagcgccggagaagcccacgaaaagcatagagccgcccaagctcggaaagcacttagctgcacagctggtcttcgctttgctcctcgttctcatgtctccaaagctcccgagggacatggcaattgtcctcggctcagtgatggccctcttcatagctctaacgctcctcgcctccaggccgctcgtcttccagctcgccccgaagttctcagggataatggcacgaggcttcgcaaaggccatcacgctggtctccgcgctcttgacgtttgaagcctttcttgcatggatgggctttgaggacgacgttctgggaatactgctacttccgatttccctgctggtgatcttctacgcggcctacgtcatgctgacctctgcctacagggagggctattattagctctcaagcgcctttatcagcccctctttttcaggcttttcgattattccaacctcaacagcgtgctggaggatgtagtcaggaacgtcctctccgaaaaaggccttaatcccctttccaggcaggtagaaggcgtaaactctcactctcttcccgaggacttttcccatgaagacggagaagcccttctccgcgttaactctcacgacatcccacgagaacgtctcggctatggaaaagaatgcctcgaagagcttcaccctggcatccttgagggccttatttacagcctgccttgagattcctagagtttctgctatatccacctcacgcatgcccctggccctcattagccagaccctctccattccctcagggagcttgaacattggcgacccccctgagcaggactcgtaataccgcctcaggctcctcactcattagggagtactttttcctttgggtcgttatcacaacgtagtccttacggtaatactcggcaacaaaaaggagtccgaatatacccaagaccaaaacggatacggggtcaacataacccatcttcagctccataagaagtgccgcaaagagcagatcgagaaccccgaagaggagggcgatgttagtcctactgaacggcagggacataaccgcaaggtaaatgaggccgaagaatatcagccctatgtcgccaagataatacccctccaaaagcccgctgggaaggagcaaaaggtcaaggaagacgaacagcacactggcggtgattaagatatacaatcccggaaattcccttatcaggactgccctctcaagcctgctcactactttaacgtcttctatttcagagaggggaacgttaattgctaatctgccaaaggcgtacctaagcctcaatgtccatccttccacatcaaccgatgtcccccatgaagccgcaaggacgagccagcccacaatagagaagtaccaccaatccggagcaagtcttggaaagcctattatcaggagaaatgagaaccctactaaaaggaggggacctccggagaagttagcgggctttgcatcccccactttcatcacggatcaccccttagcttcacataattccaccatacccgatcaaccctactatcagctccccattggcacaggagacgaggtagcttcccttctcagtcctcacaactaccagatccctgccaagaagttcgtccaggagaaagcttccaaagagccacgtgagcagtgttattgggagcgttttcaaggagccgaaggcgagcagaggaagtgagaggagaatcggcaagattgttaacgataacttcttctttttaagctctttgagtggaaagatgaagatttcaatgtaaatgatgagccagtaagcataaacagcaagaagctcggtataaggtgctccttttgccacgaaagctatcagaaaagccgttagcgctacaggcgtcgttccaaaggcctttgccatggtcaaaatccggccgcgctccatctcggataaccttgcaacctcaaccacatcactgagctcaacacttccgaagacgtagcggagccgctttctctcgggttctatccccttgccccgcgatagaaggaaaagaaccagcccaatcagcatcaaatagctcgatccaactaaaatactcccaatcataacacataaacctgccatgctcaagagaagcggtacacctcccgttgggtaagggtagcagtcaccctgcataccaccaccttgtcaaccttagtaagttgacaacatatttaaacctttcgacaggcttaaattatttcacccactctcttatgtggtgatgtcatgtccctcgaggagctctatcggtacctaaactggcggatgaatccggcagacgagagggcacgggagaggtttgagagaataagggagttttttgagtcagtctctgataaactcccaaagggaggcagagtcctggacatctgcgctggaactggagtggcaggcgttgcccttgcaaaagcaacaggtgcaaagctcctaacggtcctcgacgccaggaaagacgaccttgagctcgctaaggagtggctcaaaatcgctgatataaaccccgaactcaatctcgtccagggtgatgcgagagaggtagcgaagctcgtgggcgagcacgacgttgcggtcctctggggctacacgatgccgcacttcgatccctttgatgccgtgaggctcttcgcaaacgttgcgtccatcctgagtggtgagggcgttttcatcatagaggacatggacagggtctactggattctctaccgcgctggatacaaaaagttcctcatcgaagggcggagggagaactacaccatagcctcgatgcacgagggctacgacttcgtgagggggacttttaagaggggctactacatccttcctggattcaaaaagataagcgacgttgactttcattactgggacttggccactcagcttgccattggcagtgttttcttcaaggaagctgaattgatcactcaggaggaacacgagaaaaaagttggggacatcctgctcttcagaaagccgagaaaggaaatagcggggaaaattcttgaggattacaatgtgtagtactgcggtctcctgtccttgaagatgtcgttcatttcgtttattctcttgtccctcgccagcgataggtctatctctactaccccgacttcctctttatcctcacttcccattgcaaggacttccgccctcggcgaggctattgtgctctttcctatgaacctcagcccaaactcctccccaatcctgttggccgttatcgtgtagaccctgttctcaagggcccttatcggcatggccctcggggcgtagggcatcacgaggttgctcgggtgtgctatgacgtcagcacctttgagggcgagcgttctcgcgctctcggggaagaaccagtcgaagcatatcatcacgccgaccttcgctatcccgatgttgaagacgtggaagccgaggtttccgggcctgaagaagagcttctccctgttgaagagatgtatcttccggtacttccctatgtagccccagccaaccgggccgacaagcacggcggagttgtataggttgcccttctcgtccttctcggccgttccagcaactatgaacacctcaagctctttcgcgagttcaaccagaaactcagtcgtcgggccgtcgggtatctggcccgctacctcttcgacttcttccctgctcctgaagttgtagcctgtgtcaaacagctctggcagaaccacgagcttggcgccctgatcagcggcttcccgtatcagcttctcagccctggagtagttggcctcgggatcaagaaaaaccggctccatctgaacgtaggcgaccttcatagtatcacctaactcactataacgtcccaaagttgataaacctgatgggttcgggcttttaaaatattacagactttttaggcattaaaattgttttttctcagcctttagatattttcaaagataatgcgttagttttcacaacgcatcaagcttttcagggaatttaaactccataaacatcaataacacttgtaaaaacgctgtcagcatacccgacgaaaacggccactaaaacgcacctatgtctcaaaagagaccacctaacagctcttctaggtatgcaaactcccgcaggccaaaaaggaaaaccttaaaaactctccaccagaggtcggctcaggaaaaggaggtgacgatcatgaagaggcgcccgaggaagtggaagaagaagggaaggatgaggtggaagtggatcaagaagaggattaggaggctcaagaggcagcgcaggaaggagcgcggacttatctgacgctccggtggttctatgtctcttttttccgaacttcaacttctttcccttgagcttgagacctcccgcgggaaggccctcgtttttgccgacccccacatcggcttcgagctttcgaggggactccgcatcaggactgattttgaggaagttctggcccagttcgtactggagagtaaccctaacctcctcataatcctgggagacctcaaagaacccctgggcctaagcttcagacttaaagagatgctcctaaggttcttctccccactaaaggacaccgaagtcgtaatcaccaagggcaaccacgacggcagaatcgaagagatagccagaaagttcgaaaacgtttccgttgttgagaaatttattctcgaccaaaaactcttcctccacggccatacaaaattgccgaaaggagagttccgggaagtcttcctcggtcacgctcatcccgcatacacattcaagagcggaggagttgcgaaaaaggtcaaagtctttgtcagagccgaaaaattcctcgtcctgccgaccatcaacccgtacatagagggttttgacatacgggaaggtctgaagttagttccgttcctaaaagatgtttctgaggtagagatattccttcccgaaggcgtttacgttagaaaggtaaaggtttattaaggggtatgaagatacctcttcataggtgtgagagatcaggttgggtgaagtgtgatgggcgacgtctacgagaggctcgaagcactgcttaagtcgctgggagtgaagaaaaccgagctcaggatatacaggctcctcctggagaaaaagcgcccgatgagagtaaccgagatagtcaacgaacttggaataagcgagcgttcagttagagagcacgttttgagcctctacaggaagggaatgctccggagagagcttatacagcagggatggctcgggtacacctacaccgccgtctctccccatgagcttctcgcgaggataaagcagaacatcctcgaaaaaataaacgaaattgagatggagcttagggaggctaagaactgagggcaacaacgcccacttcttcaagtatttcgaccagcctcttcagtttctccctctcgatgcttccgtactcttcttcgatggcccgataggcattcccctctgaaaggagttcaccgagcattataagctcgtggaggtgcgtcaccgttgccctttcctcggtcagcttcttaaagtcctcagccagaccgggtgctctgctcctgattaagcgctcggatatcaatcccctctctttccactccagccagggttttgccttggtctctacctccaagttaagctccagcccaaggaactccgcatctctagcgaggccggcctttacgagcttctcgctctccttaggttcaaggcgcattccgatttccccaagaacttttctagcgtagcccctcgcaaattgctcaatcctgcgcttttcctcctctgacaggaacagagccgccgaaagaacggccctctcgactatggccacagtctccctgctcaccttgtctatcgtatcaccgcttgagtggtagaacctgtcaggccaggttatcggcatgacggatgggacaccgaagaagttgaagatgtcatggtcgctccccatctcgtacgggtatgccctgaagggcatcacgggaagtctgcttcccgagaagctcttgcctctcgagttgctcagctcaatggcgacctccagcgctccagaaaccaccgagaagcgtgagaacggtgtcctcacgaacatcagagttgattctgagcggtcgggactacccgcgaccatgtcgaggtttatgcctgcgtaatactcttcaacacccgccctttcaatgaacgcctggctcccgtggtattcaggaacccagaggaaggcgtagccaaacctgccgttttccctctttgatagaaccctagccagctcaaggagcatcgcgttaccgctggcgttgtcgtttgcccccggctttggatggcatatgtgcgccgtgaagagcagatacggaggttcgccaacttcggcgtagaccatcgggagagtctccgaactttttatctccgtctcggccgtacccctaacttcaacgcctcccgaaagcgccctcctaatcaggcctttagcaacagcctccgggacggcaaaggcgggaatttgcgcccagtttaggtcttccttagtcaggaacaggcctatgtacgggtagaactcaccagttccttccctgtaagctatgaagcccgaagctccaacctcgttagccctcctataggcatctctccagtcttttccgacgaggacaaccttcccctctgccctctcccagtcttcttgcctcagaatcggaagtacctccccatcgacctccccagaaggggagtgggccatcacgaggagcggactttccgctgttgtgagtgttcttccaggaacttcaagacgcccatcaataacttcccatgctattggagacggaagcgttagatgccagcgtttgccgtcgtatttatccttgagaagctttgcctcaagacccatgcgggacagctcttcgagaacgtattcggcggcctcgacaaggccttttgacccctgtatcctgtggaagtgcgaaatcccggctatccagttcagaacgttgtctgagctaaattcggcactatcccgcaggaagcgctccatagggtttcaccaggggattaattgaaaggggacacaaaaaagttatccctcactgcccctaagccggagcatctttggcggctcaagagctttcaccgaatcaaggagctccggcgggagcatcagattggtggtctggaggaattcaaagtactcccgctccagggattttccagactctaggacttcctccctgctttcttccggggaaaaggccacctcaacctttttagatgtcccctcaggctcaatttttccagcaactataaggttcttcgctatcatctccgacctgtcacgaaggccctgctccttgccctttttataggcctccttaactaagtcatatattccgagctcctctgcctgcttgtagagctcctcgcgcttttttctcacccattccacccattcgctatgccccttcaagccaaggaagtaaccaaagctgtaagcttccttaacaagcttcttcttgtcagtcatattggggcctccttgtagacggttataccctcgttcgtgaagcgcatcctcttgaggttgctgtcgtggggcacgcccctcatcttgagtatctggatcgccctgaccatctggtagttgcgcatgaagtggtggagcacgatgacgccatcagcgaggtagtactcgtcggtgtacttttcggagctcagcatttcggagaggaggagcgtcgttatgtccatggtgcggagctttctaacgaagcggcccagctctttcttctttccctcagggttggtgacgaatgactcgaagaggctgaatgagtctatgacaacccttttggcgttttctctcttgataatttccaggaggagcttgaagagctcgtcccagctcagctcacggtttgcactaagaagaatttcaccgaggtcgtaaaagactatcttctttgagttgacgtactcgagaatcccaaggttgtacctgagcatatccctaacgataatatccggcgtttcaaaaagtgctatgaagagacctttctcgtcgttcttggcgccctccgcaagaaactgcatccccagcgtggtctttccgcttccaggcggccctgtcacgacgtaaaccctgcccggaagaaaaccgccgcctatcagctcatcgagccccggaactccactgggtatcctgtcgagattcttcaaaagttctccaacgtacattcgctcgcccctagatattttccattgttctctatttaaacccaccgttgctcagccccaggttacgtgcctgttaaccgcaaagcgcacgatgaaagacacaactattccaatcagattcgcgagaaggtagtgcactccaactgccataaggataacgtagatcgcccactggacaagggcaccgctcaaagccgcaacgtgaaagcttaccagcctcttcaggagaggtttgttcttcagatccctaaaagtccagatgtcattccacgtgaagttgttgagtatggcgagctcagttgccaggatgttggagaacaccttgtcccatccaaaaaactccacaaacgcccagaggaaaccttcgtttacgaggacaccagagagaccaaccagggagaacttcactagcctgtctatttccccctcccacctcataagcctgtagatgtgtctgagatagtttacaatagtcctgcttccgagcttgctttctccggcttttctcagcccgaatgtgaaaggaacttccctgacgttattgtagtgtcccttaaccagtatctccatgagaatcttaaagcccacaggattaagctcaacgccttcaacgacctcccttctgagggcgaagaagccacttacaggatcctttacgttcctgattctgggaagggcaacgcggcctatcatgatggcccctttggatatcagcttcctgtaccagtaccagttcttaacggcgccgcctgggacgtacctgctggctatagcgatgtctgcaccgcgttttatcgcctcgatgagctcgggaaccttctcggggggatgctgaaggtccgcgtccatcacaacgaatacatcaccagaggcctccttaaacccacggattacagccgaggaaagccccttttctttcgtcctcctgatgaccttaatggggtacttccttgccagctcctccgcgagcccccacgtcttatcaggtgaatcatcgtcaactatcacaatctcgtactcataaccctgaagcgcccgcgagagcctctcaacaagttcgggcagattctccctttcattgtacgttgggattacaacgctgattttcacttttcagcaccccgctttgtcttgatagtccgtaaactttataagtccttttggtgcggtatcatcgggaagtggggccgtggggtagcttggtctatccttccggcttcgggagccggagacccgagttcaaatctcggcggccccaccacaacagccctttcttacgaaagcgctggcggaaagttagtatgcgtttttaaagagctagcctttgagtgggtttacttaccgagttgctagattcaaaaggattttatcaccgtatagtgcccgaagggcactaaaaagaaagccaaaatcacaatcagctgggggattttggagttaaacccactcaaactcgctttatagtggagcatacactcctcaataagcaaagttcgagaagaagagcaacttttgctcaagctttttccaaaagcttgaagggcaaagtttcatcaaagatggaatgtccttttgagcttcctgttttccagtgattctcaatgctcaactagcggtttcaagggggtttactcacagtataacgcccgaaaggcgttaaaaataagaaaacccgcattactctgcccctctaccaagagaatctaatcgcatcaagccaacatcaagaagacattcgagcttttggtgaagctttttccaaaagcttccttgcgaagtttgatcaaggttcgtggttcttttctaaaattgctgtttactgaggattttcaagatacacaagccagacatcagtgaattcccctaagtttcagcctgatgaaaaggagttttctcgccttgacgccctacgggcgtcaattaaaaagcaaactcaagaaaaacaagcgaattaaaaatagaattcacgactcaagacagcgttcaaaaggaaaatccgcccaaaacgacccgttaaataggaaccacgaactttggtgaagctttttctaaaagtttcagcgccgctttcactagcgttcaagcgtccttaacggatggcggaaggatagtatgcttttgaaacaggctaaattttatgagaggtttacttatcaatttgccaatcgcatgggatttccccacagtatagcgctcttcgagcgctaaaaagaaaggtgaaatcacaattaacgagagatttgagagcaaatccgcacaaagttgccttctgagcaggcatacacctcttaacaggcaagttcaaaaagaagggtaaatcttgaccaggttttgaaaaaacttgaggggcaaagtttccatccgctcagtggtgaccgctctcatcacccgtcaggagggcttgggcgtcatcatcgctggacttaaaagccctccggagtttttaacggtggtggttaaaatgacgatgcgcttcattccgctcatagtggccaggcccgaagttcagatggccatagacgaggccataatgagagcgagaatcgaggggaaagtcccggacactgtgaggctctacgccttctcccccagctcagttacaatcggcaggttccagagcgtagtccacgatgttaatctcgatgaggcaaaaaagctccgtattccggtcgtgaggaggataactggcggcggaagcgtcttccacgacgagtacggcgagataacttattcaattgtcatcggggaagactaccatcctgcccttaagaacgtcgaagagagctaccgctacctagcgggcccgctcgtggatgccctgaaagacctcggccttaaagcgggcttctcaggactgaacgacatagttgccaacgggaagaagataagcggctcggcccagacgaggagacggggagtaatcctccagcacggcacctttatgtatgcaacgagggtcgagattctgggaagggttctccgcgtctcaaaggagaagctgaaggacaaaggtatttcgagcatctgggagcgggttacaacccttgaacgcgagggagtaaagctgagccgctgggaagcctacgaactgctgaaggagagcttctccaacgcctttgagcttgaggagggcgagctgacagactacgagcttgagctagcggaaaagctgatagaagagaagtatagaaatcctaagtggaacgagatgcgttaggggagttcccagttttctctgattttatactcttccacaagctcatagaaaagctcgtccgttccaagctcttcccttagccttctgaagttctcttcaaggcggggaagtctgccctttgagcgcctcagcatctcgttgcctatctcaaccgcaaagcggaggtagccgtcatcgacgagaactctgccgtccctgccgagcggtgccgtcaggtactcagtggcgtttatctcaacaagatagcgctttgagataaccttgaaggtagtgtacttgaagcccgaggccaggccgagctcgtggagcttcctggccttctcaaggtcttcagcaacgacgtggaagatcgggggctggctcttgaggaaaattatgccctccttcgcgttcttcagggcctccttagcctcttcgaactcaatcggcctgtggacttttatcagccagcgggagaggggctttgcccccagagcgggctcttcaatgatgcctatccttcccgagcaggaggaggtagtgtagatgcccttaatggagttgatgagcaggaggaggtctattatgtccccgtcaacctttccatctctcatggccgtgaacaggctttgaagggcttctcgcttggctttcatctttaatccacctctgaccttttgatttcacataatatcagcccatacaggagttatccacctaaaaggacaccagataccttcttccgccgattctgacgaaaactttataaagctaacccaaaagcttaagctggagatggccggggtggtgtagcctggttagcacaggggactgtggatcccctagcccgggttcaaatcccggccccggccccataacagccctttctgacgaaagcgctggcggaaagtttttgactgatttttaaagagtttgctttgagatgaatgtctaatcacaacctgcaaaactacaaaagaccaaatgttagaaaagtttgagaatacaaaagttgctcatataagatttaaaatcatcgtaagagacgctaattacgcagaactacaaaagctaaagagtgataatgaggtcgtggaatatattggagggatttggaaatgagaagaaaagtgaaggctctgttgctattattttttcttttgccagttgtacctctgaaagttagctatctgaggcttacatattacgattataaatacaccacgccgatccaagagggcaaattgcctaacgaagtacttgacagttcactaaatggaaactcggattgtcctgttgaagtaaagaatggccttatactgttgatgaaaaatgaggacgtcattaagagcattcaagttaatctaagcagagacttcagtggtgaaggtcagtgtttaattcacaatgaaaccctttatgtggcggtggttggtgagaggggaatagttgggattgaaggactttacaaggatattgacatagtttaccatctgcaaaaccgctatgtctgggcatttgatttagggagtggaaaggtggattggtattatcatgaaattaaaggctgtagaactggaggcggttgctatccatttgatccgcaagtaaaacttcaaaacggaaagttatatgtgagtttttccccttacgaaggcaggactctggtatttaacccatactccgaaaagaaataatgccaggtgcatttctccttatatccgccactttatctatggttttcttcaaattattctcacaccaactatacttatactagaatttcatttacaaggttcaaactcaggccctgcaccatatcagcccttgcttgtgcaatcatagctttcaaccccgttcaaattcctcgagggatggcagaaagggtatgcttttctgaaaatacaaacctgggaggaatttactcctcatttgctcttataaagtgtttgtcgccaacaaagcatccaaaggacgccagaaaaaagcaaacttcataaaactacctcggcagttaaacccatcttagagatcgggaggagaagagtgcacgattaacacccagcattttatggaaagtgcctttggtggaacttttcgccagcaagcttttggaaaaagcctgaccaaagaaactttgcagggcaaagtttcatcaaagagtgaatatcctttctaaattgccaagttttcatgattctccccccccccccaattggcggttttcaatagatttacttgtagtataacgaccaaagggcgttaaaagagcaaggaaaaaccctaattgttttcccctcttaaaggaaggccaccaaactcttcctcctcagggattccttgatcaaaacccaagacctagaagttgtcagtatccgggtacatttcatcagctaaagagtatgtaataccagaggacacaaacataaacaaccgcttctttatactactatctccagcttcaacatactcaaaagctcatcataactatactccccaaagggatctaattccttgaagtaatatctaacaggaattatccgatcatcttcaaaggccgatcttgagaagtccttggctatcaacagtccacccaccgcctcgttcccgtattcacttagatactttcttagttgctccacatcctttttctgggcttttccagtcttaacttccgcaagaatgtacctattaagggcagaaggatgcttcagttttatgaaaatgtccacgtatccttctggaagagctttttcaccaagtacttcaaattcctctggagaattatctacttcaaatatctccagaacatcacggagaaccgtgactccaagtttctttctcaccagcgactggagtataagctccctaaagtagaacttctcaggaattctctggtttttcctgtcaaacacaatttttggctcaaatgtttctgcattaagctccaagtactccggctctccagcaaaaggattgcccatctcagaaaccttgtaaaatgttacagtatcggcttgaaaatgagttttacgataacctcctcttaatagcaagttttcggcaacataagagaactcttgccgaaccataggctcgttaaattctcgttctggtttcaaaaacagccggaatgggaagtaataagtcttttgtgatctgaaagttattggaggccagggaggaagatcccttgcgtttttataagctaccttcctgacgacacggtacagatttcgaaccctggccccgtagagaaatgatatataatccccaacacttatgtcaaagaaagtccagagaccatttatactgttcgtaaaccccgctaaattgtacttaacacagagctctaagttttctcgatttgataaagacaccaaaaaataatccggcacgttaaccacccacataacaaccccaaaataagctatttaacccttttcccaatctgactttttattagggacctcaaaacgcaaactcctccaccgagaactcttccatgaccctctcgaagtcgttctccggggcgtaggtaaagccgcatttggagcacttcaagatgcccttctcctcgtggagcggcgagaagcagacgggacagcggtactcctcgcggtggagcctctcatagacctcatcgcgcatcacaaccaggttgagctcgctctcccagtcctcgtggagcatgccccagtatggcgtctcgacagggtagaagtcctcaaggatgagggcgtttatccctattccctttaccccgggtgggagctttccggccggttcaatcgagacaacgtactggtcgtagaactctatgtgctccgtcctgatggtcagtcccctggagagcttcgaacggagagggatgagctggaggaaaagagcctccctctcgacgtcccagctagcgcttattgaaacgctccccttagtgaagaactgggtgataaagcggtcgtccctatcctccccagctaggtgaaagcccagcttggccattgccctgcccaagaagttcggcctcggaagcttctggtagtttatcagatactcccctatccatccagccaggggcatggaatagcctatgaaggcctgcttctgaacgcgcaggtaggcgacgctgggaaggagcttgaactgattgagcatcaatggatagacgattttatcatatatatgcttaacggagatcgaacacacgaaaaggaaaccaagaggagaatgttacgagccgaagaactcgtcgaggcttatgcctttccgcttctttctctttggcttctcactctcagccttcttagcgttccctgccgttcctcttgcctgctcattcttagcggccgcttcaaagctggtgaggttcttgaccttctcggagcgtttgggttttgcactctccttctttttcgagggttctttgccttttccagagagctttgaggctaaactcccagactttttgctggcctttccgttcttcccgttgaactcgtcgaggtagccgttctttccgttggaatgacccgtcctctccttgaccatcttctcgcagatgtccgccgagaagcccatgagggtcctctgtttctcaggaaagacgttctcgaagagcgtctttatgtccttctcggttatgcatatcctctgcctcgtgtagtcctttactctgtacttagtaacgagcatcttggccgtgggcaggtacttttctattgcacccttgctgacggtgaggactatctttccgccgcacttcgggcacttgccggtcaaaggtggccttctgtacttcgtgttgcacttgacgcagcggaactcctgcctcgtgaagctcctaaggttgcctctaaggtccggaacgaggtgagagttgattatcgtttcagcaacgtggtgctcatccacggcccttatcctctctgccagagcgagctgtctggcgaccttctcctccatgtcgccgagctgtttgtacaggctcatcttcgggccgagaccaatgtcgtccgtatcgtgggtgaactttatcccctcgtacatctcgggcttgcccaggcggtcctcaacgcgctctatgaccttcacttcctttggagacttgagctcgtaggtggccttgtagaactcgagaggatagtacctgaccacatccatgttgtgaacctcgctgtctacctccctcgggtcaagacgggtggtaacgaccagaggagcgtccatcttgccgccgcgcttttcgggcagatagtatttgctgaagttgaggagggcatcgaggaggagcattacagcgtcttcgtcgccgtcgcattggtgtgttacaatactttcgttaattatcacattatgatactttttagcgtttaaagagaacacgaaatcatcttttggtgtgatgtattcaatgcgcctgactttcaccagccagccattctgtgaggaatatctatcctgagctggagatttctcagcatgaagctcatagattgagttcttgcgttcactcacaaagccaatgctattgaagaacctgtggtagtgctcacctgcaatgttaagggcgtagacttttgaaactggagcctcagttccgcgttcaacgtgatacagtctcccgcgagcgttgcctctattggcattattgtcaaaggtgtaatagccacgaatgccgaacttggcaagcaacagtgtctcaatgtcctcaaggagggccttattaacactatacgctaccacacgaggcacggacttaagggcacttccatctccctcgaagtatgccttaagcatctctgcaacggcttcacgtggcagtgtgaaaacaagagacggaacgcgcttgctgtatgcgttctttccagccttcagaacttccgtaaacagcaggtagagaatacgcgagccaactgtaactttccctcccctctcgtagataccaaaaccgtccccgaaagcttctctgagtgccctcttgaggtcttccctaacctccttctctgccatcgagaagctcagctgatagacactcttgctttctcttgcatagccctcggcaaggtagtacccaacgacgcggaggagaggtttgagaggtacgaaccgcttgattcttactttatcgcgcttaaatccaagccagcaggaaggtacttcctcaatggatatctctttctccgtgagaacccttagaaggacgctcaaaggtatggagtctctgcgcaggtagtcttcttttacatcagcctcaactgagcggagccactctgctattccacgaaccattatcctatcgtgaagatgagcaaactcctctctggagaactcttttagcagatcaaggtagtcaatgttcttttcaggaagcttcaaattaggcacgaggattctatctccttccctaacctcaaaggccctcttctcaacgaacttgccgttttcgtagacaagcaccggatggtcaacagtcgtctcaaagctcctgccgagctcaagctcgaaccttatcaaatgatccgtcgatggagcctttatgacgtcctctatgtcagtaaggacgacctttccgctctctgggtcaaatgaataaactttgacgtccgccttcggcttctttctcacgtaggccatgttttcgtaccgctcgtcttcaaagaggtcgtagagttccctgagggttatcctctgaggaaggccgttgatctggacgagtatcctcgtgtcacctgggaagcagttcctcctcttcgccgcatggtaatacgggtgtgcgtagccaacgagaacgtctgaaaagccgattatcctcccaatgattccagccgaggtgtgtggagcgagacctataacgaggtgacccacaaggtcttccatcttctcggcattgtagaacctgggtaatccgtagaacttctcaaggaggtcatcgatgaagcgcgccaccttgaggaggtacctccctgcctcgtagggcagaataacgtcctggaccttcagctcgagtatctggtcgtccctctcgaggggcttcccctcgaagtcgtgagtgtagccgagctccctcagcttctcgacgctcgtccctatctccttaggtttgaagtgggttattggagcgtcggtcgcgtcgaagcggattgtaccatccttaaagacgtagacgtcgtttttaacacggagaagacccttctccagcggctcggccatcttgtagccggaggtcatacccttaacgcccttgagcctgtctatgccgtagaccttgacgttgtccatggcctgccttaacaggtcggcgggctttatctcccgctccgcgtagggcttgagctcaacgtcgcacttcggacagcggtagttaaagtcctttgcatcgctctcaggataatccgctccacacttcgggcagtgccagaggagctccttcctggttccacagacggggcagaggtgctccggcccgacgtggccgcacttgggacacttgaagaaggctatctcaaccctggccgtttttccttcctcggcggctttcttgatgtccctgctctggccgccggcaaggcctatcgggaagagaacctggaccggcggcttcatctttctttccttggccttctctggccttcccatcctcgcgccgatccagcttattcccctatcgcggagctttatcctgttgttctcgttgatgatgtctatgaccgtgtagaagggctttgccttgaactcccactcaaggttgccgagcggcgtcagaagggccgcactccagggatattcaacgacgatgaccttcctcttcttctcaaccctttcaagcctgtggggcaggccgaggagctcaaggtagcgtttgatatttttatcgttctcaaggacgaccttcttcgcgaagcggttctttctgaactcagcccactctatctgagcacccagaagggccttctggagttcctcgacctcttccggctgaagggtgttccagtagagggtgtagtacgggtggaacggtatgtcgagaaccgttgaaaggtgaatggccgtctccacatctggtttaaccctgagcggatccttcaagaggttccacaggaaatcggggtctacctcaaggtactcagccgcttcctctacggcttccctgtcgttctcagcaaagggctgaagctcaacctcgtagaggtctttgatggcctgtactagctcctgaacccaccactcctcgacgtagtttgccgggagaagcgtctggttgttctcgacgaagtcgccgaagtttacgagcgcatcgccaacgtataggatctcgtcaacctcgttcctgacctttagagccgtttcatagtcatctacccttaccacgctcccgttcttgagcctgacgatcggaccctccaccgtagtcgctggagtcacgatacaacccttacctggcctctccgtcttcatctgggtcccaattgctatgaactcgtccagaatgagcattgttgctggattgacgctccaggtcgcaaagccggagacccttgagcggccgtacctgagcctgaagccgccgttggtcgaaggctcggcgaagaggggtcttccaccgattatctccttggtgtacttcttgttgggggcaatattggccctgaacttctcgtagagctcgtaatagaaacccttctcgacattctccttcttttcagcgacgctctcagttccagtgtcctcggccttcgattcgtctttattctcttcactactcttgcccttctccttggcttccacgaactcctttatccagtcccagccctcgatccccatcttgtctatgtacttcacgagcttctttgccttctgcaggacaccttcagcgagaacgagaatggcaccgccgcggaggtggttcgtctcaacaccggggacgtttctgtgagagacttcaactttatcggtctcctcaccggttatctcgatcgggatgttcctcatggcgagccttacttcgtctgcctccgggtggtactgcaacctcgtaacagccctgtggtagaggtcaacctcttcgaccatcctctcaatgtgttcatcgctcggcttgaagcggtcgagaccgagctttctcctcacgtaatcaccaacgagaacgctcaaagcctgagccgttccaccggaactcctgatcgggccggcatagtagagagctaagtactcgctcccgtcggcccactcgttgcgctttattttaacgtcagcgataccttccagtggagcggaaactataccttccgttagaattgccagggcagtcctcaccgcctgctcagcgtacttctccttgctcccaaggtcaccgaacttgccctcgattatctcatcaacaactttaagggcagctatctccttgccatactctttgactagctctctaatcctctcggccacgccgggcggtccgacgaggctctcaacacggccagccatatcagtagcctgcggaacctcaacgtcaaagctcggatccttaccctgtgcgcgggccttcctcgctatcgcataggccctgtctatctcgcgctggagtgactcgaagtaagccttcatttcaggcgagtaaatctcctcgctcattcaaaccccctcgcaaaactggtcaaacctaaccacagccctcaggcgggcggtttcaacgtcgattatcggaaccctcgccggagtcgggattatgttcaccatcttctggaattcagtctgcgcctgccacgtaccggtgtttatgacgaagacgccgttgtacgtcttgtactgcatgacgtggacgtggcctgcctggaataggtctggaacgctctcgatgacgagcgtatcctcggggtcgggagctatcggaaccttgttcccgaaggtcggagctatgtgtctgagcttaagaagctctaccattgcctcagcgggcctgtggtggctcctgttggggacaaaatcaacgacgtcctctattcccctgccgtgggctacgaggaagtccctgccgtgaagccgtattacggcaggattgctgattatcacagcgttcttgagcttgtagagcggctttgcatactcttcgtagaagcccggctgcggaagggccgttctggccgcgtcgtggtttccaggcccgatgaacatcgttatgtggtccggaacctgtttcagcaggtttgcaagggcctcatactggtcgaagatatctggaatcgccagctcgttatactggcccggatagatgccgacgccgtcaacgacgtcgccgccaataatgatgtacttgattctgctcaccagctcttcctcggttctgctgttaacctcgccgttgagccactcaaggaacttgataaaagcttcctcgcagaacttgttgctaccgacgtggatgtcgctgagcaggatggcgtagaccttctcctcaagcggtggttttgacctcttgaacttcggaacgtccgggaggaacaccctgtttgcgaagaatattcccttcccgggggtgcccctgaaagcaacaacagaatcgggcattatcgtgctgtaggcttcatttgcaccctccttgtccgagcctatgaagaccttgatccttcccgtggcgtcctcgatctcaaagaggtagccctttcttgtctcgcgcttttcattgacgagcccgattatcgtgacatcatcttctcggacgtagctcagcttggcgatatccactatcgtgccgatttcagggttctcgcggaagatcctccgcatcttcttaagcctggacttgaagtagctggaatatgcctggattatgacctcaccctccttgctctgggcgttcttgaccttgggaacctcgaacttcacgttcttgacgtcaaaggccagctcccactcgtcgggaatctcctttgccctgtagtggaagccctcctttggggctatcactaggtcggaatacgtcgaataggctttctcttcctccggagtttcatctgcaacgtaggctattgggacaccgtagtcaccgtagactatcttcggcttgacaccgttgtcgccgttctcgtagtactcttcagagtccccatacccattctcactcccgttttccactggaagggactcatcagagaagccgttttcatcgggaaattctccttcaggggactcttctaggagggcctcatcttcaggagttccagtggaaatgaaactctcccccccagaggaggcctcttctaaagcttctgattcagaatcagagccaccatagtccacagatcccaaggcatttccagtggaaatagaggtctcatccccctcagaagactgaacaacttcagcaccatcatccatagaggatgataactctggttcagtgttgatttcatcctccagtgaagagccttcagatgctagagaactttccccagcgacgacaacatcttcaacagacgccgcacttggctcagctatagattcgaccccatcctcaactccttcctggagagaagattcaatggccccagattcatcagattcagattccagaactgcctccccgttaggtttcacaggagattcagaaacgctgatcccagagagtactgaaccgtcaagggcaccatttccactggaaattatgcccttttccgccaggaactctctggcaaggttggagtctacaacgaacgtcccccggtttttggcgaactttatcagctcggccagggtaaaggccttcttgtagtggtccgagagcagataatacgcggacggcgtgataaggtagttgttcttaaggaggtcctccaccagcatcagaacaacctcctctggcgagagaggctcagggtgaggagcgggcgaacctgctcatcgtggcggtatatgttcttcaccatatacggagtcacgttgagccttatctcctttgttctcccataacggcccttactgacgaccttggcgttgataatgccgagcatgtcaagttcgttgatcagatcactcacgcgcctctgggtgaggggctcaacgtcgaggctgtcgcagagcatcttgtaaattgagtaaacctcaccggtgttggcagggagctcgccgttttcatcgagcatgactatcgcgtagaggagaacctttgagtggagaggaagggtttttataacctcttccattgtgtcctgttcaatcttctcctgggctttccagacgtgcctctctgtaactttgctcgccccctcgcgctccgctatttcacccgcaaccctcagaaggtcgagggctctcctcgcgtctccgtgctccctggctgcgagggcggcacacagcggcacaaccgcatcgtccagcacaccctcataaaaagcctccttggcacgctgcatgaggatgtccctgagctggttcgcgtcgtatggcgggaaaacgacctcctcttcgctcaggctggagagaacgcgcgcatccaggtactctttgaacttgaggtcgttggaaatcccaatgatgcttacctttgccttgctaagctcgctgttgatcctcgtcagagaatacaggatgtcgtctccactcttcttgatgagcttgtctatctcgtcgaggactattataacgaagcgctccttggcatcaatgacttccttgagctttgcatagacctcatcggtgggccagccgacgaggggaacctcgatcccgctctcctctttgaagtggtttacaatccttgcgagaacgcggtagtgagtatcaattatttcacagttgatatagataacctcaacaggaatattgtacttctgggagatcttcttcagttcctcagtaacgaacttgacggttacggtctttccagttccagttttcccatacacaaaaacattagacggagtttcaccgcggagaactggaacaagaatgtgggcaaggtcgtctatctgcttgtgcctgtgtggaagctcctttggggtatagctgtgcctaagcacttctttgttcttgaatatcttcctggcatggaggtacttctcgaatattgaactgaggtagtcatcgtccatcgtcccactctccacttgaaatcatactcgatggaagtcgttccgtcaatatgatagtgcgctttccatcgaaatgaccagtacatatccttatttcaacattttgataggaaatatggggaaatattgaacattcacgagggactccacaggaaccagcggatacactggaaggcatacctatgtgtaggccgctggtttatatggattgttgaacatggagctgtcaaagaattccactcgaagttccagttctaacctgtgcaaaaagacctctccagaggaaacgcgaagcaagcaatgatcagggatgcacatacaagtttgcattagacaaacaaaacatcggtaggtgtgcctatttccactgaaagaggaatgaacagggatatacatgaaaacacgaacaatgatggacaaaagggatcatttttagaaaacatctttgttttcgcaatctcaaaaaataaacaattttgtagtcccccagagttctgtttccagtggaggcagctttcgttgctacacccattttcaatatcgaattttggtgcaaacactcccgctttttctttcccatcatgtatttataattttccataaacaatgttcaataattagcgggtattaagatgtaagattgaaaaaatactgaaagaacaaagtttaaatgaacaaaatcatatttacattgacacagacgctttaaaaataccctttctgttgtttaaagccatcaaatccatccattctccgaaagttggttccagtggaaataaaactctggggggtcttttcgatgagtatcgaaaaagagttccgtttccactggaaaacttgtgcctagtggtattcttatgttcattaaagttcacttaaccacgtcccaacgtttttaaccccttgcatgcacaccacaacgatgataccgataactgtaatccgcaggcttgttaagattagatatcgggtgaggcggagcaagctcctacagataggtgctgctgtgatagttctctccttagtctttgccggactgtttgcgtactttgaagggctggacttcttcactgccttctactgggccgtaataaccatggcgacgataggttacggtgatataacccctcagacggaggcgggaagaatagttgctatggttgcggcggtcgcgggcatctctacttttacggccctcgtttcccttctggctgaattcctaatttcttcctcacttaggaggatgatgggcatgcaccgtgttgggtactcgggacattacgttgtaatcgggcaggtagtagcgtggccagctttgtggacgagatactctctgcgatgggccgaggagaggttccccacaggccagttgttgtggtattccctaacgaagaagagcgcaggaaggttgagcttccagaggaagtcgaggttcttataggtgaccccatcaataaggagacactcgaaagggcccgggtcgagagtgcttcccatgttgttctggctctcgacgatgactcgaagtcggtcttcgtgaccctccgtgtcaagagcatttccggtgcaaaggtgttcgtggaagccctgagcgcggacagcatagacctgttgaaacaggctggggccgacagggttatcctcagcagaggtctagcgggtaggctgctcgccagcgccgtcatcgagcctgaagttgtggacgtcattgacgacataacaagctcccttggagggtacgacatcaccgtggttgaactcccagaagtctggggtgtgaagtactcggaagcgcttgagctggttcagaggaagtataatttgtacgtgatgggttactacaccaaccgcccagtgctcgttccaaggcttgactccccggttccagagggttcaaagctcatagtccttcgggaggttggggataacggcatttaatcccttattttctgtttaatattctttcctggctgctattgtaaaatatgggtcttttacagtttgattctagaatcggacgaaattcttaaaagtttcattgccaagtccctgagggacataaagtatataacctccccatgttttacccacatcaaaggtattgggtgatgatgatggcccgcaaaaagaaggttgaagatgaagtcaaagagcttgaggagtttgaagagctcgatgttgaagagtcactttcatcgtcggataagcagtcaaagccagagaaaaaaatctccgctcttgaggatctccctggcgttggtcctgccaccgctgaaaagcttcgcgaggctggttacgacacgatagaggcaatagcggttgcctcgccgctggagcttaaggagatagcggggataagcgaaggtgccgcactcaagatcatccaggccgcaagagaggcagctaacattggaaccttcatgcgcgccgacgagtacatgaagaggagaaccacaataggcaagatttccactggaagcaaagccctcgacaagctcctgggcggcggcattgagacgcaggccatcacggaggtattcggtgagttcggcagtggaaagtgcttcgcaaaggacaccaaggtctactacgagaacgatacgctagttcactttgagtccatcgaggatatgtatcacaaatacgcatccctcggaagagaggttccattcgacaacggctacgcggttccactggaaacggtctcggtttacacatttgaccctaaaacaggtgaggtaaagaggacgaaggcctcttacatataccgtgaaaaggtcgagaagcttgccgagataaggctttccaatggatatctcctcaggatcacgctactgcatccggttctcgtcttcaggaacgggctccagtgggttccagctggcatgatcaagccgggtgacctgatcgttggcataagaagcgttcctgctaacgcagctaccattgaggagtccgaggcttacttcctcggcctgttcgttgccgagggtacttcgaacccgctctccataacaacaggatccgaggagcttaaggacttcatagtttcttttatcgaagatcacgacggctacactccgacggttgaggtaagacgcggtctctacaggatactctttagaaagaagaccgccgagtggctcggtgagcttgccacgtcaaacgcatcaacgaaagtcgttcccgagagagtgctgaacgctggagaatctgccatcgcggcgtttctggctggatacttggatggggatggctatttaaccgagtcaatagttgagctggtcacaaagagccgtgagctcgccgatggacttgtcttcctacttaagaggcttggaataactccgaggatctctcagaaaacaatcgagggaagcgtttactaccgcatctacataacgggtgaagacaggaagaccttcgagaaagtccttgagaagagccgcataaagccgggcgagatgaacgagggcggcgttggcaggtatccacccgccctgggcaagttccttggaaagctctactcggagttcagactgcctaagagggacaatgagacggcttaccacatactcacgagaagcaggaatgtgtggttcaccgagaagactctctccaggatagaagaatactttagggaagcccttgagaagctttccgaggccagaaaggcactggaaatgggcgataaacccgagctcccgttcccgtggacggccatcacgaagtacggctttacagacaggcaggtggcgaactaccggacgagaggacttccaaagaggcccgagctgaaggagaaagttgtttcagcgctcctcaaggagattgagaggttggagggagttgcaaagcttgccctagaaacgatagagctcgcgagaaggctggagttccacgaagtctcgtccgttgaggtcgttgactacaacgactgggtctacgatctggtcattccagagacccacaacttcatcgcaccgaacggtctcgtgctccacaacacccagctcgcccacacacttgctgtcatggttcagaagccgcccgaggaaggtggtctcggcggttccgtcatctggattgacactgagaacaccttcaggcctgagaggataaagcagatcgccgaaaaccgcggcctcgatcctgaggagaccctcaagaacatctacgttgcgagggcgttcaacagcaaccaccagatgctcctcgtcgagaaggccgaggagataatcaaggagaaggctgagagcgacaggcctgtaaaacttctcgtcgtggattcactcatggcgcacttccgtgccgagtacgtgggaagaggcacgttggctgagaggcagcagaagctcgccaagcacctcgccgacctccacagattggcagacctctacgacatagcggtctttgtaaccaaccaggttcaggcgaaaccggatgccttcttcggtgatcctacgaggcctgtcggcggccacatcctagcccacagcgccactctcagggtctatctccgtaagggcaaggccggaaagagggtcgctcgcctgatagacagcccgcaccttcccgagggggaggcggtcttcaggataaccgagaagggagtcgaggactgaaggctttaaataccctcttcttttacccatccccatgtccaaggataaggtaacggtcatcacgtcgccatcaaccgaagaactcgtttcgctagtcaattcagctctcttagaagaggccatgctgacgatttttgcccgctgtaaggtccactacgatggaagggcaaagagcgagctcggctccggcgatagggtcatcatagtcaagcccgacggctcttttctcatccaccagagcaagaagcgcgagcccgtgaactggcagccaccgggtagcagagtgaggctggagctgagggagaacccagttctcgtctcgataaggagaaagccgagggagacccttgaggtcgagctcgaagaggtctacatggtctccgtcttccgagctgaggactacgaggagctcgcccttacggggagcgaggccgagatggcggagcttatctttgaaaatccagaggtcatagagcctggcttcaagccgctgttcagggagaaggcgataggaactggaatcgttgatgtccttggaagggacagtgatgggaatatagttgtccttgagcttaagcgcaggagggcggaactccatgccgttagacagctcaagagctacgtcgagattctgagagaggagtacggcgataaagtccgtggaattctcgttgctccctcgctcacttctggggcaaaaagactcctggaaaaggagggcctcgagttcaggaagctcgaaccgcctaaaagagactccaaaaagaagggcagacagaagacactgttttagccgatctgcatctcctgcgggagcatctccctaaccttgactactgttatggagtctcttctctccatctccacgaccctcccgaggccgaggagcttcaccctcgccctgcagacggtcacctccctctcatcgctctcctcccacggaactctcatgttgagctctctggcctctattaactcggttattagcccttctgttcctgttctaacgtcttcaaacggttcgtacgtcagaaatagcctccttaagtcttccatagccctctcaactgcgaggacgtttctggcacttctgagctcgattgtccggtaggggttcctcaaaagctcgtcgaggagcctccttgcgattccagctatcagcactgcctccatggccatcacctcacaggtacaggctctcgtactgcttctcggccctctgtctggcctgctccatctgctcgtgcatcttcctcagctgctcctctatcatcctggcctcctggaggagaggctcagtgctgaagtcgaggctggtgagcttcttgactacctccaggacgtttgctgctgccctcggatcgggcctgtcgccgaaggtctcacccattagcgcgtaggcgttcaggcccttcctgctagcttcccagaggagcttcccgctcatgcccattatcgagccgtactggagtatcttaacccccttctcctcaagctccttgttgagctcatctctggaaccgacgccccagacctcaagctgctccttgaagaagcctatccctatgccgcccatcgaaattaccttctcggccttcatctcgctcaggtagttcacaagctccttggctatctcgttgacgagcgtgggtgggacgtagatgtccgctaccgcaactatgatgttgtcctttccgtagaacctcagcggcgggttcggcttcccctcaaggatcagggccatcggcggcaagaacgggctttctacgtagcctatcatgtccatcttcagctccttcgccagaaagttcgccgctatatgacccacgaggcctatcccggggtagccctctatgagaatcgggttcttgacctcaggcaggacgagcttgaccggcttcccgttctccattctctcacctccggaaaactttagtttccaaaggttattaaactttcggagtttggtttccactggaaaggcaacccttatattatccaagcgcccaatcaacacggtgatgaccatgccgaggataggtattatcggcggttctggagtttacggcgtcttcgagcctaaggagaccgttaaggtgcacaccccgtatggaaggccttcagctccagtggaaataggagagatcgagggcgttgaggttgccttcattccgcgccacggcaagcaccacgagttcccaccgcacgaagtcccgtacagggccaacatctgggccctcaaggagcttggcgtcgagagggttattggaatcacggccgttggttcgctgcgcgaggagtacaagcccggggacatcgtcataactgaccagttcatcgacttcaccaagaagagggactacaccttctacaacgggccgcgcgttgcccacgtctccatggccgatccattctgtcctgagatgaggaagatattctacgagacggccaaggagcttggcttccctgtccacgagaagggcacctacgtctgcatcgaaggcccgcgcttctccacaagggccgagagcttcatgttccgccagttcgcccacatcatcggaatgacccttgtcccggaggtaaacctcgcccgcgagcttggaatgtgctacgtcaacatagcgaccgtcaccgactacgacgtctgggctgacaagccagtagatgcccaggaggtcctcaaggtcatggccgagaacaactacaaggttcaggagctcctcaagaagggcatcccgaagatcccagaggagaggcactgcggctgtgccgatgtgctgaagacgatgtttgtgtgatttttatggtttgaattttcattatttaacactctgacaaatatacgagttgcatgtggggctggtgctgccgcaatatgtactgctattggagcttgcaaggggtgaagagatgtggccactcgtactggaagtcgcactctccgttatatatttttctttttgattaaccttccatgggcatttgctctcgcatactatcaaactcttggatggctagcaattgtgcttgcggcgctctttgcttctatcgctactgaagttgagagggtgtttatattaaaacaaagagagatcaaaattagagactttgttttagactttatagcgttcgttggagcactctacatggtctctctgcttttgaaagttggttaaactgagaagtgagaagtaatgaagttgaagtgggcaataattttgtcgttggtagttatcccagtagtcctctccggatgcatcaacagcgcacactccgtagaggaaatagcctcttaccggatactcaagctctacggcctatgggaaaagctccccgagagcgttaggcattacatagagctcggcctggagggaaaagcggaggagactctaaaggaagacctcccaaacgtccacaacttcctcatagcgagcaacgtcctggtctgtgaagcggcccagagaaaagctaaggagctcggtctcgaagcccacatcctcacaaccacgcttgaaggggaagccagagaagttgcattggcttttggttcagtcattgaggaaatctaccacaggaacaggccctttaagaggccctgtgttctgatagccggtggggaaaccacggtgactatagaaggaaaagcgggcctcggcgggccgaaccaggagttcgctttgagcatagcgagaaagatttcgggccttaggggagttgctgttctggcgatggacaccgacggaacggacggcccaacggatgccgccggaggacttgtggacagccatactgcggaagtcctcagaaacgagggaatagaccttgaggagtacctgagaagccacaacgcctacgaggctttgaaaaaggctaaggccctggtagtgactggtcctacgagaactaacgttaactcgatagtaattggggtgattctttagcaggtttttcttgtttttggttgactcaattgatgggggcttgttcattctgattttgcattattttttggctaagtttagcgttacttttagcgagtccccttcatgttcaactttgatccaaaacctgttgaatttcttcaagtcgctcttgacgttctcatcgttcgtaagagccataagcatgtattccacgaattgctcatgaaagacggggttgtagtagtccgcgtagtgggggaagtttaatctccaaatccttccgtctgagtatcctgggggtaaataacttttttcttcgaggttggcaatgtttttgtcggaaattaaatggggatatctgtcctcaaggatcttccttagatctgtggatattctgatcaagtctgtagggctgaacacgtgatccttttgcttaaagtcttcagctgataggattccgatttctctaactatcgcgccgtttttatccctgcttatctcatagacagtagcgtttgaaatgaatagcctctcgccaagggtttcttgcctgtagactgccaagtcggtgtagtacgtccccagatccataacgggtggatgctgatcaagaataaagtactccccgttgatctttatcgccacggccgcgtgtcctatcggcgagttctcgaactcaatgctgaatacgtaaacaggagagtagttcatttcgagcaggagcgcagctgttaagatggcataatccctgcagacgcccgctcccctccggatggtctcgtatggggtttggatttcaacgcccggcgctgcatcgactctgcttattcttccgttggaagtccagataaccggcgctgggagggaggctttggaatagttgtactctatgttctcgtggagccactccagagtattccaggcgctttcctggagactctctcctttcaactggctggcgagattggaaatttttgagagttcttcttcagtctagactatgttctagggagccactccagagtattccaggcgctttcctggagactctctcctttcaactggctggcgagattggaaatttttgagagttcttcttcagtcagagcacatttaagggcgtcttggaaaatatatcgccagtagctattcgaacaaggtgattcaggggttattagtggtgcttgttctgatgtatgcgttggagtgctcgtagagtagatcggtgcagtattggttttgtcaattgtttgagtacctgagtattctggtgtgtgggtgctggctccttgggaggaaccgctcgaattcccgaggaagggtaccccaaggttatcgaaacttcccctggaatacagatagccggccaggagtagtatcaggagagcgattccgatgagagcgtatttgccgtgttttctcccctcatgtttcctctccggcgtgtatgccattgagtagacgctctctgggatgatgacccacctctttccgtccctgatctcaaatctgattgaaggtgaacgaggaagtacttttttgattctggaagtttctatgcggatctctcggggagtcacataaatgctgccccgatctttaaatctgtttttgacgtttattatcacgtcctcgtagcgggtgcgctctttgggtttccatgttccagaactcgatggaactctaacaggctccctctggggaatgaacctcttttcggttctagtagacgttctcctggcaccgtacaggctctcccttttgttctcgtacccttcccagaatttctttgtgtatgggtagcacgggtggccatcttcacggtgccattcctcttctagaaacgctctcaactcaggatgctttctccagagttcttgatatctgtcgaacgtcaacacgagggccggtttaacgtgcttttcacagaaccactcgccacagtgagggcactgataaagcttcttttcgctcctatcgccgtcgtaagctgcacatcttggacagacgccgaaatctttggcttttttcccagaagagcgattaatctccttcttctcacgaacatctgctgtttccacccttccttgatgatttctatcggcgggttctctcacggcttttgtgggctgcccttttctgattttttcgacctcaaacacgaaatctgagaacacctcaacttttccggtgaggtactcctcgatcttctgtcccaggagtatcagatcccttccgacttgtttagcggttttctcgtctacactgtggaggcggcggtatacgtagtttatcgtctctatgtactcgtggaggatgtcctctgaaacgtcgccaagattttttctagagtacctgtaccacagctcatctctccagtccgccaaaaacttggccattaacttggggattgggtactccgtgacgtctagtgttccatccttgtagtgtacaatggggccactgtgcaatgtggcgattattgagtttagaatcggatttatgaccctagttataaggtagtgtagatctttagatggcagatcgtccaccataactctcaccgggagttaattgtgaatttggtttgtttcatataaatcttttggaggttcaaagtattgtacaacgaaggttgaatgacctttatgatggatgcgggaaatcattgttttcgttttcctgtttctttgaatccaacatctttttaacttccatcagaaacagaacttttcaaagggttaaaaggtggtccccatgagcattctcatcaagaacggccacgtcatatacggcgagaacctcgacgttgtgagggcggacgtcctcatcgagagcaacaggattgtaagcgtcgagagaaacataaacgaggccgcagataccgtcatagatgccacagggagggtagtttctcctggcttcataaacctgcacacccactcgccgatgggcctcctcagggggctcgccgacgacctaccgctgatggagtggctccagaaccacatctggccgagagaagctaagctcactcccgaatacgtcaaagtcggtgcctatctgggcgctctggagatgatccggagcggaactacgaccttcctggacatgtacttccacatggacaaggtggcagaggccgtcctcgatgctggcttaaggggatacctttcctacggcatgatagacctcggcgatccagacaggactgagaaggagctgaaggaggccctccgcgagatggaggcgatagagaaactaaactccgagagagtccacttcgtcttcgggcctcacgcgccttacacctgttcgatagccctcctgaaggaggtcagaaaactcgccagcgagcacaacaagctcataaccatccacgtgagcgagacgatggcggaaataggccagataaccgagcgctacggaaaaagccccgtcgtcctcctcgacgacatcggcttccttggaaacgacgtcataatagcccacggcgtctggctggacagcagggacattcaaatattggcgaggcacggcgttacagttgcccacaaccccggaagcaacatgaagctcgcgagcggtgtcatgcccctcgaaaagctcctaaacgctggcgtcaacatcggccttggcacagatggaagtgcgagcaacaacaacctcgacatgcttgaggagatgaagctcgcggccctgctccacaaggttcacaacctcgatcccaccatagcggacgccaggacggtcttcaggatggccacgcaaaacggggcaaaggcactgagactcaacgctggaataatcaaagagggctatctggctgatatcgccataatcaacttcaacaggccgcacctcaggcccatcaacgacgtgataagccatctcgtttattcggccaacggaaacgacgtggagacaacgatagttgacggaaaaatcctgatgcttgacggggaagttctgaccctcgacgaggagaaggttatcagcgaggccgagaaagtctcagaaaagctcgcctgagttagcgttaaatcctcttctttcctattttctctggtggtggtcgtggtagagtttgagatcgttaaaggagacataacccgctttccggccgaggcgatagtcaacgcggccaataggtacctcgagcacggcggcggtgttgcctacgccattgcgaaagcagcggctggcgatccgagggaatacatcaggataagcaaggaagccatgcgcgagcagcttggaaaggaccacatcgagcatggggaagttgttgtaacgccggcgatgaggctggagaaacacggcatccgctacgtcatccacacagttggcccttactgcggcggaatctgggacgaggacaagaaggagaagctgaggaaggccatcctcggggcgctgaggaaggccgaggagcttggagtcaaaacgatagccttcccggcggtaagcgctggcatctacggctgtccgcttgaggaagtcgtgaagacattcaaggaggtcattgatgagttcgagagagaagcagggagcgttgagagagtctatcttgtgctgtactcggaaaaggattacgagagggctctgagagctgtttgagggcgggtccggaaacgtacgtgggtgaaatgcctctggtagtcctgtggtgtttgaggtgaacgctgtgaaagaatacgtcaggcttctcttccttctcaggctcttcctgagggtatttgccttcggctatcctctttttctcacggttatgtacaacttctggattttcacgagaatcccttcatgggcgctagtggtttacatcgtcgtaatggatatggttgagcttactgtccttattttctcggagaagccatggataggggctctaacaaaggtttatctggcacttgcgatcgtctttgagttcccatctgcggtggtggagctcccggtaagtggccggatttatgggtatgcaccattttttggatgggcgctcctgtggtatttgccggtgttcttgatatgtgtcttttcgtctggtttgggtaacgatactatgaaggcaaaaccgaatgatttttaagaggttttggttgattgtacggggggagaactatgtgcaggattcttaagcaaatcatgtttttgattttgcctctgttgctgttctcctcattagtctcaggcgggagatgcatcccctacgaggcctactcaataacatccgtgctgcctggaggtggctatgcgtttatcgttatccatcattccgagtggatatgcggggaaatcgccggggagaaatcccttcgccgcaacatgcccgatggggagtacgacctctactacctcttcaacggaagcgacctgctctttttggggaaaagcaaccctttactcggtgagccatcgatagtgacgaaaatcaacgggactttctatatcctgcagcgaagggagaaaactgttccccacgggaacgttacgctgatcgtcaacggtgaagcccgtaacttcacgattgccgccaggaggattgagacgagggtttaccgatttgatggatgcgccgagatggtctggaactgcacgagagtggagcttcagaacggcacggtggagtcggactgtacggaaagtccagtactggactacttcttcgctgggaatactggaagtctggagggcatcaggggaaaaattaatgacggcttcgtaacttttgagaacttgaactgcagaatccccgtttccgagtttgaaaggtatttctcagacttttttgaagacaaagagctctccagggctttatctgctctatatgcactgccctttgataaagggattctaatttattatcctgacgagattagagttgagaaaagcggtttcctttcggagcttccgctcgtgttcttttacgatgggaagaatctgaggcgcctcgatttgagtacgggtattcaagaacttccggagtgtagagaaaccctcggccagccggatcaagaaaaggtatgtggcatcggcgccctgcttctcctggcgctcgtgcccttagcatcagggaagaaaagcgcggcgatgctaaaacagcaacatcacggcgattaaaaggcccacaagaatcacggggccgacgaggagcatcgccaccgcgctctcctctgtcatcttgtctggcccgtgtttttgaacgagccacaggccgacaaagaagcccgaagcgatgcccatcagccacccgagtaggctgcctccgtgtttgtagctctcaaagcggagcttggagaagagcaacatcaccccatagagcagggaaactccaaggatggccctgggcgtgcttttgacccttgcaacgtaggcataggaaagcgcccagccgagcatgaacaggaagccgaagatggcctcaacgatcatgggtgctcccgaggttattacgcctgtgagtataaaactcttgcgatgcccttttattatttccctccgaaattgtactggtggtgcgcatgagaatcgaagacgtttatatctgggacataaacgctaagtggcttgggatttcaccggttcagctcatggagaacgccggcgctggtgtcgcgagaacaattgaggagcgcttcgggaaggggcttaaggtagcggtcttttctggaactggaaacaacgggggcgacggcttcgtcgcgacgagacacctcagcttcgagaacgatgttaccctcttcctcgttggcgacgaggcgaagattagaagcgaggaggcaaagcacaactgggagattctcaaaaagctcgacttcgttaagattagaattctaaaggactcgtcttacatcaagtctctcgatctctctgagttcgatgtcatagtggatgcacttttgggagcaggaacgaaaggagaaccaagggagccgatacggagcgccatcgagaagataaacgagtactccggaaaagccaagatagtgagcgttgaccttccgagcggttatccgagcgatatccgcgttaagtgtgattttgccgtcactttccagtgggacaaggaagaatacgggggttttgagcgcgttatagtgaaaataggctacccgaaggagctttaccacctagtgggcccgggcgatgccaagttcgcgctgaggaagaagggcgagcacaaggggcagaacgggaagctacttgtcataggaggaagcgaggactacttcggagcgccttatctcgcggcgaaagcggcttcatacctcgttgatctggtctaccttgcgatgcccgagtattcggcgaggagaataaacgaccccaacgtaatcctgcgtccctttgagaggagaaacttcaggaaggaagacgttgaggacgttctggcaatagctgatggggttgatgcagtcgttatcgggccgggaattggacagagggccgagacaaaggagttcgtcgttgagtttctccgctggtgcgagaagcctgtagttatagacgccgacgccctgaaggccgtcgccgaggatttggacgttctcaagggcaagaacttcgttctgacaccccacgccggtgagttcaggatactgtttggtgagaagcctgaaggaagccttgaagagaaggcgaagctcgtggtggagaaagcaaagggcgttgggggaacggtcctgctcaagggagcctatgacatcataagcgacggaaaaggctggaagtacaacaagaccggcaacaggggcatgacgaccggcgggactggagacgttttggctggtctagtaggagcactccttgcgcttggaaactctccgctgagagccgcctctgctggggccttcctaaacggcctcgctggcgatatggtgaaggaagagatgggagagaacttcacggctttggacgttgccgaaaaggtgccgcaggcagtaaagtgggtgctggagttttgaggtggtctcatgaagcgagtcgttggcctctttctctttttagttctcacctcggttgtggtttttacatttctcctggactcatccgagaagtatccagccaggttccacgcggagtttcaaagaccggtagagtttaacggagccgggttgctcaagggctatccaaacgccgtcacccacgttgccgtttttcgctttaaagagtcaccagcgggaaagaacgtttgggaacttgaggaagtctttgacgttgcccccgactacgtcatcgccgagatacaggacggctcaacgctcttctgcagggcggagagccagaatgacacttttgttttcaggagagagaactgctacaaaactcttgatgatgccttaacgagacgcataaccttgaccggctgtctcaatgccatttacataggttacagcctagagaggaatgcaatactaatcttcaagttcaggacagcgaatgagaccacctgcgtgaacgagaccgtcgaagtgagggggaggctctacgatgtgctggtaagaattgaaacaggaaatgggacggttgagattccggtcgagagagttacaggaaattatctaacggatgaggtctatgaaatccaaaaggaatgaaaaggggggctatcatccaaccccgcagtagctccagacggtgtagccgtactgcccgctggcggggtcgtaagctggagcttcgagatagacccagccgctcgactcgacgtacttgtctacccagcctccgaggttgccggtgtactcgtggatgcacgcgcccgcgaacttcggcacgtacacccaccttccgaccttgctagagccgaggttgatgtacgttatcagtcccggcctcttggagtcgccgttcctcacgaagatcagctcgtcgctgtcgtagtagactatgctcgtgcttccacccgcgaggtggtcgtgtatccagattaggttgttaagcttgtccttgttgagccactcctcgtagtcgcggtagaatatgacgggctggccctcgtaggtgaggatgaaagcataagcagggtacttgttccagattatatcggtgtcgtggtttgctacaaaggttacggccttgaacgggtcgcgagagacgacggttcccccgttctggagggcatcaaccaaggccgggatgttggtgttgtcaaaggcctcgtccattttgtagtagagcgggaagtcgaagaccttggcgccgctcgagtatgcccaattgaggagtgcatcaacgttcgtgtcccagtactcaccgacggcccagccgccccaccagttgagccagtccttgacgacccacgctccgtagccctttacgtagtcgaaacgccaggcatcaacgccgatgctcctgaggtaggcggcgtagctctcgtcgctcgcccagagccagtgctggtcccactccttctcgtgggctatgtctgggaaacctccaaatgtgccctcgtcacagcacttgacctcgttggggtggaagtcgaggtagttggcggtatatttgcccgaggccaccttcgagaagtccgtccaggtgtagtccccaacgaacgggttccactcgaggtctccgcccgcgcggtggtttatgacgatatcagctatgacctttatgccgtaggcatgggcggtgtttatcatgttgataagctcctgctttgagccaaagcgagtttcaactgttcccttctggttgtactcgccgaggtcgaagaagtcgtatgggtcgtagcccattgaataagctcctcccatgcccttgctggctggcggaatccagatggcggagattccagcctcgtaccactccggtatcttgcttctgattgtatcccaccagattcctcccgctggaacgtcccagtagaaggcctgcattataacgccgccttcttcgagttcggaatactttgcggcgctagctggctgtgcaacggcagccatgctcactacgaaaaacatggttatgagcagggcgacaaacttcttcatggaaccacctctgtgttcagcggtgtctctatgtatcactgctggtgaaatatttaagttttgccatttaagaacattggagaacattactatgcacaatgctcaatattggttttgtgtctttatgttacgttggagttgccaacaacttgaaagtccaaaatagaaattaacaagaatggatgcatcagaacgagatgaggtctttaactcttttcgcgtgatcgcagagctcgcagctctggaagaagacgagcatgttgaggaggtggaacagctctatctccgtcagttcaatgttggcatctgaaattctctttatgactggctgagagcggagttcgattgtattgaggacttcctttataagggccttgagggcttccctgtcctttatctggaagccactcttttcgagtatcataactattctttcagcctcgacctgcaggtaggactgtctgaactcctcgatgctctcatcgggttctgcctttatcaggaacatcctagccgttcttgcgtatattctctcgtttccctccgtgtctatctcctccacgagaccttcagcttctagcgcctttatgtgtctgtaaacagttgttctgtcctttcccaggaggtcgctcagctcattgacgctcattggcctctctctgagcagtttgagtatctggaatctagttgggtcggagagcacctttacggttttggggtttgtgattatcaaaacttccctcatagcaggccctcagtactcctccagtttgtcctgcggagtttcctcttcttcgattatcctctttccggccgccaccatatctatgctgtggacgacgccgccgaactcctcgattgttctgacgatctcctcgtagtcaaggttgtcgcccattatggttatctttacgttctcagtctccttgtctatctcgacaagggttatgttgacgccgtcaaccccctcaagctcgctcagaccaagcgcgaggtcagtgaccatcggctggtgcggcttgagcacgtccagtacgagaagccttatccccctcgccatccattattcctcctttttgagtatctcgcccagctttctgaggaggttcaaaacctcttcgtctctacccatcttggccatggcaagccactctattgcgtggattatgtcctcgtttgagaagtcctttagtttttcctcgtttacttcaatctcctttgaaatctccgtcttgtagtcatgctccttcttgaggagttcgtccatgacgttgagaagctcctcatcgttgaactcgtagccaagggctttgaatatctcgagcttcgtcttgagccttgagcgggcaaaatagcggagctcctcgtcgccgaggtagaggtttatatagaatgcgtcagctgttcttccgtagtacttctccacgaggtttcccttcatctccgtccgcttgacctctaccagtccagcctccttgagcttctcaatgtggtgatagattgtctgaggcgtctttccgaggatttcgctcagctgagagatcgtcatctccctgtttctcaagagttggagtatcttcctccttgtgtcttcgagcatcagctttatgacctctgggtcagtgatcacctttacctttgccatttcgaccacccaatttaaacgttctaacgtctcttttaacgttcgggcatttaactcttttgttctcttccgaaacttcatcaccgtcaggtttatatatgtaaagcctgaccaccaatggatataaaatccatatccaggaacccttaaaaactcatgcccgaaaaagcttcggaggtgatttcagtggagaccccgaacctggacttcctgttttatcccaagagcgtcgcagtcataggtgcctcaaacgtgcccggaaaggttggaaacgccataatgcgctcgataaccctccgcttcgatggaaaggtttaccccgtcaacgttaagggcggggagattgaagtaaacggcaagaagtttaaggtctacaggagcgttaaggagattcccgatgaggttgatgtcgccgtcatagcagtccccgcaaagttcgtgcccgatgtcattgacgagtgcggagagaagggcgttaaggcagcagttgtcatctcagctggcttcaaagaggctggaagggccgatcttgaggaggagctcgttagaagggccaggaagtggggtataagggtagtcggcccgaactgtctgggagttaccaaccttgagaacggcttcgactgcaacttcaacccgcccgaaaggcaggccaggccgcccttcggaaaggtcgccttcatgagccagagcggtgccttcggcgcggcgatcctcgactgggccgcgagccacaagattggtatgagcaagttcatcagcctcggcaacatggcagatctggacgagagcgacttcatggcctacctcggcgacgatccaaagaccggcgtcataaccggctacatcgagggcgtcaaggacggcaggaagttcttcaacaccgccaaagaggtcaccctcaagaagcccgtcgttgtcctcaagagcggaagaactgaagctggagcaaaggctgccgcttcccatactggctctctggcaggctcttacaagatataccaggcggctttcgagcagactggagttttagaggccaagagcatgagacagctcttcaactacgccaaggccttggcaatgcagagcccggcaaagggcgaccgcgtggccatcgtcaccaacggcggcggcgctggagtcatgatgagcgacggcctgcttgagaggggcatgaagctcgccgagcttagcgaagaaaccaacgagcgctttaagaaggacatcgaggaaggaaagcttccggcgcatatgagctacaagaacccgatagacgtcataggagatgctccatcgagccgctatgagatcgccatgcgctacgccctcgaagatccgaacgttgacgtcctcgtcgtcatagccctcttccagagcccggcactcgatgaaggaatcgttgatgccatggagaggatgaaggtctatggcaagccgatagtcttcgttgctccgggtggagactacccgcacaagatggcaaggaacatcgagctgaagggcattccagtctacgagacggttgaggacggcgttgacgccgtctatgctctcgtaaaatacggagagtggctgagggagaacgggaggctttgagcttttagcccaagcgctctaaaatctttttgactcttttaatccttgtggctatttctattgcttgttttctgagttctcctggtacagattcctcaacttcatttcttgctatgcgttcatgtcggaatattgctatatcaagtagcctgagtgcgttttctagagggatcctgtacgtgaacttccactgtttaacctcttcaactcctatatcggttttgtctatttcaacatatccattgtatcttgggatgaacgcggtggagtacttcttgctggcaacaagcctagccgtgtattcctcaccgtccaatagcctttcaaggtattccaagtggcggtctgggtcttttcccttccacgatctcatttggacaagattttcgatgtgttcaaccgcatagtcgggcagaagatcaacgatcctcgtaccggttttgaagccattgggttcgtatattgcgtttccatacaatccaactaagtacaatgaactccccctgggccttgggtcccgaggatcaatgaattttgagacaaaaagcacaatacccgaagtaaagttggctggattaccctcaatgtggccaaagtagttgtttttgctgaatccctcgtagaagttccacagctcatgtccgaaccctgtattcctaatgtactcaaagtcgtaaagaagcctgttcttgaacatctcctggtcaaatcctctccagttgttgaatgaccacccaatttttgcaaccattatgtcagtatccaacatctataccaccaaaaatagtataaagcatggaatatataaaagtttttgtaattcttgtttatagttcaatccatgtgaagtccctcgcgacctctccttttattccgctctccctcactctcttctcaagaacctcgtgtgtatagttgctgtggcttatgtgggcgaagacggcgtaggaagcgcccgttatctctgccagctttatggcatcttccaccccgaggtgagttccggggattgactccctgtgggtcatctctgctataagaaggtcagcgccttctaggagcttaagcgttttcttatcctttagtatctccggccctgtgtccccggttacggctattctttttcctttgatttcaaagaggaagccgccggcgttctcaatcgagcggtgggtcgttctgaagtgatggactttcatcccgtcaatctcataccatttcccgaattcgagctcgtgatagccccagtccctgttttctggagcggctcccccgaggaagatggccgataggtgcttggccatatcaatcgcctgcctgtgggagtagacgtctatcctcttgaagacctgaagctccggaaagcccgctatgtggtcgaagtgggcgtgggttatgaataccttctcaactttcctgttcagccgctcaaggtggtagtgcagatccgggctggggtcaactaggattccaccctcaatatagagtgaaaagcgcgttctcctcaacgctgggtttatcctcgcccttgaacagttctcgcaggtgcagaggggcttgggagttccactgtatgagccggagccgaggatgatgaccttcatggcatcacctctccccaattctaacggggaaatttaagcttgagcatttagcttgtctttttcgaatcatgtaaaggcttaaatagttcacactaaattatgataatcatgagtgaacaatttgttaatagggctgaagagctgaaagccctcaggggagcctatgagagtaaccggaaagagctgataatcgtttacggtaggagaagggttggaaagactgcactcgttaagaagtcggtggaagatattccccacatctacttcttcgcggaggagaccctcgagagcgaaaacctcaggacgttcaagagcttagtcgcaaaggcccttgggaaccctctggttgagaaggccgagctctcgtgggaggagcttttcgaactcctcgacggttctggagttgtcgtgataatagatgagttcccgaaccttttgaaggccaacagggggctggtttcaaagttccagaagatatgggactcggccaaggggctcaagctcgtcctgacgggctctgccatcagcgtgatggagagccacgtcctcggctacaaaagccccctctacgggaggaggacgctgtccataatgcttaagcccctgagctttctccacctgagggatttcttcccagagaaaagctgggaggagctcgtgaggatatacgggataaccgacgggattccggcctacctcagggaagtccagttccggctgaatgctggggaaagccttgaggaagtcttccagcccaacaagccgctcttcgacgaggcggagttcctcctcaggagcgagctgagagaacccgccaggtacttcgcgatactcaaggccatagccttcggaaagacgaagttcggggagatagtgagcttcaccgggcttccaggctcaaccgtctcaaagtacctcagcaacctgcagactctccacatagtagaggagaggcatcctgtaggcgagccagagcggaagaggaacgcgcgctactacctgagcgacctctacttcaacttctggttccgcttcatctaccccaaccgctcacagctcctcgactttggctacatcgagaactttgaagaggaatacaaccgctatctcggcttcgtctttgaaaaggtcagcgcggacttcctcagggagatgaacaaagcggggaggcttccatttaggttcaccaagattggaaagtggtggcgtaagggtgaggaaattgacctagtggccttgaacgagcgtgagaagaaggctctgttcgttgaggtcaagtggaaggatttgagcgagagggaagtgagggggattttgaaggacttggagaggaaggtggaacttgtaagtctcgagggttgggaaaagcactatggactgattgctaaaagcgtcgagggaaaagaggggcttagagaagattgttggctggtctgggacctgggggacttcgaaacatcaacctgactacctcgtcccgctttcttcaaaggctatcaggagcgttccgattgtcacaagaaggaagccgagcagatggtaaacccccaccttctccccaaggaaggctatggccacggctatcgtgactgccggggccggagtgagtattgcggtagccttcgagaggtttatcctcgagattgaagcgtaccagagggcctgggttgcggctattatgactccttcggcaacggcaaggcccgtgagctggattccgctcatgagggcgaacggaagcaggaggagaaagccgaaggtgttcctgagtgtcgctattgtcagcggtgagtagtctgtgaacttggcaacggcatgccccagctgccagaagagcggcgttatgaggagcaggaggtcacctttcctcggtgttatcccctttccctgcgtgaggacgaggaagaccccgccaaagagaaggagggaagcggctaatgctctcccgctcactctctccctgaggaggagccagccgatcgcgagggaatagaacacctcaagtcgtgtgattatggcggagttcacggcggtgctcatgctggttccgagggagtagagggagtaagctatggcggtggcgaagaggccagtcaggaacgtcctcttaagctcggcgggtttttccaggatttccttgaacctgccagttgtcaaaagaaccgtccacaggataagggccgcgaagaagacggacagggctatgaagctgattggattggagggattggcctttatgacggccggctcaaggcccagagccaggaggacgaggaaagcgaggagagtgccttcggtttcggttttcatgatgacggatagaagcaacaggtaaaaaagctttttcagtaagtcataagtcctggatcagcttgtcagcttcctctttctcaagcttcacgattccaaaggtcttctcggatattttcttgggaatgagcttaacgctgacctcggtaccgtcgggtaagttgagctttttcttgagcttgaggacgccgttttcataaatagcctcaactacctccatactcccaccaattggatgtgttcccttttcctaaaaacactttcgcacccaaaaactttaaaatctctccgccatttcttcttccatgctcggtggtcgtttttggctttggtgaggaatccctcttctgcaccgccttagtctggagtttggtttccactggaagcggaggtgtttgaatggacgactttaaggttaccccatgggacgttgagggtgtcgtggactacaacaagctgatagagcagttcggaaccagcccgctgacggacgagctgatagagaagaccgcagagctcacgaagagcgagctgcctctgttcttcaggaggaggttcttcttctcccacagggactacgacaaggttttagcggattatgagagtggaaggggcttcttcctctacactgggaggggtccgagcggcccgatgcacatcggccacataatcccgttcttcgctaccaagtggctccaggagaacttcgacgtcaacctctacatccagataaccgacgacgagaagttcctcttcaaggagaagctgagctttgaggacaccaagaggtgggcttacgagaacattctggatatcatagcggtaggctttgacccggacaagacattcatcttccagaacagtgagtttaccaagatttacgagatggccctcccgatagcgaagaagataaacttctcgatggcgagggctgtttttggcttcaacgagcagagcaagattggaatgatattctatccagcaatacaggccgctccaaccttcttcgagaagaagcgctgtctcattccggcggcaatagatcaagatccttattggaggctccagagggacttcgccgaaagccttggctactacaagactgctgcaatacactcaaagttcgtgccaggtttgaccagcttggagggcaagatgagcgcgagcaagcccgaaactgccgtttacctcacggacgaccccgaggaggccggaaagaagatatggaagttcgccctcaccggcggccaaccaacgctcaaggagcagcgcgagaagggcgggaacccggagaagtgcgtcgtcttcaagtggtttgagatcttctttgaacccgacgacgagaagctcatggagcgctaccgcgcctgtaaagctggcgagctgacctgcggccagtgcaagcgcgagctgatcgagcgcgtccagaagttcctcaaggagcaccagaagaagaggaaggaggcagaaaagaaggtcgagaagttcaagtacaccggcgagcttgctcaggagcagtgggacaaggcgattcctgaaccgctgagaacttaaaaattgaagttacccaaattattcctcttcggtgtttttcatattcccaaaacatttttattttctgacttgtaaaagttagaacaaggattccttcggagggatctgagttgtggaagaagccagtcgtcgttctcttagttgcggttttagttgtcgtcagtgggtgtttgaataggagcgatcaaacagctagttcagtacaaccatcagcgtcttccccagaatcagttacgagtaatacggaagcgagtttaacttcaacctcgaatgaggatcataaatcggcccctcttgagtttgagtacccagaaacacctcaaatcagggagatgaatcgtactgtagcatacgatttctgggagaaccatttcttaaaggtcccttactatgttcatggaaacataagcgttgagtatcgggatggaactttcaggggcaggtacgagttcacgatattcaatttcacgtctaagactctctacattgccaggtactttgctccagatgggttcgttgacatcaataacataacaattgaaggggtaccactgaacctctctaagctcgacaggtacaggtatgagattaacaatggctcaggcattgagttctacgcggtaaacgtttcaacgaaccttacaaaactgcaaggcgttgcaacatacgaggttaggtacaagaagaactggaagctgttctactctcttaaggagaacataacgattggtactgacttctcgttctgggacttggcgtcgaatcccgatagttaccgtatcgttgtgactccaaagcttcccgaggagactctgtacgtcatagcttgctatggaactgtcgaaaatggtagcactgttgtctactcccctgattcccggatacagcatcgtagcatctccaccgtcatagtccaagtacccgaccttgacagggttgatttcacactcaggggcatgaacttcactgtttatctgccctcgtgggcgatatcaagtgaaggcattgaggctcttaagtcgaacttgagcctggctctctccgtgtacggcaacctgacgggcatagagagaccgactgacagattctttatcattttccacccgttattctggaggttttcccaggaaacctatggctacaccgctaggggcattaactactttggcacgctcgttctcccatacgacaatgacctcctcacaacattgaataactatcagcttaacctcttccacgaattaggccatgagtggtttggacattatgctggctttggcctctttgtggaaaccccgacccagtttctcatgcttgaagcttattcccgctcagtgcctcaggattatttctacgactactatatggatgaagttgagaagcaagttgtgtcaattaagaatttcacttacatcgaaaccataaccggaaaatacgacaatttcagcgacccacgtctttactcacgagaggcatggtacatccgctacttcaaaggcccctacatactgcgctccctgcgcttcttggtgggtgatcaaaagtttaggcaaatcttccacacagttcttgaagaatgtcacggttcctactgtgactacagagactttattagaatctctgagaaagtctatggagacgacctaagctggttcttcaacgagtggttcaacacaacagaggtgccggactacaacgtcaccgttctcaaaattacgcaagcaggggatacttacaacctcacattcacgataaacgatgccaacgacttcaaaatgccggttccggtcaggatctacatggaaaacggcgagtacgttgacgaaagagtctgggtgaatggcaccgccacagtaagccttgaactaccggacaaaccagttaagatcgtcattgaccccgaagaagtcattgtgaacgtgaacagagaattccgtcttagtgacatctggattaaagtggattaaccttctccttctttttcatttctggcgtgctatttttattagcttgttgggaattgtcactggtgttgcaaaatgatccgcctcccctttcgagatacctactacgaactcaggccgagcaagatagtggccttggccaaaaactacgcggagcacgcaaaggaaatggagagcgacgtcccggagaagccgatattcttcctcaagccaccgagcgcccttattggcccaggagacccgataatccttcccagaatgagcaagagggttgaccacgaggtcgagctggcggtgataatcgggaagcgcgcaaagcgcgttccggctgaaaaagcaatagactacgtcatgggctacactataatgctcgacataaccgcccgcgacctccaggcagaggcgaggaagaagggtcttccgtggacgatagcgaagggcttcgacaccttcgcccccgttgggccgagggtcgttgacaggcgcgagttaaaggttgaagacctcgaaatcggcctcaaggtgaacggcgagcttaggcagctcggaaggacgagccagatggtctttaaagttccggagctgatagagtacataagctcggtgatgacgctcgagcccggcgatataatagcgacaggaacgcctgccggtgtcggcccgctcaggcacggcgatcacatcgaggcgtggatagaagggatagggaaggtagagttcgacgttttagctgaggactcgattctgtgctgactattcctttttgtttacgatcttcgctgaaatccacctcattccttccccttcgttcttgacgacgaggatgtagtctccatcgggtatcttaatgccatcgaactcgacgctccgaacgtgctcccaggccttgtagtagctgaagggctcgccgttcttcatctttttgaagttctccttggtgaggatgtaaacgctgacatctccgtctgccttgatgtagccgttgagaaccgagttcccggcaaggttgtaggtgttgtagttcgtgaagcccctcttccactcgtagttgaagctcccatagtggttgaccgcgtagttaatgccgaggcctactgcaaggatgaggatcagggttaaaatcacagtgctggccttccccataagccaccccccagaaaatatgtgaaatacaacttaaaaaagtttacggaaaattaccaaattgcgtggaagatcttccctttgcaaactggctttacaccctcttcccttccttcacgtaaacgacccgcgccccgatttccttcgcgtggtcgcttatcctctccaggtggcgcattatgagggcctcaaccggagaagaggccgagcttttcaggttctccagcgactggatgtagaggtcgtctattctgttatctatctcaaggagctttcctgccgagacttcatcgaggttctcaaaggcttctattgcagttttaacggcctcaacagttagctcaaagccctccctgatgagttcgctctcctctgcccctactatcttcgcagttctctctatctccatggcgtagcgcgaaatcctgtagaggtcgtaggagacatctatcgagctctggatgaagcgcaggtcgctggcaaccggcgagtacctcacgaggagctcggtcgctatatcgagaacctcgttcctgagaaggtggagcttgctcgatatctcctctgttgagttgaactctcctttgaggcttttcctggcgttctccagggagttgagggcatcgtttcccatctcgtttatcagctttttgagctgttcctcaccaatatcaaggagctttctcatggtatcacctcatacgatatatagtatgggcgtcttttcaagccctttggagcctaagagataataaaccgccgagcgaagcaggttcttcgtatggttgaagaaaccctccaggtgtactaaggttcccataacgtagggggtctccgtcctaacataagagtcccagagttcgttaaactcgaactcaatgaaagggagctcttccactggaatttccctttttgaaactagagcctcaactcctctggtgacccatgggagaaagatttccattgcctccattacgagatccctctgctcctctgatccatggagattaagcagaacctcaatgcacgagaggtgtctcatcattctgtataagtcgtagtttgcattgaaggctgaccttacgaagcgaagttcgcttgccaagggctgatacctaagaaggatctctatcaaaacgttattcaactcttcgctcgtattggttacttcccaaaggagatcttccattcttccgtactcgtttctttggacctcggtagtcagggttctcatgccatttatgactccatccccctctgccctcaaaagatttcgggccttctctagggctttccttttcatccaagcgcccccgtaacgtacttctcggttaattcatgctccgggttctcgaagaccttccttgctggcccaacctctatcagctcaccgaggtagaggaaggcaacgtaatcagcaactctcgccgcctgggctggagaatgggtaacgagaactatcgtgtagtcctccttaagctccaggaggagctcctctatcttggcagttccgacagggtctatgttggctgtgggctcgtccatcagaaggacttccggcttcattgcgagagccctcgctataacgagcctctgcctctgtcctccagagaggttcccaggataatcgttcagcctgtccttaacctcgtcccatagggcagccttcttcagggcccattcaaccctttcgtcgagctcttcccttgacttgacgagtccgttcagcttgaggcctatggcaacgttgtcatatatggtcaggtgggggaaggggttcgggtactggaacaccatccccaccttcttcctgacctctatcgggtcaacgtcctccgaatagatgttctctccgaagagccttacctcaccctcaactctggcatcttcgttcagctctatcagcctgttgaaagtcctcagcatcgtgctcttcccacagccgctcggccccatgagtgcaaagacacccttgtttgggattttgaggtcaacatcctttatcacgtggttctggccgtagtaaacgttgaggttaacagtctctatcgcgaagttcacagtctcacctccttcagactaaggcgtatcgggatgaatatcccgaggaagatgaggagaagaaccagtgaggctccccacgctgttgcatggtcggctggattcgggctctggactagctggtagatgaggagcggaacggcaccgacgggtttggttattgaagttgggtagctctcgtaaagtcctcctgccgtgaagaggagcggcgcagtttctccggtaactttggccattcctatgaggacgccggtcaaaatgccgcgcttcgccatcggcgcgaggattctgaagacgaccttcgcccttgtgagcccgagggaaaagcccgcctccctgtacgttgatggtatctctctgagggcctcgtgggtgtaaacggctacatagggagtgagaattatcgccagcgctaaggccccagccagggcggagtaagtccccatcggaacggccacgacctgcatcacgaagaccccgaccagtatcgtcgggaactctatcattatctggagcagtgttttggtccactgaccgagggtgctcttagggtactcgtaggcgtaaactccgacgaggaaagcaactggaaggccgaggagagcagagaggaacgtgaggatgaaggttccagcgatggccggacctattcctccctcgctgagcgtccccgtgaggaacttcgtgcccctctcagctatcactggaaagcccttgatcaggacagtagctatgatgtggaacagcggtatgaatatcaggattgtgagtgcgccgactcctatgaaaaaggccttctcctttgtttttcggtcaaatgctgacatttctctcccacctcttgagcatcttgaggccgactacattcacggccagaccgattacgaagaggattagccctgccgcgaaaagcgtcgaggtcatgtattcgtatatgaaggcgttgccgaactggttggctatgagggacgagactgtgtatcccggtgcgaagagggccgttgtcaggttgaacgtgttccctataacgagggaaacggcgaccgtctcgcctacggcccttccgaaggcgaggatcgttcccgaaactatcgccggctttatgtagccgaggaggagtttggttgcctcgtatcttgttgccccgagggagtagatggcctccctgtacgtgaagggcaccatgttgtaggcttctcttattatagcggaggcgaagggagtgaccattatcgccaggagaactccagccgagaggtagctgtagccaccaaccggcggataggaaaagagtggaatgaaggagaggtgatcgtaaaggggcttcataatccaatccctcaggaacggaacgaggaaaaacgctccccatataccgtagattatcgttggcaggcccgccattacatctgagaggattataaaggcgttcttcagcctcttcggtgcgtagtcaacgacgaagaccgagtaggccaccgatagtggcagggctataagtatggctatgagagaggtgtagacgcttccccatatagcggccgctatcccatagacctcttcgcttggctcttcagccgctctccagacgttcttcaggtagaggtcgaggccgtacctgtggagcgctgggagcgcgttggtgaagtaaacgaagagcatccccgcgaacagcaggaagacgatgataacggcaggatacgtggcgatcttaaaagactcaactttcctcaagcctcactacccccttctgccttttcaatcttggagaagttttcgtccggcatgttgcggaagaaactcacgtttgagatgattgaacccttcccactgtacctccttatctccaggactgccctttcggcttttgtaagctcaacaactctacttgcgtaagaaaaaccgatcataccctcgccaagcggcctgtgctcgtctctggagccgttgttgtcgtggatgtgaaggtgggtcgcataagggaagagcacgttaaactcgtccatcttgagtccggaattcatggaagtcaggaaagcgtgcccgatgtcaaagcacagttcaaagccctcgctaacgaagggaaggagctcgtgaggaagtgccccgattcgtccctcaaagagattttcaacaacgagctttactccgtggtcttcagctattggtttaagcttccttaagtgcctcagggtgttcacgtaggccttcgtgtaactcttcccgatgtcgcctccgtgaacgacaatgacctctgtgccgagatggttggcaatccttattaccttccccattctctttaccggttctttcccatagactccgaggtctatcgggaggttctttccatcggcggtaggcgcgtgaagtgtaaactccaccccaatgcccttaaggtttttgagcgcttcccagtttatctcttcgttcttgatgatgccagaatcgtcaaatccaagctcaacaaagtccacttgaagttcgtctaaggaaaagccctttccgctgatttccttgacgatgtaggagttgacaccgagcttcatcgttctcacccaaaaggaagagaaaagaaatcagccctctatcatgtcaactgcctggaggcctatcttggcgacctctggtggaagaccgacgtagccgggggcaaggttctctggcttctgtccctctgttaagacccacctaaggaactccttgatggcctggacctcttccttgctgtagtgctttccacccttgttctgccatacgaggaggtgggtgaaggcaactatcgggtaggagttctctcccggggcgttgaggagctggttgaggtcctccttgtagccctcggttgggcttggtatgaaagctttaacaccggcgacggcggcttttatcgcatcgtcagtgggcttaacgaagtttccggctttgtttttgagtgccacaaccttgaggttctcctctatggcgaaggagagctcggtgtaggctatgctgtacttggtgttcttaagggcctggacgactccagggttgccctttccaccaatgccccttccaaccttgtcaacgggccagtcaacggtctttcccgctccaaccttatctgcccactccttgttgacgagactcaggtaggtggtgaagattgcagtagttccgcttgaatcactcctgtggacgactattatcttttcgtgcgggaggttcgcgctggggttgaaggccttgatggcatcgtcgtcccagtactctatctcacccatgaatatcttggcgagggtctccccgtcgagcttcagctcgtcaacgcctggaacgttgaaggcaacgacaaccgcaccaacgatttcggggaactggaggggctggtcgccagttgcgaggaacttcttccaggttgactccttaacgggtggatctgtcctgcctatgtgggtgaggcccttgaggaacgcctcctgcccgtgtccgcttcctccaccttcgtactcgatcttgacgttggggtggctcttcatgtatatctcaatccacttctgtatctggtactgggggaaggttgcacctgtggtgcggatggttattaccttggtctgggaagtgccctggcttgaagcccgtgccgtgctggacgggcttgtgctagggctcttttcactagatatgcagccgcttgccaccagggaaagccccagcagcaggacgataaacaccgagatggctttcttcattggtttcaccgatggttagaagagggttaagaaatataaagattgccgcaataaaatatactttggtggtaaatctatatagacacttattctctattccacaacatatgtgtgcaccatcagtccgccgtgtccaataagtcgatgatgtttgatcttgaacccgttatctaatatcgccctttctatcgccttcttctccgtcgttatgaagaccccacgcttttcgaggactttggagagctcgctgaagaaggccatataaagccttggtatcatgctcttccgccctatcttcaggccgtagggaaggttgctcacggcgaaatcaacgctctcgacatactgggagagctttgtggcgtcgccctggatgaactcaatcttatcaagaacgccggccgataaagcgttcatttcggcgccccttatgtgttttctgtacttctcaaggcctattattcttcctttataacccctgagggcaagctcgatcaatatcgtgccgctcccgcagaagggatctatgaacgacccgccgttcggttcagccagctctatgagcgcgttggctatgctagccttgaggtgcgcgggatggtcgtagacgcgccagggtctcttgtggagcgagctgtcgcctgtggtgtcaatcccgaggaagaacacctcaccaacaagctccgccctgaatatcaccgtcgggtggtcgaggttcacctttggacttccaaagcgcgagagcctctcgaagatggcctcgccaaccgttttcgctatttcaacgctcgttatcctgtgctcgcccttcctgaagggtctgaccgcaaagctctcacttaccttcacgaagcgctcaaccggaagggaggagacgaactcctctatacgcttgagggcagtttctggttcgtcttcaccaattccctcgaacctttcgctcgctatctccagaataaccctatggaggagccttgagttctcgttgaggtaggttgctatgctcagctccctcttcctgcccttctcatcggtgtagtaagcctcgcctgcttcgaggagaagtcttccctcaacgcctaagggcttctcttccactcgaaacggaactccaagcctctccatcagcgaggcgacttctcttccagctatgtcctcgattccctgggaggttgtgagtaagagtctcatactcgcgcgttctctgtctttcttttaagcttttgtttgacctagtcctttgtgcgccttggtataacttagttgttaaatgtcataatgatattcttcaatgtatgtcgtgacattttatccgtcgctaataagttcatttgtcgaattgttaattttaatcaacgtaattattataaactaacaacgccataaattcataacgtggtgaagatgatatgagcgaggatgaattcctgagttcattgtatcttgacaaggtattagatgagtacattctgttctcgccaaaaactcttcatctcatccgactagatgccgagagttataaattgcttgagtacattagaaaacttggagttgaagaaggtgttaatgagttcttgaaaagacaccctgacatcagctttcaggatgtgaacctgttactgagaaaaggggatgtttaatgaagcttccagtcagaaccctcgcgcgactggctgtaatttacctttgcgtacttctcataataatcttgatagcgggagcaacgtccaataagctgacatgggattacgctcacgatgctctcatgggaattcggatgaataatcccgccctgtaccaagagctggagcaaaacgcgaccagggaggggctcaccgttgaggagtactattatcatatactcactaaagcggcggaagtgagggacgataacatttttgtgatgggtatggacctcctcagaaagagcattgattattatcgccggggtgataccaagtacgattttaaccattcaataaaagtaaccctcatggtcatgggactctcagtgctgttgacggtttttctgagtgttctccttggattcaagctggcaaacagtcgttttcttggtgttgccgagggtcttgcgcgtttcttcactggccttccatcatggtggattggagcagtgttgatagcagtctttgccgtcaagcttgacgcgtttccaatctcaggccttaagagtatccccccgaagggtggctttgagggcgtgctcgacgttctctggcaccttgcccttcccgttgccacgctagtttttgtgtacatttgggagtttgtggttgttgttgctcataacgtaagggacgagcttgggaagccctacgtcctaactgcgagggccaaaggtatctctgagtgggtgatatactggaggcacgttcttaagaacgtctccatagtccttagctcgttcaccgttcagaagttcgttgagatgttcacggattacatcgtcgtggacgtcctattcaacctcgggggccttgggataatctttaaggcgagttttgtcaggacagttgttccggcattcggcgtggttgttaggtttgactaccgcctcttcttcgttgtcacccttgcgatattcattatatccttcgtcttttcgtttctcctggagctcgttaagggaatgttggatccaagggtgagctgaaatggtgcgaaaagctggggtggcgatactggtcgtgttcgctctcttcgtgatagcctcaaatttgagtgttgatcagagagatatcgacaactgggagaacgctaattactggagggacaacccgcgtaaggcctacccctcctggttctcgatcttcggtggaaggactcctacggtctttctgaaaccgtcgccggttgaggagaacggttcttggatctacaggttttcctacaagcacacttacaaggacaagcctaacgacgtgaggttttacggccttcctaaaggggagaaaatagaaataagcgttttgaggccagatggcgttcgggtgctcctttacaggggtccagccatctccagtaacatgagcctcaacatcaacatgcgcgccggcgttgtctcatctctttcaaaggctttcaaccttagcgtgagcgagtacgttcttgtctcctctgccaagctcctgttttcccgtgatagcagcttggaacctttaaaaggtgagtacatctttgaggttcgcctgtccgaaaaagccaatccatcagtcgaaattcttggaacctgctacggccttcttggtacagactcttacggcagggacatgtgggttggattcgtcaagggcatgaacaacactctctatctcgcgttctttacgacggcaataatagtggttctgggagttcttgtgggtatggtctcaggctacgttggtggaatattgggggaacttgcgacgttcatcttagaggttctgatggcattacccatgctcccaatcctcgtagtccttgtctggcttttctccacccagggttacggtcgaaaggttgagatagatcccctgcttttcatgtttttagtcgcccttctgacctttggaaagcttgctaagactatcagactcatcgtgataaaggagaaggcgaacgagtacgttaaagccgcagtgagcatgggggcgggtgcgctttgggttttaaggaaacacatacttccccctgttggagagttctccctgaggtactcaacaatgcttctagccaaagtcgtggcgttgatttcagtctttggattctttggcctgattccaggtacgaactggggctctttcatgattgaagcgatgagccagggggccctctacggtggatactggtggtgggtggtggctccgggccttgcaatgggctttttgagtgctggtctcgcccttgttttctttgatgtcggttagctacttagttactgccccacattttagtggtgatcacggttaaattttactatctaatagaactagaataacgtactagcgcctatacaaaacaggcagcataaaaggttaaatggagatattcttcaaggtagtcatgtttgcgatgtgatggaggctgtaattgggtgatgaggatgatcgaggttcgcagcctcaccaaacactacgagttcggcaacgtcacggccctgaaggggatcaacctgacctttgaggatgggaggttttacatcatagcgggtgcctccgggagcggaaagacgactctcctcaacatcctgagcgggatagacagaccaacctctggagaagtcatcgttgatggtgtcaacatccactctctcaaagagaaagagctcaggaagttccgcctcgacaacttcgggatagtcttccagttcttctacctagttccctacttaacgggccttgaaaacgttctcctgccgatgaaatactccaaaaaggttgagaaccccaaagagagggcgaaaaagctcctaaagctggtgaacgctgagcacctctccgacaaactgccagagcacatgagcggcggcgagatgcagaggatagcaatagcgagggccctggcaaacagaccgaagtatctcttcgccgacgaaccgacggccaacctcgactgggagaacaaagtgagggtgtggaaacttttgaagagggtgaaccgtgaggaaggaataaccgtcatagcctcgacccacgagcgggagttctttgagttcgcggacgtcatcataaccctcaaggacggtgaggtcaatgccatcaaagacggcggtcgcaaagcttaagcgcgagaagaaaaaggcggtagtggttttcataatcttcgtcttcctcagcttgggcatcaacttcaccctcggtggaatcggggccttcatggggacggtggatgaattctcgcacatcggcaacgtcgagttcgtcgtccagggggttggcgtcgagaacctcacgcgcttcggtgaggtcgtgaactacctctacttcgacgagggaaaggtgaagctgaacgggaagtattacaccgccttaatcggctacgggcgctttgacgttcccaatgctaaaagcacgcccgatggtgcttacgtcctggccttccctgaagccaggcggggcgataaaatcgaggtcaacgggaaaacctacacggttctcggctcctactactacctgatgggtaagccgatagttctgacgatggagaagggcgagaacctctacgcgtttatgagatgcaacgacacgaaggccctggccgaatttctgatgagccacgcgagggttcgctacttcatggtctatgagaatggccatacaccctacatggacgagctggggaacgtgaagaacttcgtcatgagcttcttctacctcctccttgggactgcactcctcatcgaggttctcgtgacggtggcacacctaaggggcagcacgagggaggttggaaccctcaaggccctcggccttccggattccttcatcttcacgctcttcgccggcgattacttaatcgtcgctctccttggctatgccatcggaattgttcccggaatcctcttaggaagccgttcaagcctcttcggcgtctccatcccgctgaggccgaactatgcctatcccttcaagttcgacgttctaataaccatggcgatagtcctgatggtttccctgccctacctctacgtctcgcggattagaaccatagaagccctgcgctttgtccccaagagatcatccctcctcaagttcctggctgtcttcttcgtcgcctttctggcgtcgagctctgcctactttgccctggcaggcgtggagaagctcgccagcctcaacgcgcccttcaacgtctgggtcatcggcactccagagaagatggcgaagctccccggcgagaaggtcggctatctgagcggtcagagcgtcaacggaatcacgacggaaatctacttcttcaaccggacgagcatgtttgaaaaaaccctcatcgaggggagatggttcaaagggcaggacgaggcggtcatcgaggttggcctcgcgaggaagctccacctcaacgtcggcgacaccgtcagggtgaacctcctcggcgttgagagaacctaccgcgtggtcgggatcagcgatgctttcttctacaactaccgcgccctcttcctcccgatggagggctttgtcgagccgaggatgagctttatgaaggcagaaaacccagaagaggtcaaggaagaactcgaatcccaggggttcaaggtttacacgctcgatgatctaagaagaaatatcgagcagaacctcatacttttcaaaacacccgtttacgccctcatgctcgttacattcctcctcagcgtctttgccatcttcacgctgatctaccttgagatcgagggcaacgagaaggtttatgccacgctcaaggctgtgggaattccggattcgcacgtggagcgagagttcctgacaaaagttgtcacctctgcggtgattggctcgctcctcgccattccaccggcggtgaggctgggctactacataggtaacataatcctaccagtgaacgtctcactcggcgatgccctccagattctcccgctcctgcctgttctatatgctgcctacgccctgttcacggtcctggttgtcaggagagtaatggggaagctggatgttgttaaggccttgagggcctaatcgagaacagccacaacccctttccatttctttccaaagcattcgcttgctagggcatgctttccggtcagctcttcgaggaacttaacggcagagtcgcacttcttaaatccggtcgctattccaaccgttattccttctatctcccttactccagccctcttctggccgtcgagcttctccctcagctcatctccgtacttccagagtatcctcctcgggtcgagcaggaggtctttctcgaccccattaagcacgtcctcgaagtcccagatgaagtctctcttcccctcttcctcgctcccgaagagtgtgaaccttccggtctgccactcgcggaggaaccacctcgccgtctcttcgatgtcgacctcgccacccgcctttatgaggcccctcctctcgccgatcttcctgagaatgtcctcctcgctttcaaactccgtgattccgaacttctcggttatggcctcttttctcgtttccaggattcttccgatgagctttacggctggtttaactggctcctctatcttatcagcaggaaagcctccccttatcacgagctcgtcgaagtcgtctatcgggatgacccctgggctgtctaggagccatatcttcttgctcagccttatcagctgttttcccttggtatagcctgggatcggcgcagtcccaactgccctcttgcccttgagggtgttgattatcgtgctcttgccgacgttggggtagcctatgagcgccaccttaactttctccttctcgtccaggagcggctttgccagctttttgatctccttcctgagtattccagttcccttcctctccctcgcgcttatgaagacgactggaacctcgctcttcctcttgtactcctcggcccactccttcgggaccaaatcggccttgttcatgacgatgagcagaggtttcccctcttcaaggatcagcctctcaagcttcctgttcctcgtcccaatggggtcgcgggcgtcaactacctcaacgactatgtcggcctcatcaactacctctctcacgactctccatgcctttctcgccttcatctcgcaccaccgttatctcaaagatcacggttcctccgtctgtgtacggcggacccgggtcgaggcactgcacgtaagccttctctcccctgccgagacctatctcattgggcttaataccctttcggagggcgactatgtaaggtagcagggaggcaaaggcgtgagtgcatactgcgtcggtctcttcaaggtttatccttggcccttctatgactattctgtccccgagcttgaaaacgggacattttcctcggatttccacgaccttaatttctagcttttccatctccaccaccgaaatgtaaataaggacttagaactaaaagctattctggggggttatgatcattgcatcaattccttgtgggtggtgctgaatatggccgaggatattgaagcaaaaattcgtcgtctgagggaactgggaagaatgacaaccgagagtgaggctccgtcaccggctgctcctcctaaaacgtctccatccaaaaaaccgtctcgcagacctaggtccctgagcagcattcgtcagaaggagcgcaggaagaggattctaatcggtgcttcaatactgataataattatcctgctgatatccgttggcgtttattcctatatccaaagctctagagagtcgaaacttgaaaacacccgtgctgaaaaaattagcgagctaaaccgctatttcgcctcgtacaatttctcgaactcgaactgcagtcaaaaggcattccagtataagggccttgcactttctaaaataacctccgctaacagtcttgaggagctgaacagtatagatgtgagaacttattttgatcaggccgttactgcctatgagcagtgtatccaggagataaaacagcgtgagtatgagaagcagcttaaccagacaaagcagcagaagatccaagagatagaggttgctttccagcccttgctctctctcggcctccccgataccctcaggacaaaggcagtagccactatgaagagccttgaggagcaggtgcagagcgccacgacgattgaacaggtcgagtcaataaaacccgacagttacctgctctccctctggaagaagtattatcttctcgaacttgataagatacccgggcaggatgtcattcttgagcggaacggtgagaagtcccttatttcaaaggatcaggcaaaggccctaatctctatggtagacaactaccaggatttgattggatacaaagtatcccccgttgaatgggtcgagatttcgctcgtccttcagaggaaagatatgaatggggcattgttcgatcctggtgacagagttaagctctacttaaagggcgagaacactaccgttgttgatggataccttgaacttttactgcttccagtcggcgagggtggatcaatatccgtgagtgagtcccagagtcagtccagctcgacgtcgacttcatcctcaacttcctacagcgagagccactccacatccgaatccccgggaggggcctcaatctctgacagcagcagtgctagcgattcctattccaacagccagtctggcagtcagagttcctcagctagttactcctacagcgtcaacctcgcggaaatcctaaaggcaatagcggccggaaagatacaggccagtgatgaggtgaaggcccagctccagaactacggttgggagcttttgaaccttgaaaagaacacaggcctccagtcgatgcccgaaaccaccaagataatggttatcgtgaaggtcccctcgatctttgtgccggatatcctcgagaacgagaacgctattaccattgcaaaggtaatcacctgaggtggtctgaaatgagacgccctttggtttttttaataattttcagcatgataatggcttcttcgtattactctcctgtgggagccgcgagtagcgttagtagcgttttaaccctcaacttaaacgtgaccgttgttaacacagccccgtttccgaagttcttagttttgaacccctcttacgttgttacagtctaccgcttgaataacaacgagaccaccccagagctggtttcaaacccaaagcttcagctgaacggcaaccctggaatatggttaatgccctacgaaacggttgtcataaaccttgtgagcgttcatactcagacgtattctctcccgcaggtatcctgtggtggagagggagatgggagcaacctggcatgcggttcagtggtgcctccctttgtgaactctccttactctctctctgcgagagcaatcttcccctgtccttgatgggtacattaaaatactggattatgagggcagaatcaagttagttatgactcccgccgataactcaccgacgttcttcgccgtgactgttcccgtcttgttctccgatggggagattagcaacctgaatcccaatccgacgatgacgtacgatgagtacaaggacatgctctacgagtacagcggcttccagagaaaggtgggtgaatcaactcaagttgtgaacgcgtccacgaatttgttccagcttactcccaagctcttaactggagttcaagttagtgttccaacggttgaggccaagacccgtgagaactatgaacttccaatctggattgtttactcgacgggtggcagtgttgaaataagctatgatgtaaaatggagtgagggagggggataagtcttgttccaggatgagaaaaagaagaaagaatccctctcatggatagacgagatactttctggtgaggaggatccactagctggtattctgaaaaaagatgacaaaaaagaacagcccagcaaaaataaggtctccgaagagcttccagttccctcttctggagtgggcagtttggaggatatactttcagggtccacttcagaaaaacgggaatcccggcctacctctgagactggagccgaccttctgagtcagctacttgggggagaggagaaacctcagaagtcaatgaaagaaaaaactgcagagagagaaaaaagagagccgctaccccagagcaagccagaaccagcatccacaataccgtccgccactggggccactggagctgatttcctctcggagctccttggtggttcctctggatcggccacatcacagccagttcaaacttcaccgagcaagcctgtgtccaacgccaggtcgattttctcagagtcattgagggaagagtcttcttacgctggcagggctcaagtccttgacgcctacggcaacgtgagaatactgaaggttaagggagagccggttcccatatacgagattagacttcctaaactttcaagggaggaggaacagctcttcaggcgcattaaggacagggccataactgagatccagatagaccccactgcgattcctgatcctgaggagcgcaggaaggtctttatgaacgcggttaagaggatgataaaagaggaggctccccattattcggagggcagaatcgaggttctcgccgatatgatagtccagcagatgataggctatggaaagcttgaccccctcgtcagggacgacaacctcgaggagataatggtcatcggaactaaccgccctgtctatgtctggcacaggcgcttcaatatgtgtaagaccaacgtcatctttgacagtgacagggatatactcaacataatcgagcgcatagcgagggaagtcgggaggagaatagaccagcagagtccccttttggatgcccgtctcccggatggaagccgtgtgaacgcgactataccaccaataagcctggatgggccaacgataacaatccgtaagttcaagagggatccgctgacgattatagacttgatcaaatacggcacaatgagctccgaagttgcggctttcctatgggttctcgttgacgggcttggggttaagccggccaacgtcctcgtagccggtggtacaggttcgggaaaaacaacaaccctcaactcccttggaatgttcattccccccagcgagcgcgtcatcagcatagaggatacagcggagcttcaactccctgtggagcactgggtcaggctggagacgaggccgcccaaccttgagggcaagggagaagtcaccatggacgacctcgttaggaacaccctccgtatgcgtcccgacagaatcatcgtgggtgaggtccgtggtccagaggccagaacgatgttcacggcaatgaacacgggacataatggtgccctctacgatttctctgtcatacagctctccaatggaaagtttgttctgataggtgatgttgttgaggaactattcaacaagtactctgacaggataaagacgtacaaggatctggagtacatagagctcgatcctgaagaccagtttgaggtggttagcgtagggccgaatctgaaggcaggaaaacacaccgtcacggcagtatggcgcagaaaagtacggaatggagagaagctgataaggataaggacgagaacgggcaacgaggttatcctgacgaaaacacatccgttctttgtcttcagcgacggcgacgtggttagaaaggaagcggagaaggtcaggccaggtgatagagttgccgtgatgatgagaccccccaaagctccccagagcccggctgtagttcccgtcgaagtatatgctggaataagtgattactaccttgttccaaacggaaacggaatgaagaaggtccccaacaggggtgtgccgccagaagacgccgagtatctactatccaggaattcaaagccagttaaactcgttcgtgaagttggaaccagccttgcttacgttgcaggagtaatactgggcgacggatatctctcatcggacggatacaacctttcggtaaccttcgatgatcccgactacatgaattctttcacctcggcgatgtcggagttcctgccagagtcggcaccgcggataaaggacaatggaacgagtacggtggtaacctacggctccaggatattcaatgagatgctgtcgaggatattcgggatcccgagaggcaagaagtcatcaatatgggatgtccctgatgtcgtcctcacgaacgatgacctcatgaggtacttcatagcgggtctgttcgatgcagatggatccgttgatgagaccggacccgcggtgattttgacaacaaagagcgaaagcgccgccagaaaaatctggtacgccctccagaggcttggaataataagcaccgtctccagggtaaggaacagaggctttaaggaaggccacatattcagggttatcatcagcagtgtcgaggacctgaagaagttcgacgcgctgataccactttcccattcaaggaaacgggaaaagctaaaggccatcctcaaggaaaagcggccgtatcgcggaagatacacttaccgggttcctatctctccggagatgataaagcctctgcgcactcggttgaacctgacggtagccgagctttcaaagctggcctcgaaatatgcaggagaaaccatcacagagagcctgataaggcacgttgagaagggcagaacgtccgagataaggcgctcagcgcttaagggaatagccctcgcccttcagagaatcgcccaggacattggggacgaggatgcctgggtgatggccaagaggctcgaattgatagctgatggtgacgtgtactgggacagggtcgttgaagtagaggaagtggatcccgaggagattggcatagagtatctatacgacctgaccgtggatgaggatcacaactacgttgccaacggaatacttctgtcgaactgcatgggcacaatccacgccaacagcgcccgtgaaaccatagttaggcttgaaagcccaccgatgagcgttccaaggataatgattcccgctctcgacataatcctcatgcaggtccgtttccacagcagaaagaagggaacgataaggcgtgttactgaaatagcggaggtctctggcctggagggggagagcatacagctcaacaccctttacaagtacgaccctgctaaggatgagctcgttccaacaggtgttccgagcagaacggtcaacattctagcccagcataccggaatgagcgttagggagatagagcttgagattgaaaagcgcaggctgatactggaatggatggtcgagaagggcatcagggacatagacaaagttggctactacataaggcagttctacattgacgaggaatggctcctcaacaagatttctgcggagagtgacgtggaaaccagtaagcagattcaggctttaatgtgaggtgatgtccatggggttcatagagttccttgaaaaactcggtggcaaaactctcgaagttgcagaaaagcctatgaggcgccttcctgagggaaaaaatgtccaagaaagattaaaggctcttaaagagcttcaaaaggaacttgaacgggaaaaagagcagaaagatgagcgggagacgtttatagaggcggtcatcgagcagcgcaaagaggaggttcagcaaccctttgcccagcgtcttgctagtgccatcctcaaatactttagaggacctgttgagagactgacgacttcgctctccgggctggacgttgatttatatcgggcaaacatcacgatgtcaaaagaggcctacgtggcatacatgcttggagttgccatgataactgcgttcttcggttttgtttttgcttaccttatgtacctcccaattgacatttcactcctggcgggcttcctgggattcctaggcgggtttttctacatgagatactatcccaagatggtatggaagaggcgtgttagagaagttgagaaggcgcttccctatgctttgagacatatagcttcgctcctgagtgcaggtgttggcattgccgaggccatgctctcggtggcaaaggcagactacggacccctttcggaggagtttgaactagtcataagggacatgagaacaggttcttcctttgaagaggcaatgctgaagttcgaggagaaaatggcctcagagaacgtgagcagggtggtcaagcagattctccgtgccgttaagttcggtggtaaccttgctgagatcctctataagcttgcagaggactttgcattcgagtaccgtatgaagctcgtcgagtacgttcagaaagtcaacggtatttccttcgtctacatgttcatgacgatagtcatgcctacaatgttagttgtcggtattctagcgggttcgttaatggcgagaaagctgatattcagcgtcccgatgattgcaattatgctcgtggtcgtgttcccgatgatgtccttcatgataataaacatgataaagagtgccgagccgaggtgaagcggatgccaaagctgaatatttcagggcctctcgttcagctcatcgagagactccttccaggcaggtaccttaagcgttatgaactgttcctgtactccgctaacattaacttcctggctgctgagtacttggttatatccctcctaatgggacttatccttggactagccttttcaatattcagttttctgtatggagctattgcgttcatagccggtttcatcgggatggccttcctttatccctactggcgcctcaccaaaagaattgacgagatagaaaaaagtctcccagatgccttcttctacctcgctagctccctgagggcgggtatttcgttttccgaagctctggaggagctgacaaccgcaaagttcggggcacttaccgaggagttcaagagaacggttgctgagataaacaaaggtcgcccaacggcagacgcgttgagggcatttgccctcagaaacaaaagatcacaggtgctataccgctcaatgatgatagtcattgaggcccttgagaggggtgctcctatgagtgatgttctcatgtacgttgccaacgatgtcagggagatactgaggatacagcaggagagaaaggcatcgacgggcatgcaaataatgttttttaccataactagcggttttgttggcccccttatcctcggtatagttactcaagtaatgtcatcgatgagcagtccggagcttggaatcatgtttcccatggactcgatgacaacgattttgatggccttcgttgtagtccaggcagtcctttcaggtctgggaatggggataataagagaagggaagtacagcgcaggcttgaagtattcccttatgctaactgtaatggggcttgttgtgttcaaagtggccacgatactcaagctaagcttctgagtcctcttcggccttttttacttctatgacttctacctcaaagactagggtcttacctgctagagggtggttgaagtcaagggatacctcgctctctccaacggagactatcttggctatgccagaatcggtcatgacgtagagaccttcctggggttcaaggccggcctttgtgaattcttcccttggaacggagattacgagctctgggttcggcattccgtaagccttttcggggggaacggtcacggtcttcttctctccagcttccatgccaattatggcttcatcgaggccagggatgatctcaccgacgcctatcctgacccacattgggccgtactccctctcctcgacgagaatgccattctctctggctatctcctcgtagcttgtgtcaaaaacttctccatcctcgaaccttccaacgtagtggaagagaacataatcaccagcttcaactttcatttccttcaactccaaaagtgtcttcagcgggagtaggctctcccctttataaatctttgggcattcggaaacatacttgggaagtgagaaaaagcaaaggactcactcttcgggcaggatgtagtagaggtagtgcggtctgttcgttatctcgtcaatgaagactaccgtacccgtcttcggaggctttaggtagtggacttcgcctttcctggtagtcactgccgcgaatgcatctccagtcctaaccctgtttcccacgttggctattaaggtcttcgtgaacccctcaacgggcagtatcatcagctcgtcgcccttcttgagataaatccttgttctcccgtccgggaggacgagtatgacatcggcagtcatcttttgctccgtcctgtcaacgtagaggtaaaagcggtcgtaaacttccctcttcaagaactttgctctcgatgggtcaatgaaatctggaagctcctcgttttctttcagccagacctcaacgttccccataatgacgacgcactcggccagcgtcttcccgtcctttacgcattcttcctgagtggtctcaacgtaaagcttcggcagcttctccatgttctcacctgaggtttactatgccgtaaaacttttatatgtttattggtacctgcatccgtgagcattcatgaacgctaaagtaaggttcatttccctgctaattgttttgatacttctgacctctttgctgatgaatgctagtgaaatcaacgcccctgccaaaagaaactcgagggcgggcgattttatgggcttaattttggctgtcctctttgtggatgctctcttactgctcatactcatcgcttattatcgttatgacagattctcagcaaagaggcggaaggacgtcgtctctgaggtagatatattctcggtgattctttacagtatttttcttccgctactgatcctgttctttggcaaggcggtggctgcgcgctcctctaaaggcttggtgttaaacagtaccgtttcttctccaacggcatctcctgacatgatactgcacagagttgtgtcctcacagaggagtatttcgctctattccctttttctgattccaatctttgttggggtgggatacttggcctaccattatgtggtggcgtggtctgaggaagtccgtcgtaagaagaagctggagaccgcgatcagctttgatagaaaacttgatgatcttgggctcgaccagtttgatggccctcgggatgcgataatccagatctacaaaaacgccgtgctgtggcttgaggcacttgggatcccatatcaggaaagctggacgcattgggagcatgctgagcatgttaattatatgagaaacttctattctgagctcgtcagactctttgagaaggcaaagtacgcccccgccaagatcggctgggaagacgctgagagggcgtttgaaatatacctccggttgagggggaaggcctatgagcttgcgggagttaactaaacagtacaaactaaggattgctgtgggcctggtgtttattgcaggtgccgttttgccaggtccgtattatgttaggtggctttctgccgttgccctctcggttttcgtggcttggatgttgataggctacgatattgtgatcgtaggatacgatgtggtagtcgataggggatcaggttccgcttttcgggttaacagaaggcccgactttgagagggctctccagctggtaaaacggacaaaaaaaggcggtggaagggaggttgcggaggagtacatccttgagatactccactcaatcaccggccgttccttctacgagctgaggacagatcctccaaaggcccttcaggcattctactcatctaaaaacccttatgaagggcttaaagaggcgttaaaaatcctggaggctgaactaaatgaagattgaggaagtacatgagaaggctgacctcgtgctttccgaggtcggaaaggtcatcgttggaaaggagaacgtcctgaaaatgatactggccacaatccttgccgatggccacgttctcatagaggacttgcccggtctggcgaagaccctgatggcgaagagctttgccggtgcccttggcctcgacttcaagcgcgttcagttcactcctgatctgttgcccagcgacatcattggtgtgagcgtcttcaaccagaagaccctcgagttcgagttcagaaagggcccggtgttcactaacatactcctcgccgacgaggttaacaggtctccgccgaagacccagtctgccctccttgaggcgatgcaggagaggcaggttaccgttgaggggaagacatacccactcccaaggcccttcgttgtaattgccactcagaacccgatagagcaggagggcacctatccgctcccagaggcccagctcgacaggtttctggtgaggctccacgttggctacccaacgaaggaggaggagcttgagatcctgcggaggaggataggtagaaagagcgacgaggtcagcgtttctccggttgtcacggctgaggaagtccttgagatgcagcgcgccgttgaggacgtttacgtcagcgacccagtcctagagtacatcgtcgatatcgtcgaggccacgagaagggacaagaaggacgttgaggtaggggcctctccgaggggaagccttgcactcctcaagctcgcgagggcatacgcggccatagaggggagggactacgtaatccccgacgacgttaaggccgtggccattccagccctgagccacaggctcatcctcaagagggagttgtggtacacgaaggttagccaagagaaggttatggcaaagatccttgagagggtcccggttccaaaattcgattgagggcgggaagaacatgctccagtggagtataggcgggttacctcagctaccatatcagccaggctcgctaccccctggagagaggaaaattgagccacccaaaggtgtcgctccaactgctaaatttgcccttttggttatctcggcgtgggttatcccaatcgtcgctttcttccttttgaggtgggaacttgtctatctcgttcttccatacgttactctcatctccgttgaataccttcttttcaagccccgcggagaagttaaaatctggcgcgttgtgccccacgacaggtttcttgaagaggaggaagttgaggtcgagctccacgtcgttcctgagttcgatgtcgagaatctcgttgtccgagacttggtgccagaggaacttgaagttgtttcgggtaatccggagaaggttttctgtctcagtgctggtgaggagggcattttaagataccgcgttaggatgaagaggggagttcacaactttgagggggttagggtctcctacagggacccccttggcttcttctcgggggatgttttagtcgagcttttcacggaagtcgttggagtccctcggatttacgatattccaacgccgtactccacgaggggtaccaagataactattggaccgctcccatccccacgccttggggagggccttgagtttcacgcggtaagggagtacaggccaggtgatccacttaagataataaactggaaagcaacggccagaactggtgaaataatggccaacgagtttgagagcgagagaaaagtggacgtggtgtttgtagtcgatgcctcccgcgcaaatgcccctgttttggactatcaagttagggctgctgcttctcttatgctcaacgctctcaacgatggcacaagctttggactgctccttgcggaggagacgcccctctgggtcagagtggattatggaaagaggcatttcttcaaatgtgttgactttctgagtactgccaaaccgggctcaaatgatatcatactgtaccaggtcgagcaccttgccagagtggcctttccactgagggcccagatagtctatttctctcccctactgaccagtgagagccgagagacgcttagaatcctaggagagatgggctacaaagttgttgtcataagcccgaacccgaacagtctttacactccatctaccgaggaggaagaagttgcaatgaggctcgttgaactcaggagaaaggccctactgcgcgaactctccacctatggactgataatagactgggacgtcaagaaacccctgaaggccgcgatagcggaggtgattaaagtatgatacgacggctctaccttgcggcgctttttaccatcataacatacataacttatcttggatttgatagcagagttaccctcgtgctgtctctagctcttagtctctccatattagtctggtggatgggctatgcttacctagccctgctggggattgccctggtttatcataggttgggaggtttctacgggttgacccttctctcacttggaataatctttgttgagtccctccaccttacacgcgttggtgcttccatgaggcattacggaacccttaccgcagcggtaatcatggcactaccgctctattctgttgcttactatctttcggcttatctgccaagtctggtaaacacaatggtagcggctctctttgtcgtttctctttacctgctcttttatcttgttgttagacggtgatactccagtccccccattttttcaggacttcccttgccctttctagacccagccttacgcactcctcgagtggacgacccctcgaatagcctgcgaggaaaccgcctgcaaaggcgtccccgccgccagttgggtcgacgatttcttcgggctttatcggaagggcagggaactccctgaacgagccgtcgtatacgagaacacccttctcgccacgggttatcacgaccagcttggctccccaaccgtggagaatcctggcggcatctttgacgtcctccgcccccgtgatcatgagagcctccctctcgttcgggaagactatttcgacccgagagactatctcccgcaggaggtctcttctcttgatgtactcctccttgtacgttgggttgaaatcaacggtcactctctttcccttcagtcggttgaggagcttcagctgctcttccggtggaatcggggaaatgtgaaagactttggcatcaaggtattcctctgggattgggatttcgcccatcttctgggcaactcccatctcaactggggcatccacgcttccgtcctcgtggtaaatcatttggatgtgaatcgtctttccaggcagtatttgaactccactaatgtccagcacggaggaaagcgcttggagccactccttcggaaagtctgtccctatcttcgtcactagtccgacttttgccccggcgagcgccgccgaagtggccacccccgcggcggcccctccgggcattgtcacacgccttccatccgggaatataagagtgtcaatcgaaacgtgaccgataaccacgagatccagcatgataccaccggaggcccttaggggttctccttaataccgtttccgttctggtcagccgtaatttgtgtaaagttcgtaaacatcgctacggccgaccttccccactcccgtcttcatcgtggggctttcggggggaacggaaactccccacatcttcagggcacgaagggagatattccaagagccaataacgtccctatcggcctcaaaaccacacttaggacacttcaagaccctgtgcccattcgggcttaactttctcccacataccggacacagggacgaagtgtaagcaggattaacaaaaacaacctttatccccttcagcttggccttgtattcgattatgttttgaagcttcctaaaactccaacgatgaagcctaccgttcacctcagccgaatacctaatcgaatccctgatttcggtcaaatcctccagagcaataccactgtatctctccgccagctcaacgattttattggctaatttgtggtaaaggtcgtccagcctgttcctctccctttgcccatacttttcgagaagctctttccttttctttctagtcctaagctttttctgaatcttcctccgttttaggaagtagccagtccttatctcccgctcgtgagtgagtatctggacgaactcaccgtttggaaggctgagcgtaacgttgttctcgttcaaatccacgccgacaaaggcttcaggttctctcacttcaacctctctggaaaagaccacgttgatgaaaacgccttttggagtcctcaccaaccacgcttggccgattttccagtccctaaacttctcgtgatacttggatggataaaactccagctcaaccctcccgctcggagtggagagttttatcactccagcctcaaggtcgagcttgaagagatggtcgtcgagcattatggcatccttcttaaaaactggcctaccattagccttacccttctttttccgcttccgataactcttgtaaatcattgtggccatttgagttgctgtgtagtggtaatggcttggtagttctggatactccttgcggaggcttttgtatgtttcctttttgagcctgtaaaagctcgtaacattgttctcgaaagcatagctgatgaggtggttcacaatctcccgataagtggagaagaggtcgtttaactcctctggtgggtttttgagcttgaattttgccgtgagcttaatcgtctctgagggcattctttaccgcctcgacgaggcgttttttcttgtgagaacgagctccgtaaagctttccagcgaaagaggtaacgatagctaacaagtcttcaactaattctttctctggcgttttctcttcatcattgaagattacttcaatctcgacaccgtgagagttgaagtattgttcgaggtatttgaagccaaagcgggtgagcctgtccttgtaggttatcacgactttggttacctctccgctttccacgagtttgaagagctgttttaaacccttccggttttcgtttaggcctgatgaaatgtcagtgaggattctagcaacttggtatccttttgcggagcagtagtttttgaggtattcgacttgtcgttcaaggtcttctttctggtctctgcttgagactctggcgtaaatgacaactttatcgggaactttgccctcaagaagtctctttatttcgctttctggaatgcggtattctttgcctattttgtaggcttttatttcgcctgttttgatttttctgagaagtgtaggcttgctgattcccaagagttctgaggcttttcccgtccgataaagcttcatagtgacctccaccaaaacaaaatatgactcaaaaacatttaaactttacgctattaactatttatgaaacagccccaatagtaattcctttaccttcactcgttcagatgcccatcgaaaagattaaaagtttggcaatccaaaaagtagcggtgatttaacatggagtccgttttccagaacgagacaattaaggctattcttgagaagtaccgcaggatatgggccattgggcacgctcagagcgtcctcggctgggacatggaggtcaacatgccaaaggagggcattcttgagaggagcgtcgctcagggggagctttccgttctctctcaggagttcctgctcaagcccgagttcgtcgagcttgtcgagaaggccaaggggatagagggccttaacgagtacgagcgcggcgttgttcgtgtcctcgaccgctcgataaggataagcaagtcattcccgcccgagttcctcagggagatgagcgaggtcacgagccaggccactaaggcctgggaagaggccaagaggagcgacgacttctccaagttcgagccgtggcttgacagaatcatagaccttgccaagagggccgctgactatctcggctacgaggacgagccctacgatgccctgctcgacctcttcgaggagggcctcaccacgaaggaagtcgagaagatgttcgacaagcttgagaaggagctgaagccgctccttgagaaaatcatggaagagggcaaagtgcccagggagcacccgctcgagaaggagcgctatgagagggagcagatggagagggtaaacctctggatactccagaagttcggcttcccgcttggagtccgctcaaggctcgacgtttctgctcaccccttcaccaccgagttcggaataagggatgtgaggataactaccagatacgagggctacgacttcaggagaaccattctcagcaccgtccacgagtttgggcatgcactctacgagctccagcaggacgagaggtttatgttcagcccgatagccggcggtgtctccctcggaatccatgagagccagagccgcttctgggagaacataatcggccgttcaagggagttcgccggcttaatctacccggtgcttaaggagaacctcccgttcatggcgaactacacgcccgaagacgtttacctctacttcaacatagtcagaccggacttcataaggactgaagcggatgtcgttacctacaacttccacatactcctccgcttcaagctcgagaggatgatgctcaacgagggcgttaaggcgaaagacttacctgagctctggaacgaggagatggagaggctcctcggaatcaggccgaagacctacgccgagggaatcctccaggatatccactgggcccacggaactatcggctacttcccgacctacagcataggcacgctcctcgcgagccagatatactaccacatgaagcgcgacatcccggacttcgaggagaaggttgcaagggccgagttcgagccgataaaggcctggctcagggagaggatacaccgctggggaagcatctacccgccgaaggagctcctccagaaggccctcggcgaggagctgaacccagactacttcgtccgctgggtgaaggagaggtatctgtgatttcttttcctctctttctgatttgtttttctacggttcttagtgcgctggtttgtggttcctagaaatgtatttaagctcttttaatcaatatggcgggaaggtgacgtcttgtgatgaagaagttggtaagctttggactagttcttttgtttttggtaagtttgggtgcagttccagtcttctatgagaactacgcagaagcgttaggcatacttcaaaaagaaccaacaccttgggctcggagctatggaggaagcggttatgatgaagctaacgcggttgccctcgctccaaacggggatataatcttagtgggccactatgggggaaccgattggagaggctctgacgctgatgtttgggttctcaggctcgatgggaatgggaatattgtatggcagaaaacctacggggagcgagatagttattgggctaactcggctgtcgtagataataccaccggagatattattgttgttggatacactaacagcactgaggcaggggataaagatgtttgggttctcagacttgatgggaatgggaatattgtatggcagaaaacctacgggggaaacaacgacgatgaggctgatgcagtcgctataactcaaaatgggaacattgtcgtagctggtacatatggaggctatacctgggttctcgagcttgatggaaacggcaatattgtatggcaaaaagcttacagattttacgccgttatcaacgccgttgctattgattcgaatgggaatattatagtagctggcactaattctgatttttgggttctcaaacttaatgggaacggtgattttgagtggcagaaatcctggggtattagtagggctgcagatgaggctacttcagttgccattgataacggggacatcgttgtagcaggatacacttggggttttggtactaatggtgatttttgggttttcaggcttgatgggaacggtaatgtcatatggcagaagacttatgggggaaacagcgaagacgaggccaacgcggtcgccgtaactaacagcggggatattattgtagcaggttacacttacagctttggcgctggcaggtctgatgtttgggttctcaggctcgatgggaatgggaatattgtatggcaaaaaacctacggagggaaccttcgagatagggctaatgtagttgccatggccccaaatggagatattatcgtagcaggttttactgaaagcttcggcgcgggtaactatgatgtttgggctcttcgcattctccccgatgggtacctcccttctgagggtattaggaacttgggttttcatgtaagtgatagcaatgcaatagtaggtgccacgaacgccatctcatctagttatactccaactccctatgatacgagtgtttcagagaagtttaccaacgttatccctcaagacacgaacgccgtagtcgagacccagtactactacgctggccccactgagttatctttcacgtctccaactccagagaacggtagcgtgctaacatcggactacgtttttgtcaacgtgacctccaacaaccttttggagagtgcaaagctggagtggaacggtgagaacatcacgatggataaagcctcagatactaactggtactttaatgtcactgacctaacaaacggagagtacactttcaaagtctggggcaaggatttatcggagaaatgggttgccagtgaggttagaactgttaccgtgaacaggacgatcttcttgtcttttgtcccgccaactccggctgatggtgcagtggtgaatgttgatagcgtcgtcataaacgtcacttcaagccagccccttgagtctgccgtagtggagtgggatggagagaatttcacaatgcacagagagtctagtgagagttggtatttggctctaacgggtctttcaaacggccactacacctttagggtctggggtaatgattctcttggaaactggtttagcagtgaagcacggacaatcacagtgaattcaacagtcgttctttcctttgtccccccgactcctgagaatggcgctgttgtggacaccgatagagttctgataaacgtaagctcaggtcggcctctaaaaactgttctgctggaatggaacggacggaacctcaccatgcagagtgcatccaatacgaactggtacattgagatgaccaacttaacgaatggatactacacgtttagagcatggggagaggatcagctggggaactggtttagcagtggagtcaggagcattgctgtaaacaggacgatttcgctatcctttgtctcgccaactcccaagaataacagttcaataaactccgactacgttttcgtaaacgttacctcagaccggcctctcgagattgccctactggaatggaacgggcacaatcttaccatgcacaatacgtcaagcacgaattggtacttgaatataacggggctaacaaacggccactatgagttcagagcttggggcagagattctcttggaaactggtttagcactgaggttagaaccgtcaccgtgaattcaacggtcgtgctgtcctttgctcctccgactccggaagacggtgcggtggttaacactgattatgttctagtgaacgttacctctggtcagcctctacaggttgccaagctggagtggaacggccagaatctcaccatggaaatgctatcgaacacgagctggtatctaaacgtgaccaatctgacaaacggtcgttatacgtttagggcttggggcagagattccttggggaactggttcgccagtggtattagaacgattgccgtcaacaggacgataaccctgtccttcgttcccccgactccaggggatggtgacgtattgaactccgacagcgttttcattaacgtcacgtccagtcagcctctagagtctgccctactggagtgggatggaaagaacttcactatgaacaacgcttcgggcactaattggtacttcaacatgacgggattaaagaacggactctacacccttagggtatggggcagggattcccttgggaactggtttagcacagaggtcaggagtgtaacgataaaggtcaacacccagtccacgtacgatatctggattaagctgtcgtgcctgtggaccacttggttcttcaatcaccgtaccgagttctttgagctctacgagaacgcaacggtcttgggggttgataacgaaaccatacaattggcattggaactcaatgacaacgcgacggctttgatgttgggtgcatggggagcggataacttggaggacatcagggcgaacctgtggaacttcgagtcgcccacaaggcggattccacgtctctgggacataagaaaggcgttcctgattgagaaggaagccgtggaaatcctaagaaaagcgctgggaggcctttaacttcttttcttttttgtcattccaattttaacgcccacgagcgctcctatcagaagtccaaggatgaaaaccgccagcaatttcagtgggagctggtgttgggagctctgttccttttcaactgtcgcctgttcgttctcccattctccactgtagaggctcagcgatatcagggcgtaagcactgccatcaaaagccatggtgtttttggaacttgcaagctccaagaaccgaagcacttcttcggtgtggttgtctttctttccagcgaggtacagccacatcagggccattgccgttgagtaaacgtcgtggttccacgagccatcgagggctggaacttcgattatcgcgtagtttcttccgtcttcgaactgaagaacgcttctctcagcgtaaaaatctcccacgaactcaatgtagtcctcgggaaggtgggggtacaacctttggttccccttaaaaaagcccgactcatttaaaagaagcggctccccagaaatgattagaaataccctgctatttttagatgggcctgggttgaggtcaatgctggctttctctccactgcctttccattcctctctaacttcacagccgtttatgctgtactccagctctttcacagtgtagttggtgactctcttaaagctcagcctcaaagttgcgtttccggcgtactgcgtctcttcgaacagtgaagctatgaactcaagcgtctcgttcggtagcgtcatgttctcttctctgagaaataggaggggtaaaactatgctctcgtagggtgccctcatgtctctgtacggcatcggaaagaggaaacccgtgaagaagttgtcgagatacggggttatgagcctctcccgtgttagcctttccctcagccatttccattcccgggaaacgttgtagccgagcctcgatagcgccgccacggcgtaggcagtggcaactatgctgggcgactcgtttaccttgtgaagtcccgttttctcccagtacaggtacaccgtgctcgtccagtagttcttgctttcgttcttcaggaggaactgagcggcttcctctatctctttggagttcgggttctcccccgcttcgagaagggctaaaatagcgagccccgttccggcggcctttgaaagctcccagtagaaccactccgagtcagattcagggtagtcgtccgttatcaccgcgggaaacgaaccatctcccctctgccgggattttatccactcaacgagctccagaaactcggaagagttccgcggatagccgctccgcgcgagggctataaccttcaggcatgccaagtaaaagctctcgttgtccctgaagacattccatcccgagaggccttccgtgatgtcccatgggtaggagtagagggttctcgtccggtattcctcataagaaatgggatatccttctcatctgtgtctcactgccaccaagaaccggtgagaacagagctgaagtgacaaagaggaggagaatcaaagcagctaatttttgcttcataccctctcaatgcccccaaagttgttttagggattattctcctcgcttatccacgcaaccggctcgacctctatcgccgcaacgccgtacttcttctccttctcctctgaatagaacttccggtaaaccttcacgccctcctcaatgctcttgaccccaggcaggacgttctcaaggccctctttctccagcatctccctgaatgaagagtagaccctgacgtccttgacgacgcatacgagcttgttctcgaagactatctcgtctccgggcttgattttctgcctcttctcgtcgtacagcctgccctcgattttcttctttccctcggctatcgccctcaggtactcctcctggaggcccatcttccatctggccatcttctcacctcacagcagtgccctgattatggacgggctgacctttataagcctcgccagaaggctcggctttctcagtatggcctttgcagtcctccagtggtcatcgaagtccgcctggctctctatgacttccctcgcctcctcgctcttcaggacttcaaatattttttcaatggcctcctggtcgagtccgaggaacagcttcctgaacttcaggccgaagcttatctgctttctcacccatgagcagtagttccagtacctctcgggtgcgccctcaatgagtgcctttctgagggcatgagcgcagagcattccgtaggcgattccgccggcggtcgtcggctttatctggagtgcggcgtccccaataagggcaacgttttccctgatccatggctttctccagccgagaccgacactgccagctttgaactcaatggaggaagtaggtttaagcattctaacccttaagaacctgtttagctcgtctagggttccaaaggttcccaccctcgccaggtcgtcttcgacgggagttacccacgcgaagaacttgggcgttatctccttgttcacccatacttcagtgaaatctgtcctttcaaactcccccacgacctcgatctcatatccggtcaggaattctgccttcgtcgatgccccaatgttcttcgccaccgtgctcgcgaccccgtctgcaccgacatagaaggacgcctctacctcaagcctctcgttcatgtggctcagtacggccttcccgttcttgaagccctggaaggtcgttcccatgaagtagtcggctcccttctttaccgcgcttttggccagctctttttcaagggtctttctatcaacgacataggcctggggggactttctctggatttcaaagctctgtattcgcgaataaaagaccgctccccttagctggttcagaacggccttttctgggagtccgagtctttcgtagttctcggcccctattattccggtgcaggcttttccgccgaaggaggtttttctctcaacgacggcaacgttaaagtccctcgcgagaagagacgccaggtagtttccaacgggaccgccgccgattatgaggacatcgtacttcatcttcacccctcggatggggtggttttaaaaccctaaaaacctaacctttctggtggttcagatgaaggttttagttactggcttcgagccgtttggcggtgaggagataaacccctcctgggaggccgtgaaggggcttccgaatgagattgagggcgcggatattatcaagttccagctcccggtgactttcagcggtgtgagggagattcttccgagactgatcgtcaaggaacgtcccgacgcagtcatcctaactggacaggcgggcggaaggccaaacataacagttgagagggtcgcgatcaacgtcatggactcaactatgccagacaacgagggctacaagccagaggacgaacccgtctttgaaggcgctccggcggcatattttgcgacgattcctgtaaaggccattgtcaaagctctcagagaagctaagattccagcggcggtctcaaacaccgctggaacctacgtatgcaacgcagccatgttcaccgcccttcataccatagaagtttcaggaatgacgacaaaggcaggtttcatccatgttcccttcagccatgagcaggccctcgacaagccgaggccttccatggcgcttgaaaccatcagaaaaggcctagaaatcgcgattaaaatggtttttgaggatttgacccgagaaggttattaaagctcgttgaagtctatctcgtaggagaccgagccgttgaagctctgggcttccctaaaccttgctattattccgctgagggcctctaccagtgctccccttatttcccccatcaatctttctgccgcgtccttgctcggaagctcaaagacccttccttttagctctgatatcgggagatcttcctcgcctattctgacggtcggcgtgataccctttagtatctcctggagttcttcatcgaactcaagctcccgaacttttaccttgtaggttccattcattatgtcgtattctttgtcgaacactatcctcagcttcattgggattcaccactatagttctacgcattcaaccttaaagaccctatcggtttgattttcaaaccccctaaacttttaaggtcacgtccgaagtttccggtgaaggtgatgactcattctaatcctagggcttgacgtcgtcggcgagaatccaaaaaggtttgcggtggtgagctggttcaacggaaagcttgagagaaagggtgagtttacactctacaggttaatccgcttcattcaggctaaaaggccggatattgttgccattgacagtgttaccgaacttggtgatgatttaaggaagtttctgcgcgccctcccaccaggaacaaagctcgtccaggtcactggaaagcctggggagcagaggaccctccagagcctcgccaaggagcacgggataaggactggcgaccgctttgacccctacgaggaggccaaagtagcggctcttctagcgagcaaaggagtcggctatgaagtcctcgccttcgaggacgaggtgattgtgaaggtaacccgcggcaggagccacgggaagggcggctggagtcaggataggtacaggaaacgcgttcacaacctcgtgagggacaaggtgagggagatagaggacaggcttaggagggcggatataccattcgaccttgagaccgaagagaaggactacgggctggccaggggcgagttcagggtatacgccagcagggaggagctcgccggccttataagaccgatgaggggtggagatgtcgaggtcagaattcagcccgtcgagagggctgaactcggcttcgctccgctgaaaaaggaggaggcaatacgggaaaggaagagcatcatagttggcatagaccccgggataaccgttgggatagcggcgatagatctcgacggcagaatagttgctctccacagcgagaggaacatgcccgtcggagaggtgttccgcttcatcagcgagattggacacccggttataatagcaacggacgtttctccagctccgggcttcgtggaaaagatagcccgctccttcaaggcccagctcttcgtccctagggagagcctccgcgtggaggagaagaacgaactcctaagggatctgggaataaccgttgacgatgaccaccagcgggatgctctggcagctgcatacaaagcctacctgaggataaagcccaagctggaacacattgatgcccgcctgagagaagccggtctgactaagaagtccgacgaggtcaaggctctcgtaatagccggctacaaccttggggaggcgatgcagagggtaaccctgagggagagaaaaaaggaagaagagaaggaagagcccgagacagagaaaagcttcgatgccgagccctatctcaagaggatacgtgagcttgagagaaggattgagctccttgagagggagaacgaagagctgagggagataatcaaggagcagaggaagacgataggaaggcttgagcggaagatagccgactacgacgaggaggtgagaagaaaggttctgcgcgagcgggagctggaggcgaaggtcaggcgcattgaagtccttgaaaaacagctgagggaagcgaaggccgtcatcgagaggctgagcagggatctagtccaggtaaagaggatgaacgtggtagaggttcgcggctcggcggttccacttaaagttctcagggttcttagctggggtgagctggataggatagagcgagaagtcggcttaaggaagggtgatgtgctcttcgtgataaaccctgctggagctgggaaggcgatagctgaggagctcgttgagaaggggataagggccataataacggaaaagcctctgcccgaagttgtgaaagaagttctccgtgaggcccacctaccgttcttcacgagcgaggagcttgacgtcaagagggtggatgagtttgccgttgttgagagggagacgcttgagaaagctattgaggagcttctcaagagatgggaagaggaagaccgcgagagggaagcggaaaaactgctccgtttggtcgaggagtacagaattgagagggccagagaactggagaggaaggccagggaggagcttgagggggagaagcggaggaagagggaagggttttaagctctgaggttctaaataggccggtggtgtatataaccagggagagggcgataataaagggctcgatcttcgttgtcttcctgggctttctgacggccgtcatcaacggaaggagcgaccacatataccgcactatcgtagctattctcggtctctctattccgctggttcttcccaagaagctcctgaatccccctgaaaaagtaaaacccttcctctcccccgtttacgacgagaggacgatggcggttctcgggattttcatagccgtccacgtctccctcgtgaacgtgcccttcacccactacgacctcttccatcgagactggagaaacgccgacatgataagccacttcctcggcggcctaacggtctggctgatcgttgctcagattttatcagaacttgaggggattggaatcaaactctccaagagacaggttgtcctctacaccttcatcgtcttctacgtcctctccctcggctgggaagtggctgaaaagctgagcgagagcgagataagcttcatccatgaaagcctcaccaacaagctccgcgatctcctaatggatactctgggagcgctcttcgggtggtgggtggtagaaaagagaaggtaccccttcggtttggggagggattagccagtatttttaaccccgcgatgctcaactgcgaacgttttgttaatgctctcttctggactccgaatttatgaatatgactgttcagaaaagcttattattgtgaaaagttgaacattgatggtggctcaaatgagggtgtactcccctggaagggtgaatctaatcggagaacacaccgactactcctacggctacgttctccccatggcgatagaccgctacaccgtcatagagggggagccgcacgagagggtggagctttactcggagcacttcaagaagagcgtgtcctttgagctggaaaagctggaaaagggaaacaactgggcggactacgtgaagggagtctactgggttctccagagggaagggtatgaagtggggggcatgaagggaagggtcggaggaaacctcccgctcggctccggccttagctcttccgcgagcttcgagctggcagtgctcgctttcctgaacgaggcctattccctcaagctctcccggctcgatatggccctccttgccaaaaaagccgagaacgagttcgttggcgtcccctgcgggatactcgaccagttcgcgatagcctttggcagggaggggaaggccatattcctcgacacggagacacttgactacgagtacctgccgtttccggaggaccttgaggttctcgtcttctacacgggggtcaagagggagctcgcctcctctgcctacgcggaaaggaagaaggcaatcgaggaggccctccgggttctcggaaagagctcctcgaagtacgtgactgaggaagagctttcaaagctcccggagaaggaaaggcggtacctcggctacgttgtccgcgagaactcccgcgtccttgccttcagggacgccctgaaagagggggacgtcgaggccatggggcagctcatggtcgaggcccacagggacatagccgagaactaccgcgtcagctgtgaggagctcgacttcttcgtggaaaaggccctcgaactcggcgccctcggtgccaggctcacgggggcgggctttggtggctcggccatagccctcgtggagcacgggaagggcgaatccctcggaagggaagtggcagagctctacacgaaggtcttcccatggacgccagaggtcttcgtggtaaggccctctgaaggggtgatggttctatgatgtccctcgtcttccacggcaacctccagtacgctgaaatcccgaagagtgaaatcccgaaggtcatagagaaggcctacctccccgtcatcggcaggctcctcaaggaggagattccctttgggctcaacataaccggctacacgcttgagattctccccagggaggtcatagagctagttagggagggaatagcgggcggcctgatagagataatcggaacgagctacacccatgccatactccctctcctcccgcttgacagggtagaggcccaggttcggaaggacagggagctcaaggaggagctcttcgaggtttctccaaagggcttctggcttccggagctcgcctacgacccgataatccctgccatactgaaggacaacggctacgggtacgtctttgcggacggagaggcgatgcttctctcggatcacctaaactccgctgtgaagccgataaagccgctctacccgcacctcataaaggcccagaggggggagggcaacgttttcctcaactacatcctcggcctcagggagctgaaaaaagcggtggaaaaggccttccccggaaaggtaacacttgaggcggtcaaaaacatcgatgccgtccccgtgtgggtggcgataaacaccgcggtgatgctcgggatagggcgcttcccgctcatgaacccaaagaaagcagcgaactggctgagggggaaggacgatgtactgctctatgggactgacatagagttcatcggctaccgcgacctcgccgggaggaggatgagcatagacggccttcttgaggtggttaaagctctcaacgtcgagctctccctaccctcggagctgaagcacagcggaaggaagctctacctcagaacttcgagctgggcgcccgacaagagccttagaatatggacggaggatgaggggaacgctcgcttgaacatgctcacccccttcgttggggaaccccttgcttttctggctgaaaacagcgacgcccgcgggtgggagcctctccctgagaggaggctcgacgccttccgggcgatatacaacgattggaggggttcgaagtgagggatttaaggagaaaggtctcaatagccctgcttgtcctgatggccgtctttttgatggccgaccagaatctcctaccccctaactaccagctgataatggaggagttcggaataagcgaagccaagatggggcttgtatcgtcaatattcgtggcaacgagcgctttgataacaataatctggggatttctgtcggacataaagcagaggaagaagctcctcgtcataggcgtgctcctgggcgaaatcccgtgcttcctcactgcctacgtcacgaactactggcagctcttggccatgcgcttcctcacgggaataggaataggctccataatccccataggctactccctcatagctgacatgttcgaggagtccaagaggggaaggggctacgcctacatggagacggccttcggctttggtacgctcctcggaatgataatggccggaatgatagccggctggaggcttccctttatcctagccgccgttcccaacttcatcctcgcaccgctcttctacttcatagcggaggagcccaagaggggcgagggtgaaaaggagcttcgagaagtccttgagaagggctacgagtacaggtacagaataagctgggaagctgtcaagaagtcctttgagacgaagacaaaccagctcatcttcctccagggaatcatcggaacggttccgtggggcatcataatgtactggctcatctccttcctccaggtaacgaggggaatggacaagacaacctccaccttcgtgctccttatcatcggcatctcaagcgtcctcggaagcctaatgggagggttcctcggcgactacttcgaggcacggtggagaggaggaagagccatcctgaccggggcggctatcttcattggaatgctggcctcgataggcataatcctctacccgcttccctcccagctcacagccaaggactgggccttcatagcggtctactcgctcctcttcatccagttcgtgtcctacgccgggcccaacgtgagggcgatagtttcacaggtcaaccttccggaggacaggggtacaatattcggcctcttcaacatcctcgacaacgtcggaaaggccaccggcccgctcctcggcggcctgatgatagagtggctgaggggcatgggttactcaaagcccctcgcctaccagtacacactgctcataggcgcgctcttctggataccctgcgccctcacgtggctctggataaagaagacctacccggaggacagggacgcggtgaaggcaatattaaagaagagggcagaagagctcctttcaaaggcacctgccaattagccccttttcttcctttatctttccgcaggcttccttcagcctctcggcgttctcctctggaactgaatcgtacgtgaactcccaggtgcccatctctattccggccgcgaacttcaccttgtttgcgtccctaaggatcgggtagaactcgatgtggaggtggtagaatggatacctccccttgaacggcgcctggaatatcatcatcgtgtagggcatccccctgtcgaaaagggcattgagcgttgcggtggttgcccttactgcatctgccaggtcctcgctctccttcccgtcgagctgggtcaggtactggacgtgcctcttcggatagacgtggagttcgaacggccagctcgcgaagaatgggaggaagaccgcgaagctatcgttctcgtagatcacccttcctcctttccgctcctcctcaaggatcctgcagaagaggcactcgccgtgtttcttaaagtgcctccgggagttctcgatcttaagcctcaccttgagcggaatgaaggggagtgcgtagagctggccgtgggggtggtggaggctcactccaatctcctcgcccttgtttctgaatatggcgacgtaggctatgtgcctgttttctctgagggttctggttgcttccttccacagctccacgacctttaccatcccctccctggaaagctcgtcgaggtctttcagcccgtgctccggcgtctcgactattacgctgcactggccaatggccctcgcctttttgtagaactcaactttctccggcttaggggcctcgaaggagagcatcgggaagcgatttggaaggaggagaacttcccagccgtagccggtctcctcagtgccaggacagaaggggcagaagttcttgggtcgccaggggcgctttttcctctccgctgagaccattatccactgcccggttaggggattgaacctcagttccctcatttgatcaccggtggtgcttcttttcgatcctttaaaattttttcatcatccgaaaacgatttataccacccgtgcgtttaattgtacggtgctgtccatgttcccggagaagttcttgtttggcacttcaactgccgctcaccaggttgagggtgacaataagtggaacgactggtggtactacgaggagatgggtaaactcccctacaaatcaggaaaggcctgcaatcactgggagctttacagagaggatatagagctgatggcagagttgggctacaacgcctaccgcttttcaatagagtggagcaggctcttccccgaggagggaaagttcaacgaggatgccttcaaccgctatagagagatcattgagctcctgcttgagaagggcataactccaaacgttaccctgcaccactttacctcgcccctgtggtttatgaggaagggtggcttcctgaaggaggagaacctgaagtactgggaggggtacgttgataaagccgcggagctcctcaaaggcgtgaaactcgtcgctaccttcaacgagccgctggtttacgtgacgatgggctacctcacggcctactggccgcccttcatcaagagccccttcaagtccttcagggtcgccgcgaacctgctcaaggcccacgcaatagcctacgagctccttcacggaaagttccaggttgggatagtcaagcacatccgcgtgatgctcccggagaggaaaggcgacgagaaagcggcccagaaggccgacaacctcttcaactggtacttcctcgacgccatatggagcggaaagtacaggggggccttcaagacctactccgtcccggagagcgatgctgacttcataggggtaaactactacaccgcgagcaccgttaggagaagcctcaacccactgaagatgttcttcgaggccaaggatgcagagatcggcgagaggaggacgcagatgggctggagcgtctaccccgagggcgtctacctggctctcaggagggcctctgaatacggaaggccgctctacgtcacggagaacggaatagcgacgctcgacgacgagtggagaaaggagtttataatccagcacctccgccaggttctcagggcgatagaggatggcctcgacgtcagaggctacttctactggtcgctcatggacaactacgagtggagggagggcttcgagcccaggttcgggctgatagaggtggacttcgagaccttcgagagaaggccgaggggaagcgcctacctctacggggagatagcgaggacgaagaagctccccggcgaggaagacccgtagctttatccttctatctcttctagggctttctttagggccttcaaatattttcccgtctcctctgctcccctatcggttatctttaccgcagtcctcggcctgtcggctatgatcttgaagacctcaacgtagccttccctctcaagggtcttaaggtgtgagtctaggttgccaggagttacctcaagcacttccaggaggtctctgaagagggccctctccctcggcaggaggtagagcatgatggcgagccttatggggtttcccaggacgttgttagagctcagctccctgagggcttccattttatcaccgcttgacggctttgaaggcggagtgaaggtatagaagtatagtcgtggcaaagccgagtgagactacgtagccggcccagagcatcgctccacttcccattccccacgctagaggtatggccagtgctggaatcagaaacgcaggaaccatctcgttctcggccccacagcacttcttcagaaccgcccactggccgaggagcgaaacgctgataaagctcaggaagcccacggccaggcccgcttcctcgtttatccctggattcaatgaggggatcaaaacccagccaagcgcagcgccgattacccatgcacccgctatttctagaccgatcttttttccggagttccttttgattccggagatggtcactatcctcctccaaacctttgaggtgaaagtaatcacaacgatagtggctgccgtccagtatgcgatgctgaaagcgggcccgccgttgaagaaccggagtataacgtagaacagagtcatcaccgccagaaaacccgcgaagttcatcgcggcgtacatctttccagccgctatcagcttgccctcaactttctcgagcacgctcttgagttccttaacatcttccatatccaccacccctattgagaataggacgttctcctatttatagcgtggagtttctctgaatttcagagtgtttcctccgggaacacgataccattaaatattccatgcacaccaaatactctggtgatgattatggaacttctgagtacaggcattcctatcctcgatgacgcacttggaggaggattactggaagacagtaacattctcatagtgtacgattcatactcaaacggctggactctggcctttgaaatactgagaaaccgcataatggaaggcgatttcggtgtaattttagactcagtgctgcctttcacacctttaaaaatggagctggggcttattcgatttgacattgaggaatttggcaaaaagaataatctcgcaatcgtggatttattctcgtcaatttatggtgttgattaccccttggattttgtttatacgaataaaagcattgacacttcaacctttgtgcccaaatacaactacctctatcggcgcatccttgaggagaagattaaggacagacgccccattggtatagacttcacgatagacggtctggcgttcttgtttggtgaagacaatttcatcaaattgttccagaatctcattgccctgaaggaaaaggcgagaataactgaaaagaggaagcggccgataaacatctttctcttgaacaagggcagagcctcagagaggttgactgcttggattgccctctacagtcagtacgtcatagaattctgctcttcctcgaagacattcagggaaaaaatggtaataagaaagtcgcctttgccggactttaagcccaaagaaggtggatatgacttctggataggagaggggcaagtccacattgagtagctatccaccggccctcgccctcatcagaaactccatgaacctctttatctcctcgtcttctccctcaattgccacccttttgagcgggattctgttttttacaatcacttcaagaagagccagtctcacccttgtcccgctccgacggcggatttcctcaagctcttcgggcggtattggagtctcaataatcctcctcaagcagaaacctccatagggggattaactttatcccatctacttccttctcgatgtcccagtttataacgtaggctttcttccatcccgtctccctcctcgccgcttttaccgccttaagttctctcccgagggtctctggatcgcttaagtcgtagctcacctggatgagggtctccttctcaggtagggcgaagtcaatttcccagttttcgttgaggaggtagttgatttcctctcccttcctcctaagctccagaaagactgtgttttccatgagccttccaaagttctcgctgaacttgacgctgaggaacgtcaggaacgagttgtcgacgaagtagacctttttgggatggccgatcctgaggcggactttaggtgaaagtacctcgaccgggaagaggaagtaggactcgctcagatacctcaagtagttggcgagggtcagcctgcttatcctgtagccgaggctcttgagggttctctccattttgctcaggctcaggtactccgaattgagggccagcctgagaaacgccctgagctcctccgggtttctcaatgagtaccgttcaacgacgtcgagggctattatggtgttgaaatagtcggtaactatgagcctcttcaccctcggatcatccgccagaacaacctctgggaaaccaccgtaggttacgtactctctaaggaggttcagaagtctgggcttctttgagctgaattccaccctcgacggaacttcaaaccccttgaatctcaagaactcccggaagctcaatgggaacacctcgaaagttagtgccctacctctgagggaagttggaatctccctgctagagagctttgaggaggaaccgcttaggaacagcttcgcctttccagaatcatgaaccctcctgacccaggaatcccacccttccacgttctgtatctcgtcgaggaagaggtaaagctccgctgaggttccaaaaagctcctcgattgttggtatcagcccggtaagcgtcgaaatgttcttttcgagcctctcgtcctcaaagttgatgtagaagattctttccttcgggactttctttgacagctcgttgatcagctggaacattagatacgtctttcccgtcctccggcagccggcaaaggtgacgacctttcttggcttttcagggattaatgagaaatcaaaatccctctcaatgagctccggtgtccaggtctcctgccattcggttaggactctcgcaaggctctccttcatgattttatattcgctcctttgtttataaacattgctaagtatactttacagccatttataaatccctgtttatcaaattcactcaaccctgaaagtcagacccttctccctggccttcttctccacctggagcctgaactggcaggccttgcatatctcccccgtcgttggctgtccgcatatcttacagcggttcagctcgctcgtcttcttagtgtaggtcttcgctatgagcgggaagagcttgtcgtagctcctgagtatctgatacttcgttcctggatgcttctcctccatctcgtttatccagtcccttatctccgccctgaacgcctctaccgcgtaggggcactcgctcaaatccacctcgatgttgttcagaactgcgtacagaacgatttccttctcgggtatctcgcggaggggctttatcctcggaacgagctcggggtgaatttcctcgtagtacggccctgtccttccgagcctagctatgtctcccctcaggatgttcatcaggaacatctgtacctcgtcatctaggttgtggcctaccgccaatttgtctgctccaacgtccatcgccgcgtagttgagcagccagcgcctccacacaccgcagtaggagcatgccccaacgcgctcgcccttctcgaagctacccattatctcaacggtttcgtccagcgtgaagcctatgtactccttgaacgaatagatgcggtgctctattccaagttttttcgcgttcctcttcgctatctcgacgcttgggggccgatagccggctatcccctcgtctatggttatcgcgacaagctcaaaggggaacttctcgcggagcttggctaaaaggtgcatgaggacgacgctgtcctttccgccgctcacaccgacggctatcctctcacccttctctatgagccgatacttcttcacggtctccttgaactttttctcaaccatctcgttgaagtgtttcttacagtaataccttcccgtgtagcgtgcgtgatagaccgctgttttaccgcatttggagcacttcatctcctcacctggtctggattcttggatagatttaaaactgttaatgcagatgtttgatattgggtacgtggtggtggccatggaaaacattctgacctcctccccgccgtgaacggcgaggctttcagaagagaaagtaaaaagaaaacccattcagccggcgaggttcagtaaagccggccacaggttcagggcaaggagaagcagtccaacgcctatggtcgtgtacctcaccggcctcgctattttctctgggaggtactccttgaggacgtcgtccagcattctgccgccatcgaggggcacgagcgggaagaggttcataaggcctatcccaacgttgagcaggtatatccagtagagggcgaagaaaatcgggaggactaccttcgcagacccgactttcgattcaacatgctgagccggctgtatccctatgaagccctttcctggcctgtctgggtgctctgcgagggtcagctcaacgctgatcttctccccgtttcttaggacttcaagttccagggtttctccaggcttggttttgtccattaactccatgaagtcttccatggtctttatttcctgcccgtttatgccgattataacgtcacccttctggagaaccttctcggcgggggagccgggtattattcccttcacctcaactcccgcggggacgagaagcgggtttattgcgtaggttattatgagggccgttattattgccgttgttatgttggccattgatcccgccccgtacaccctgaggcgcgagcggaggggcgcctttgcaagttcttcttcgtcgggctcaacaaaggccccaggaatcacggccaggagaacaagcccaacggactttagaggaagcttatcggccctcgcaactattccgtggctgagctcgtggacgaccatcacaacaacgaggccgataagcccgtaccaaagcgggatcgtcacgccagggatcacgagttgaaccccagcctgctgtcccttggtctggagcgtttgagcggcggtttttgcaagggcgtagaagacgtagaccatacccatgtaaccgagggctatgccgacgtcagcatagaccttccagaagcgcgggttgatgcgtgatactctgtctatgaaccccaagaggcgctttgttctccacattgcgatgaacatgtcaacgctgagaccctcttccttctctatgggttctccagtttcagggtctatctccttctttccgaagagggcgtacagaaccatccagaagaccgcgattcccgcgaggatcactgcgagggttgagaccataccacatctcctcttttatttctcgtgtgcgtattaacttggcaggcttataaatttgccgaggtgttgggatttttactcgcaaagcctctttgcttcactcatcctttgaaagcctttccatagctctaatgagccatcttaggttcacaccagctttttctgccagtttttccagattttcagcttcttctttctctatgcacccgctcagaaggattaggatgagataaccaccgtagaggatggcagtctttaagatggctccaacgatcgaaccggtatctcccaggagaagcccaaggaggagcattagggcgccgattaagagggccttgacataggtttttccaaatggttggactccagtcgtcctgtagaggattgacaccctgtacaggttcgccgctatatacgaggaggccgttgccaaagccgccccgtttatcccgtacaccggaatgagggccatgttgagggccacgtttaggagtgcggcaaggaggttgccaattaggttgtctgaagtccttccgacggccaccagactcatagcgttgagccccattaccacgtggaacataaaacctagggccagtattctcagggctgtcgccgcttcggtgtacttggccccgaagaacaggtttattgtcccttttggaaacgcaaaaaccagcaggaaggccggaaaagtcaggatgaaaccccactttgcagtgctctggtatagccttttcagcccttcaatgtttccacctgtaaaaaacaccgttgccataggcataaacacgaatccgagggagttcagaaccacgggcagtgccctggctattggcgccgccccgttgtaaagacccaccttatcaggcccaaaatagtagcccagcatcagggagtctgtccagccgagaacatagtccaatatgcccgtcagcatgagcgggaatgagaacgccaaaagttcttttgcgagattccagtcgaactcaggttttttcggcaacagcccgagctttatgccatctaagaagcccagaagcgctgggattgtccatgcggcgacgtaagaaatgaacacccagttgaagctgagatttaagagaaaactcatacccaggaaaaccaggaaaatgagctgggggaggacgttcctgtaatagaagttctccctaacccttccgtgtcccctggatattgccacgattatcatagtcaaaaccatcgggagaagcgctggagaggctattctgagagtctggtttaggtacgggtcgtttaggacatttccaagattgggagccagggtgaataagagtagtataagggccagggaagagctagaccctatcaaaactcccgttgacgccagttttagtgcaacttctctatccctctggaggtggcgggctatctcccttgagaggccgttctgaagtccgagaagggctatggtcattgcaatgctcagaacagttacggtgagtgtgaacgacccgtactggctcctctcgtagtatcttgccaggactgcctttgtgagaaagttgaggagcattcccacaactgttcctgctaggactatgccagccccctttgcgaccttgcccagagtttcttcgcttccctccaaggatttcaccgcggtacggttttcttgggcgtgcctttaaacggttttggaatctgtcggttgataggctttttgttgtatctctccaaataatgtagtagaatgcattacgccaccagtttttacaacttgacttccgaaaaacttatatattcttacgcgttcttcttctgagaaaccatgattggtggtatttatgaaacgaacgctgggcgttacactggcggccctgctggttttcctcgctggcgtcaagtttggtgcctcgtacttcagcgacgtggcgaagtccacgggcaacgagttctccacgggtgagttcgatatcgggataagcagagatgacgggaggtactacgatgcttacaaggtctttgagtttggagaccttctgccgggagaagagaagacgatccgattctacatcaagaaccgcggagattaccctgtttcaaagatcacaatgaccctaaacgtgactgaccgtgaagatggaaagctctctaaagctgaggcactcgtggacagcacgccagacgttggagagctcagcaaatacctgatagtcaaggacatccgtgtcttggttaacgggacagtcatgaaacttgatctctacgctggaaaatcccttaaagagctcaacggtacgcttatacgcctctttgagggcaagctggctgagagcgaagccataggaattactatgcgcgtagaactctctcccgatgcgggaaacgagtgccagaccgatacctctgaggttgctatgctcataactgcttcacagtgagcggaagccacttaaaccccctctccaatttttccctgcgatgatgagtgatgggcgaaccgaccggtgaggaaggaaaggtgatcgctgagcaacccttttaagtcccatcctctaccttttctgggatgatgagttcagccttgtccgagctgtgacgagggagtgacggactgaccgcattgtgcatgttggttgtttaattcgtttaaaccccggagggtggcccttggaggagctctaccgccccatatgggtctcgatagttggaaaccttctcctctcagtgctcaagctggtcgttgggtttctctactcgagcatagccctgatttcggacggagctcactccctcagcgatgtggttacgagcgtcatcggctaccttgggatgagggtttcttcaaagccccctgacaaaagccatcccttcggacactcccgctttgagcccctggtggcctttctcataagcgaggctctcctcctggtggcctacgagattgggagggattcactcttcagacttctccatggcacggccattgaggtaaactccctaatgctcggggttacagtcctttccattcttgccaaagagttgatgttccgctattccgtttacgtcggcaggaagctcaaaagccaaatcttagttgccgacgcttaccaccacaggagcgacgccctcagcagcgttgcggttctcgtgggtctcggtcttcagaagctcggcttcaagtatggggatgccctcgccgggctggttgttgcgggcttcctcgtcaaggtctcggcggagataatccttgagaacgttggctacctcacaggaagcgccccgccctttgaggtgtgcgaggagattaggaagcgcgccatgagcgtcccaaacgtcctgggagtccacgacctcagggcacactacgtggggaacaaactccacgttgagcttcacattgaagttccaccggaaatcacactcaagggggcccacgatatcagcgaggaagtcaagaagaggatcgaggagatgccagaggtggagagggcctttgtccacgtggacataaagggcgttactgagtgaggtcgagcgccttcatgaggctttcgtagacctcggctagcttttcctcccgcaggaggccgattctcttgatgaccatccttttgttgactgagaaaatcacgtagggcttgacaatgctgggtattatcggccttgttcctggatacctgtcaaggtcctcgtccgctatcaggacgttgagttctttaaacccgcttttcaggttggagttatctgagccactatgattgagttgctcttcctgttgaagctctcgctcgaaaggacgagggctggcctcgttttcacgttctggaggtcgttgaagggaaacggcaggaggattacctctccctctttgaaaggccctccttcagtaggagtcccagaagctgtcctcctcactctcccagtcctccttgaggacgtcctcgacggccttcagcctccatctttcctcttccgtgagctcctttctgagctccctgaggtagtgccgtatagcctcctttatcaggtcgcttctgttgctgaagaggcccgctttgacgagcgagtctatctcctcggcaagcttcggaggaagtctcacagaaaccttcacaccagtggtcattgtctcaccaatgggtcaatttgtcggacagctttaaagcctttttgcaatctccctcaaatccctcaaaaactcctcgaggtgctccctcttcacgtgaggcatgacgacgatccttatgtagcccctgtgagcgcttacaccccagcccctcgccttaagctctttttcaagctcttccagcttctctgaaccgaatgagactatatttaacactggctccctgatgaggtaaatccctggaatcttcttcagttccgaggcgaaccaccttgcgagctccatcttctcttttacaacttccttgtacccatcgaagccgaggtgttttatcatcgcccacactgccagagcattggctcccggtctggttccggttatcgtcgcctgccagattttgcctccggccaaatacggggctaaaacgcttatactgtccagaaacttcttctcgcggaagattattcccccggctggaatcggtaccatccccatcttgtgagggtctattgttatacttttcactcccttgagcctgaagtcgaagtcgggaatctcataaccgagagcctttgcaaagggtatcacgaagccgccgaaggctgcatcaacgtggaggggaagaccgtagtcaagtgctaagtcgctcagggccgggatgtcgtcgacgactccaaggccggtcgttccagctatccccactattcctatcgtcctgtctgttatcttcttctcaacgtctttcacgttgactgtgtagtcgtcgttcagttccgcccagacgagctttacccctagcatctcggcggcctttatgaatgagaagtgagcgctctctggaaggatcagttcgggcttttctattccagcgaggtttctcattgccctcactgccagaatgttggcctccgtcccgccagagactatgtggccgtagcccttctccagcccaagtaggttggccagcatgtcaacggcttctttctcgatcttctggctcccgatatgtaaaccaggatcgccgaggttcctgtctatgtacttcataacgaccttcactgcgaaggggtgtgggtaagtgcacatagaaccgagtatcttgcctgaatcgaaggttaaatcttctcttgtcttctcttcaagctccctcaggacttcttcctcgctcgctcccctctctggaaacattttctcaccgccttgcggtactagctctccccggctttaagcctttgcctcttcaggtacgccttgaagaatatcggcgttgttaaggccgttagcattgagaccattataacactcgcgaagatgctctggtctatcaaccccgtgctgaggccgaacgtgaggatagccagctccaggcttccccttccacccattccaattccgactgctatcgaatcttcccaggggagaccaaccagctttgaaccaagaccgcagccgatcagcttaccaagcactgccgaggcgtagagggccaaaatgaggaatatgttaatgtctttaatggggggattgaacatcaggccgacgtagataaagaacagcggcatgaagaactccgtgaggacaacctgaaggtcgcctatgagctcgttgagctttatcctggtaacgacgagggggtcttttctctcgcggagtctgcttatggtcagacccgccaggtaggcccctattatctggttcaggccaacccactccgatattatggcgagtgcaaacgtgaggatgagggtgaatgtaaagaagacgttgaggttcctgaccacgctgtagaaccatctggagcgcttgaagatgtactccgaaatcaggagcgtcgcgactatgaaggcaaagattttccccgtcaggatgaggagggactgggcgttgaagttcccgctcgccatgccggtgatgatgcctataaggtaaacggccagtatgtcgtccgcgaacgccgctcccatcagtatggccgagactcttctgttcaccctctccttgaccaggacgccgctcgtgacttcgattgccgtgtttccgagggttacgccaacgaacaccgccgcggagaacccctttccaaagaggtacacggtggcaaagcccagtatgaacgagaaagcaaccccgagaactgccacaaacgtggctttcttcgtgttctgggctattgcagagaagttgctggtcaggcccatgtagagcatcatcattataagtccaaactgtgccagcacttcaatttctttgcccggctttacaattccgagtgcaaacggcccgaggagaatgccagttataacgtgggcgatgatcgggtgtatctccgccttctcgaaggcccattctatgctctttgccacaactagaaggactgctaggtagccgaggaactccacgtcatcccctccttgcgagaagagtaccaattatccacagaaccatcaggagcaccgccagaatcatggccagggtgacaccccttcctgttccaaagactattggaattgggcctatcattatgaccccgccgccttcaacgtccgcctcaccgctgaaggcagatagcagggtcccgatgaacaccaggatgaaccccaggaatatcagggctattcccgccagtacgagttcttcgcctctcatcaatccagaactcgtttaccgtctttaaaagctttgcattaccctttaaaagccccgaagaaataataccaatatgctggtaatcaccgacctcgacgataccctctgcaatacgtgggaggcgggaaaaaagaccctcttgagaactctcttgttcctgatcaggagaagaaagttccgggccatagcgtacttcttgctaaaaaagtaccgtcgttttgaaagctctgaggaagtccacctgatggatttggacgagcttgttgaaaccgtctttagggacgtttacccagatgcctctgacgatgaaatccgggaagttgtgtcctttgttgagcgcgcctttttcgaacacttacgccttttccctgatgccctgccgtttctctccggtctgaagaagcttggggcaaaaatagttctcgtgacggactcatcgacggagtggcaaaggaaaaagcttgaagttctcggcgtctccaattactttgatggcgtcatcataagcggtgaaacaggccacagcaagcttgaagattacaacttcaagcttgcccttcaaaagttcccttccagcgaggtctacgttgttggtgaccgcgacgagactgacatgcgtggaggtagggcgattggggccaccaccatactggttcgcaggggctatttcaagtcccgaaaagtcaggtttgccgattacgttgtgaataaccttcttgaggccctggaggtgataaagcgtgagtataagaagcgagttgaagcgtaaagcactccacctcacgggacttactgtgcctgccatttatctctgctgtggcaagaccacaacgctcgccttcataggtctggcctttgtcctcttcgtcgtgcttgaaccattcaggataatcgaagagtggagggataggataaagtaccgcctcctgaatatgtacccttcccccgagctgggtaggagcattgagcttatagaaaaccatatcgaggccataactagacctcacgagcgtgagagagttgcggcccacatatactttgcggccgcttcgttcatagtagtatatttcttcccgatgaaggtggcggtgggtgccataactgtggcaaccctgggggatgccctggccgctataatcgggaagagccttgggagacacagattctcaagcggtaagagccttgaggggagcttggcatacttccttacggctctgctggttttaatcccccttgtgagttttgctcccgctttagctggtgcagtcatcggcactattgtggagttctacaacgtcccgcccgacgacaacttctcaaaccagctggcagtagcagttgccgtgtatttggttttccttgtctcctgatcttccactgagtcctgaagaaaaggtttatatgcctttctttaccatatcacctccagtgataacaaagcttgtcggtgatggagatggtgaacttcatatttggtatccacaaccatcagccccttggaaactttggatgggttatggagagcgcctacgagaggtcctataggcccttcatggagacccttgaggagtaccctaacatgaaggtggccgttcattactccggcccgctccttgagtggatacgcgacaacaagccagaacacctcgatttgctccgctcgctcgtcaagaggggacagcttgagatagtggtggctggcttctacgagcccgttcttgcctcgattccgaaggaagataggatagtccagatcgagaagctcaaggagttcgccaggaatctcggctacgaagcgaggggcgtctggctcactgagagggtctggcagccggagctcgtgaaaagcctccgcgctgctggaatagattacgtcatagttgacgactaccacttcatgagcgcgggcctctcaaaggatgagctgttctggccgtactacaccgaggatggcggtgaagtcataacggttttcccgatagacgagaagctcaggtatttgatccccttccgccccgttgataagaccctcgaatacctacactccctcgatgatggtgatgagagcaaggttgcggtcttccacgatgacggtgagaagttcggggtctggcccggaacctacgagtgggtctacgagaagggctggctcagggagttcttcgatagggtttcaagcgacgagaggataaacctcatgctctactctgaatacctccagaggttcaggccgcgcggtctggtttacctcccgatagcttcatacttcgagatgagcgagtggagcctcccggcgaggcaggccaagctcttcgtggagttcgtcgaagagctaaagaaagagaacaagttcgaccgctatcgcgtcttcgtccgcggcggaatctggaagaacttcttcttcaagtacccggagagcaactacatgcacaagcgcatgctgatggtgagtaaggccgtgagaaacaaccccgaggcgagggaattcatcctcagggcccagtgcaacgacgcctactggcacggcgtcttcggcggtgtctacctcccgcacctccgcagggctgtctgggagaacataataaaggctcagagccacgttaagacggggaatttcgtgagggacatcgacttcgacggcagggacgaggtcttcatcgagaacgagaacttctacgccgtcttcaaaccagcatacggcggagccctcttcgagctctcctccaagagaaaggcggtcaactacaatgacgttctcgcgaggcgctgggagcactaccacgaggttccagaggccgctacaccggaagaaggtggtgaaggagtcgccagcatccacgagcttggaaagcagattcccgacgagataaggcgtgagcttgcctacgacagccatctaagggcaattctgcaggaccacttccttgagccagagacgacgctcgatgagtacaggctgagccgctacatcgagcttggggacttcctcaccggtgcttacaacttcagccttattgagaacggaataacccttgagcgcgatggaagcgttgctaagaggccagcacgtgtggaaaagtcggttaggctcaccgaggacggtttcatagtggactacaccgtcagaagcgatgccagagccctcttcggcgtcgagctcaacctggcagtccacagcgtcatggaggagccggccgagttcgaggcagagaagttcgaggtgaacgacccctacggcatcggaaaggtcgagatagagctcgacagaagggcaaaagtctggaagtacccaataaagaccctcagccagagtgagagtgggtgggacttcatccagcagggcgttagctacaccgttctattccctgtcgagggagaactcaggttcagactccgcttcagggagctctgaactttattctctcctttgccttttccgccttctgcttccctttcagtgctatcataaatgttagagcctcaacactgtcttcaaggagcagacccctgttgtccttcgctatcaagtatccaaataccagcccgaaaatcgccccggcgacccaaagctccaggaggaactttcctacgctcccgtgcgaaatcgttacagcacttagagtcttgtacgccagcaacatggcaaatgggaacgccgcttcgagtattagagaaatcctgacggctttttcaaggatgcccaaaacccttccctctgccatctccttgagaatctttccatcgtggctggagtagaccaggagcctcgttatgttcgccccgctccggaaggctaaaagaccgaagaccgcgccgagcaggcttgcatccttcagcttgaaaaaggcccagaggccaatgatgacccagattggggtatataatctctctacacctttcttttgattctctggaacccggacgcggaggagcttcttcaaaactttgccagccatccgctttgcaaaaaggattggcttgatgaagaggttcgcaagggaaaggaatatcaagatataaaccgccaccagcgtccagatgtccattaagtccaccgcttgtatgtttaggagtgctgaaaataaattttcgcccatagatgttgctcacagtctaaggtgactgagttttagggtcaatcctgaaacgcatctccctcacaggagcctctccctcttaactacaggtgccacttctctagcgactctcttcgcgctgaaaagcgtcaatgggtccatcgtcctgtatatcgcaagctggcagccgcttatcctcacgtctatatgctttttggcttccatagccgccttgagaaactcccttatgctctctgctctctcgaagtccagaccggctttcttcagtctctcaacgttaagctcgtgaatggttagcggctggagcatcatctcgtctattccgagggaagcggcgagctccgctatcttcggtatgtcctcgtcgtttatgcccggcatgaagatggtcctcacaaccgagcggacggacttgtccgaaccaacgatcctgagggcgttgacaacagcctcgaaagtgtccgcgtttgtaatcttgaggtgcttctctctgctcgcggcgtcgaggcttatcatgactaggtcaaagtcaagctttgcccacagctcctcggtcaggagggagccgttggtctggaggtctaacctcgcattcggaaacttctcgcggagcatcctgttaacttcgactatgcgcgggcttatcagcggttctccatactgggagacggttatcgcgtaagggttttcccacccgtagtagcccggcttcggtgccttcccgagcttcactgcgacgtttgaatagcagaagatacagtcgtggttgcatgcgggagtcagctcatagctcggatggtgaactggattagggttatttaaatcaagaccctggcagccctggcagtgagttggaaacttcaaatccatcacgaactgttttaggagtctcgcctctttgttctcgagtatctggggctcgacacccatgctcctcgcaaagtcttcccacctcatttttatacccatcttctcaccgggaagagcagaaaaagtgggtttaaaaaggtaattggtcacagaagtccaacgagcttttctccctcaaagacgggcccatccctgcagacgagatatttcccgaggttgcaggagccgcagacacctataccgcacttcatatacctttccgccgatatctggacattcttgtagttcattactttcagcacggccttcagcatcggctccgggccgcaggcgtagacctggtcgaactcttcccttctctcggcgagcacttcggttggaaagcccttcctcccagcggagccgtcgtcagtcgttattacggcatcgtccacgtagttctcaatgtctaggagagaaagttcgtcctttgagcgggcgccgtatataagggtcatctgcctgaatttcccctggttcttctttgcgaaagcatacaggggcggaatccctattcccccgccgacgagggctactttttcgcccctcttaatgaatccatggccgtagggccccctgatccaaagtctgtccccttctttcagctcaaacagcttggtcgtgaagggtcccacgcgcttcacgactatcatgtcttcccatgctaggctgaatggcttctctccaacacccggaagccaggccataatgaactgcccgggtgcgaactcaatgttctcgttgaacctgaaagccttcacgtcctttgccacgtcccatacttcctcaatggttaccaccctgtacatccagccttacccccttcggctcctcaatgatttcgtccccttccataacgaccattcccctgataacggtcatcacgacctttcccttcagttttttcccttcccatgggctccatttcgcctttgtgtagaactcctcgggcttgactttccactccttcttcgggtcaattatcgtgaaggttgcttcattccccagtgagaaatcgcgccctttgatcccaaagaacctcacggggttgtcatgcatcttctcaacgatgtcaaatacagttataagtcccctgttcgcggcgtccagaaggagcgccacctcagtctccaggccggggattcccgctgcgcctgcttctttgtcctcaattgtgtgcggggcatggtcgcttgctattattggtattctggagaagttttcccagagggcttttcggtgctcttcacttctcagcggcgggtagacctttagcaaggggttcctctcaaagtcttttgaagttaaaaagagatgatggggagttacctcgaagcttacccaggggaggttctttttgattattgcctcaattccacccacggttgacacgtggcatacgtttaggggcttcctcaacttttcagcggcagtcagggctttctttattgcccgaatttccgcctcgggaggccgctcagggttttcccttatggtctctgggtcttcggcatgaacgctgacgattccaggggcgcatgagtagtcgctttcaaagttctccgagaaaatcccccccgtcgaggctcccatgaatatcttgtagaaatccgccctcgcccgggatgcttccccacagtttccggcgaggagaaagcttgccgcgtagtctgaataggcgtgtttctcaaggatactcaacctcttttcgaaagttttaacgtccatgatgggaggctttgtgttcggcatgtcaaagaccgccgttatgcccccatggagggccgccttagtaccgctttccacggtctccttttccttctgttcgaaatccctcaggtggacgtgggtgtctatcaatcctggtagtataatctcgctcttgaaggctatgacttcttcacctttaatgtctctcctggagatttctgttataaggccgttgtctataccgatgctccccccgactatctcaccgttcagtacaaaccttccggacagaaccagctcgtgcatgagtgcccacgcgggcttaaccttcccaagttttaagttttttgctcggatttctccgttcgtaccctttttctggttttcttcaggaagtttagttcctttttgcctgtagattgaattacagagttttgaaaatgcttttaatggaaaatatgcggcgcaattatattataaagcgtctttgttcgaaatatgcgattgtggggcttttttcagcccgtttttctatccgctcaaagtttctaacgtaacccttaaataggtctcgaatgtatagcatcatgccattacacgccgtatatggcaaatgctgctataaatttgaaggaggcagtggaatatgagtaggaaagtcctaggcctgttcgttatgggcctgatgctgtttagcttggccgtggtgccaagtgtgaagccagtggctgcggcagacagcgacagtgttctgaagacagtcatatactcttcaagcggcgctctgttcatgggcgtctggaacccgagttcttcaggttacagtgatacctactccaggaggattgccgaccttgtcttcgacagcggcatcccctatggaattgatggtgtcccgcacccgtatcactgccacgttgttgactacaagtccgatgtgaccgttccggaggatgcggtcatctttaactcaaccacggacacatgggttgccgctcacgccggcgaaactgctaagacctacgctaggattgagtgtgacaggccgtacttccacgacggccacaagctcagcgcggccgatgtgatgtacagccttgcttggagctgggagtggaccacccaggacggcgacgacgacccatactacgacgccagtgaggccgactggagtggcgagtacatgaacaccattctcggtatcaagctcgtcgagcagaccgatgacaggatggtcttcgacgtttaccacaaccactacttcccggccagcgagataatgactgccgcttacgttgttccgttcaccggaaccccctggcagctctggtatgcgatgagcgagctcgtcgcccacaaccccaagtactcctggagtgagtccagcgaggacgttgaacagcttgaccagatcaacccgagccacgctcaggccataaaggagaagcttctcgagctcaaacagagcaagccgattcctgagttcctcaagccgtacattgaggacgagaacgccgctaccgccgcttacgactcaatagccaaattcattgacgagcacaatcacgccgttatcggccagggtccatactacgttgacgagtaccagccagagaacctcttcgttaggatcaagaagttcgacaagtggaccatcccggccttcgccgagccggagtaccaggttgatccatactacaagaccattgaggtttacggtatccagaacgaggacactgcaatcctcgaagttgccaacggccactacgacattctctggtacccgttcgcggcttacaggttcactggcctgagcgacgagcagagggccaacataaagctctacaggagcacttcagcgtttggtgacatcgtctggaacccggttcacgaccaggacaacccgtacgttattaccgttggtgacaagaagtacttcaacccgttcgccgtcaggaaggtcaggttcgccatccagtacctcgttaacagggcttacataacccagaacatcttccagggaagtgccgggccgatgttcactccgtggacatcaaccgagaccggctttgaatacgttaggccggtcgttgatgccttcggcctcaccgagcagtctgacgaagacctcgctatgaagctgttcgaggagggcatgcaggaggctgctcaggagcttgccaagatgggctatgagctcaagaagggcgacgacggcaagtggtacttcaacggagagccggtaaaagtcgttggtctcggacgtgttgaggacgagaggaaggacgttgccacttacatagttgaggaagtccttaagaagctcggctttgacgctgaggctaagatcgttgacagaaggactgctagcggtacggtctacaccagcgacccgagctcctaccagtggaacttctacacagagggttgggtctcctcaagcaacgtgaagttctcaacgaccaggatcatccagtactactcgagctactggtatgccccaggtctcgttggctggaagtggactccggagaacacccagagggttacacttgaggaggttctcaagttcctcggcaacggtgacattcaggctggactcgacagccttggactcagctactacaacaccgttgacaagattcagccgctcctcaactggaccgctgatgacttcgcccttgtaatatactctggcgaggccaacggcgttaagatggacagtgaggataagtactgggacttcaacaggctcggaactgccattggaatatacgagggttacaggaccttcctctacgagaactgggagttctacgccgccagcaaggatatcgagattaagctcgttgacccggtcgcgggccttgcctctgactgggctataaggagtgctcgccccgttggcgagactaagactgagacccagaccacgactactacctccgagaccgagacctccacccagactacctccgagactgagacccagaccacaacgactgagaccagcgaggaaggcggtggaatctgcggtccagcattcctcgtcggccttgcagtcgtgccactcctcctcaggaggagaaggtaaaggggctctctttagtttccctttttagtttctctttaaatttccaccttctctgtgatgggcttttctctgaacttcattggacattcacaaaatatttataaagaagctttacaaagctgaaaaagacgatgactaaaaatgagtcctggcgtccaaaaccgctaaggagggaactccatgggatttggtaggtacgtgctgatcagaatattgaatgcactgatcgtcctgacgctggttactctagtcatgtctgccctattcgtgaaagtcgctgagaaagaccttcagaaccgtataatcgagcaggtgaacgccgaattccaggcccttcagaagcagggaagagccccggaaaatcccgatcagtggagggccgagagaatcgcttattataggcacgaatataagcttgaccggtcttacgcatggagagttatgtactacttcaagcgcactataacgtttgacttcggaaacactaggaaccccgtcttcggttctgagagggacgttaaggcaatcctaaagagggccataccgagaaccatacagctgtttacaacggcgcagataatcataatcttcctcggaatccttctgggtgttaaggctgctcagaaggttgggagtgcctttgatagggccctttcagttctcgccttagtgaccagcagtatcccaatgtggtggtttggaatgatcatgctccttatcttcgcgtttgagctcggctggttcccggcgaggtcgatcccagaccccaatctgactggatgggcccacatagttgacatgctgaagcgcatggtcctgccggttgccacaatagtctttgtgtcctttggagcctgggcatgggttataagaaacatcatgatcggtaccatgcaggaagacttcatcatggctgccagggcaaagggtgttccagagagaaaggtaatctacgggcatgcccttagagccgccgctccccctgtcgtgaccatgattatcatgagccttctcggttcactgggaggtgcaataatcactgagagcgtatttacgtggcctggcatgggtagggtctactggatagcccttgagaccaacgagacgaaccttatcatgggacttacgttcgttaacgttattctttacctcgcgggggttatactcgccgaccttacgtacggcttcctcgacccgagagtcaaggttggtgcatcccagaatgtgtgaggtgagaaacaatgcgctgggtagacttcaaggagtctttgtctgaattttgggctgactttaagaggcagaagactgggttactcggtatcttcctgcttgccctcttgatattcacggcattggctgcaccaatacttacttcccctgatatcccagagaaatggaagacgttctggcttgacaacccgaagaacgtcccgcctacttgggttaatgttttctccagtcagaagctggcaccccacctcgtcctcgaggggagtgaacttcagaagtacttgaagcagactgactctggatacgttattgaaattccgtacaataatgaatacgacgttcccccccaggacatagtctttaaagatgttgtcggtaagtccgagggtattagaaagccaacccttaccgttaaagtgaagagacccgatgggacggaagtagtgctcctccagaactacaagttctcgggcaatacggtaatccagcttggaactaaccccgctgttagggacgcccttattaggtgggttaagagccagggtattcaaattgatcccaccaaggagttccagtacaagaccctcatggatgccacaagggttatctttggaaagctcaatgagaacatccttgaaaagcccgagcctctccaggggacttacacgttcatatttgaaattaatgttccgaaagatgcaagtgtcgacctagacaacgcgaagattatattcactggaagaacctacgggtggcttggaactgacttcaagggcagagacctattggcgggtatcatctggggttcaagagtctcccttgccataggtgtgtccgttgcagtgttcagtgtgctcattggtatattctacggggttaccagtgcctactttggtggatggacggatgagatgatgatgagattccaggagttcatggcttcaatcccgagcctgccgatcctcatccttatgggtacgtactttggaggccacatttcgctatggcagatagtactactgctggtcgtgttcggatgggttggagtcgccagggttgcgagaagtatggccctccagatcaaggagcagacttacgttgaggcggccagagttctaggtgcgagcacaggcaggataatcttcaagcacatggtgccacagctgctcccctacgccttcgcaagcatggcacttggagttccgggtgcagtgctttcagaggcttccctgagcttccttggtcttggtgacccaactgctgtcacttggggacagatactccacgatgctcaggccgcaggagccgcaacgaacggttactggtggtgggttcttccgcccggactggcgatagccctcgtgggcttcacgttcgttatgatcggtacggcactcgatagagtcctcaatccgaggttgaggaggatgtgaggtgatagacaatggcaaaaactgtccttgaagttaagaacctcaaaatgtactacttcacgaaccgcggagttgtcagggcagttgacgatatcagctttgagctcaggaagggtgaggtgctgggacttgccggtgagagcggttgcggcaagtcctcccttggttttacccttatgggaatgcccactcctcccggcaagatcgtcgatgggagcataaagatcgatggaagggaaatcgtgggtctcccggaggatgtgttgagaagggagatccgctggcagaagatttcaatgatattccagggtgcaatgaacgccctcaatccagtgtacactgtaggctaccagatgatagagccgctgatataccataaggggatggagaaagaggaggccctagatgtagcacagaagtatcttgagctcgtcggtcttgatccagagatagtctaccgctatccccacgagctcagtggtggtatgaagcagcgcgttataattgcgacggctctcctcatgaacccgtcagttgtcatcgctgacgagccaaccactgcactcgacgttatagttcaggctcagatcataaacctcatgaagaaactgaagaaggagctcggtctctctatgatattcattacccacgacctcagcatcctcgcagagattagcgaccgtgttgccataatgtacgccggtaagattgtggagatcggcgacagcgagaaaatatactatgagccggcccatccgtatacccagaagctccttgcagccatcccaagactccacgaggacgtcgacaggctcgagttcataccaggtcagccgcccaatctcatcaacccgccgaagggatgccgcttccacccgaggtgcccgtatgcaatggacgtttgtagggagcaagagcccggaatgaaggagattgataaggatcactatgccgcatgctggctgctgtgaggtgtgaaagatggcggagccggtacttaaagttgagaacctgaaaaagtacttcccgatcaagaggggtttcattgagagcctgaagggagccccacagagattcgttcacgctgttgatggagtgagctttgagatatacaaacagcaagtctttgcactcgtaggtgagagcggctgtggtaagtccacaactggaaagctcatcgtaaagctcttagaaccgaccgatgggaagatatacctggagggcagggacgttactgacatcaagaccaaggaagaaatcctggcgtacaggagaaaggttcagatgatattccaggatccatttagttcaatgaatccaaggttcaggatcttcgatgttcttgaagagcccctcctaatccatggcatcggcgaaactagggcagagcgcgaggagttgatatacaaagccctcgagatggttaagataaccccgcctgaggactacgtcggaaggttcccgcacatgctttccggtggtcagaggcagcgtgttgcaatcgcccgtgcactaatactgaatccgacctttatcgttgcagatgagccagtctcgatgctcgacgtttcgatccgtgcagaggttcttgagctcatgaaggaactcaaggagaagactggcgtcacctacctctacatcacgcacgatatgtcaactgcaaggtacttcgccgactggatggcggtgatgtacctcggaagaatcgtcgaaatgggcccagccgagaaggtcattgacaacccgcttcatccgtacaccagggccttgttggcagcggttcccgaaccaaagccggagaggagaaacgtcatcaaggaactgccgatcaagggtgaggttccgagcgccgtcaacataccgccgggatgccgcttccacccgaggtgtatctacgctcagaagggcctctgtgatgccaaacagccgcagctcatagagtacgagcacaaccacttcgccgagtgccacctcgttggcaagtattgaaatctttttatatcttcttcattattccttctcggtgaggctcgtgactacattcaaaaaaggtataacttaccccccaatactagccggtctgattttgctgttcctcgctctcatcatgtcgtttgcggcatcttatagaaccctggaaaaaagcgaatggcatggtgttcttggcccgggtaaccatacaatcgaggaggggaatttgtactcctacgatgtcgttaatcgaaccctagtgatgtggtctgataatgcgtcagtgcttctgtcccttggtggagaagaccttgagtacgttttaaataatggaaacgttagcgtggacgttcaatcagcgccccaaataacggttctcgatggggatctggagtatgagtatgtggtctactggttcgactacccctattcgtaccttacttatcccgcgttctttttgatgataattggcggtgtgtttgcgtttaggggatatatcagcttccttgagaccctgaaggaagatatgaagaagcagaagggggatgcaaaaaatgagagcccttgactatcgtgccgccattgagactataaccagcttcctttcagaaaagctcgaagagagtggcagtggtgggtttgtgattgggataagcggcgggattgacagtgcgacagctgcttaccttgctgcgaaggcggttggaacagaaaatgttctgggcctcataatgccctactacgagaacaacgacgtcgaagatgcaaagctcgtctgcgaaagcctcgggatagactacgaggtcataaacatcaaaccgatcgttgagtctttcgtctctcagctcggctttcagccagacaaacgctctctgggaaacatcatgtccagaacaaggatgattcttctgtacgctcatgcaaaccagctcaacagactcgtccttgggaccagcaacaggagcgagtttctaactggctactttacgaagtggggcgacggggcgagcgactacgcgccgctgataaacctctacaagaccgaagtctgggagatagcaaagctgctcggcgtaccaggacgaataatccagaagaagcccacggcgggcctatgggaaggacagactgatgaggatgagctgggaataagctaccgccttcttgacgagatactctggcgcctcgttgacctcaagatgccgaaggagaagatagtagaggagcttggaataagcgtcgagaaggtcgaatacgttgagggccttgtaaggaggagcgagcacaagcggaggcttcctgtggggccggagttttgaggtgaaatcatgaagaagggctacctttttgtttttctggcagcttcgatgtgggggacactcggcatcttcgccaagtacttggatggctttgggctgacgccatttacgatggtcttctaccgcgtcgtttttgcccttcttctcctcggtgcatatatcaagctgaagggtatcggcttttcaatcgagcgctcgaggctcaggttctacgccctctacggcttcttcagcatctttctgttctacaccctctacttttacaccgttacgatatcctccgtttccttcgccgtcctcttgctttataccgcgcctatgtactcaataatcctcggcaggctgatcttcaacgaaaaaataacgaaagagaagttaacggcgctggttatggtcacccttggtgtgctttttgttaacggatctggtgcttcattctcgaccaaagccctggtctttggtctcctttcgggctttacttatgccctctacggcatcctggccaagttcgcggttaggaaagaagagcctgaaaaggcgctcttctacacactgctgtttggtatgatattcctcgcccccttctcagattttagtgtacccactggagcaatcccctacctctttgccctggcactctttccgacgtttcttggctacgttctctacaaccacgccctcaaagaggtggaagttagcagggccagtatagtggcaactgtggagcccgtcgtggcgatttttctggctttcctcctcttcggggagaagttaagtctggttcagctactcggtgcggcgctcataatagggggttccatcgtagtgcacatgggagaaaaagaagggcctgagggagcccatcaaacgtagaagtacctctcaagctcccactccgtaaccttcttggtgtcaattgggatatcccttgagctcaggtattcaatgtattcttcccactccctctccttgtaatcgatgaagttcttgtaggctccgccgagtgcttctctgactgtcttatctttcttcagctcctccagtgcctctccaaggcttcctgggagggtatctattcctagtctttctctctcggcatcgtccatctcgtaaacgttggtctcgacgtacgagtctggctcgaccttcttctttattccgtccagtcctaccataagaattccagcgagggcgaggtaggggtttgcactcgggtctggacagcggtactctattctcgcaccacttcccttgaaagctggtactctgatgagggcgctcctgtttctataaccccagctgatgtaaaccggtgcttcataacccggcacgagcctcttgtagctgttgacggttgggttggtaagggctgcaagggccttagcatgcttaaggattcccccgatgaagtgtagcgccgtgtcgctcaggccgtcttctccaatgaaaacgttctcaccgtctttccacaggcttatgtggaggtgcattccgttaccgggaaagccgtagatgggtttgggcatgaatgtggcgtagtagccgtggagctctgccaccgctttaacgacgtgcttgaagcttactatgttgtcggcggttctaagggcttcgtcgtagcggaaatctatttcgtgctgggccttcccgacctcatggtgcagaacctcgggctttaggccgagatacggcatgtagagtgcaatctcccttcttatctccctggctttgtccaagccaaccaggtcaaaatatccgccgctgtcggggatatgaagttcccatgtgccgttcttcttgaagatgtagaactctggctcggggccgatgtgagcttttagtccttccttctccagcctttcaaggactctcttcagaatccccctgggatcggcttggtagggttcatctcctttatagatgtaaccgtagactcttccaatgccctcccacggtatttcggcgtaggtgctgggatccgccttgaatataaggtcgctgtcttctattccttcgaatccaggtatcgaggaaccgtcgaaggataccccatcctcaactgcctcctcatagcgctccattggtatttccatgccctttagcgacccgttgatatccgtgaatgccagcagaaggaacctcggccttgggacttcgacttgtaccgccctctcaattcccttaatttcgttcatttttatcacctattttgtgaacattagtccaatattaacacagtttaatggttgttctttcaaatttaactttttctgatgattgcttgtcacgatgacaaaatgaactcccgcggctccactttttacgttgggatgtcaataacaattgaaaaaatgccaagtgtttaacatttaaatgttaaccaacgtttttgaggatgtcgcccttatcctcaaacatgcccacggccgaagacctgctgaacaaagaaataatgagagtcaaccttcatctgccgaggcagagggtaagccttaacgaagcccttagaaatggggacgggtacgtcatcctacgggacggaagcatgcactattttaggtcgtctgagcttgaatacctatccgacatccttgaggatgatgaacgagagaagctcaaactaccgataatcctggagattagcactgtggataggggttacttcagggttaggggaaagattgaagtgaaggtaatagaaaccatccttgggcagttcgatccgttagaagagaaatcggagggcaggtatcccaggtatctccttcctaggataaggagaatcctcccaacgacgaccacctacgcgttcataatggagtgatggccatggacgaagaggagaaggtttttctcaggtaccttatgttcaccgtgccgcacgccactgtcctcgctggggcattgctgggagtcctgctggtgcttaaagtgagaccagaggtagccgctgggatattctctcttgtgtatggtactattttgatgatcttagcggcagtagttaaagaccatttctcaaaatctcccctctacaagatttttctcagtataacactattcctcgttggcggaggcgttttaattttgttaaacgtgcgctaatgttttatattaaaaagcctctaataatcccaggtgattgtcatgaccattaaggcgtctataatttcactggtggtcattgctatactcattatcccttatgtttcccctgtgctctccgagtcttcttccgacgtgcgtataatcgttgtttccggtgactattctaagggtgtaataccgattatgaatccaaccggggtggcctatgggcggacataccttcgtgctctctgggttgagtctcagaacggcagtcaggttgagggtatcaacgtaacggttaccccattaattcttgggggctggaacagagatgaggtcgttgaattttcatactatataaattgctccgagcaggttcccgctggaaactacagtttgaagcttcgttttcttgcgactctcccttccggcagtttgaggacgttcgttgtagcagttcccctggaagttctttcggtcccaataagcgttggacaattgagtattcagcctgaagacgggacagtcttcataggggattctttagtagtctattccccaatatccaatctgggtcacaaaaatgtaagcatcaatgtcagtctttcagttaagggtgttaaagagctctattccgtgtccaaaagcatggtcgttgctccaggctattcatcgctggtttttgagattcctattgactcaaagtattccgagggggagtacacggttgagcttgctgtcaggtgctccactacttcagtctcacggctaaggaagtttaaggttcttcttggtgtttcggtagtttccgtctcccttgaaaaagatcatctctatttaaatgacattggacatctgtacataactctgatgtccgtgagaaatgcaaatctaaccctcgttgcaagttattataatgagaatcggtttgtgaaaaatacgactatcccagtaactgcggcggaaggtacccaggtcgttagagttccgttgctgactgagattccggggaactatacacttagataccaggtgtacctctttggtgtcggtattgggggtggcgaagttcattacactgttctgagtcctccaagcattgcgaacgtcagtgttgtcagagatgagaagggaatagtgttcaacattcggacgtataattcagattcaaaaaaatcgggagttcttctctacaatgtaacaattgatggaacagtttcttactcaggttctactattgttgatataccgccaggaagcgggttggtagttcttaccattccgctagataccgctgggtacgttgcatacaatttcacactgaaggttcttgagtacacctcttcatattctggggtttgggtctttcctgcgcctgaagaaacaaacactcccactaccacaacgtcatccaaacccatcaccagcactactccaactccagaatcgagttcatctgttgaagaaacctcctctacccgcggcagcgcgttttgggcggcagttcttttggttattattcttgttgcctcatttatctgggtcgtgtggcaacgggagttcagctcgaagagcaaaaggaaaaagagaccaaatccaaagcgccgttctcccctaggaaggttcaagaggcccaaaccgccaaaattcaagagctttaaatcgcttccgaagaaaaggtgaccaaacctttttatttccacccttttaacgttcttcaggcgagggggtcgggggctctcggggtactcccgaggaagttccgcccaccgcaccggggccgcggtgccgcaaggcaccggccgagaggccgggcaacggcgcagaaacgacacggccccccggatatggggatgaaagcggtgaagggcccggcgacggtgcccgagctaacccgcagacgacccggggggatgcggtgaaacggccgtcccgcggggtgcaaggccgagggaggggcgatgagttcccggtgtgagccccgtggtaggccgctcagtcgaatgcccccttgatacagaaggcgggctacggccccctcgcctcatcttctcagagcatccaaagccgaggcaagaagtataagcactccaccgattaccgttctcgttccaggcacttcaccaaagacgaggaaggcataaactacagcactcgccgggtcaagatagctcaaaagagccgcgtccttcacttccacttccttgaggccctccatgtaaagaaacagcgcgaaaaccgtatggatgagcacgagtacaagaaccgtccaccagactggctttccaacgtcttggaggaggacaaaggggaggaggacgaaagaagcaattcccagctggctgagcgttaagatttttccgtcaacttccttcaagaacctcccgagattgggtatcatagcgtagaagaacgccgccgtgaacgcgagcaggattccaacgaagtccctgttttcgaaacttatctcctgaccgctcattatcaggatgaggcctaaaaatgctagaatgataaggctcagcgttttcctgtctatagtttccccaagaaaacgccaggacatgagagtggcaagaatgggtgcgatgtaatataccattacggcatttgctatggttgtgtagttgaaggccgtgaacaggaacgcccagttgagagccagggctgtaccaaggccaagcagcggtttccagttgcttcggaaaatcatggggagctcccttagcaactccattctggttaacccaataaccataaacagaaccaaagcacccaggaaaaccctggcaaaagcgactccaagaccacttaggccggataatcttccgaatattccaacactgccccatatgagcatggaaactactacttttgcccttccgttcatccctcatgtagctccttccattcttgataagctttttgcacttcctcttttctgaactctggcactgcatccttaaaggggtcgaacttttcaagtctcttttcatcgcttccgatgtaagtcgcgaccagcccaactttggagtggagagttgagggaaggcggagtattctcttcaggtcaactgtgaccctaccatcgaaataagcctttgaaaacgtcgttgagagcccgaacagtctcagcaacgtcctgtatccaacgccctctggaaatgcggcaagcaagcctttgttgacgaacttttcaacgatatcctgtctggtcttttcatcaaggagcttttcggccgttgatctcttaagcccaatgtttttgaggtggttttcgtttattctctggataaagtacccgaacctcagcctgaaaaccctgaaatagccgcttgacagcattatgtacctcttctggatgtcgtcaaaagttacctcctctgccgcgctgacgtaggagagtatcctctcgcgggctttggagtcgagcttgagcgcccactcatcgatcaccctgatgtggtatcccctgccggagtataccacgtggatattctcaaacccgaagtcctcctttagaatgatcagtgtatctctggcgagctcctttgcatcttcgaggcagattgggcacacctggccggagggatgctcgttctggcagcgtctgagcggaaggtctttggcatctatgtcaaagacgagttcagcgccgagccagccttccatttcctgtggattcctgtaaaaggcaacgctggaatacgcggcatatggagcggtcgcccttatgtaatcctcgaggtctctgacgtctgagaatgcgttctttctgtcacttggaccctcacccgtgtggtcaaagccgaattctctccgttcaatgctctccactatgaactctggcagcttcttggcgtcccattcccctgagtagtagagcctcctttcttcgggcgttacttccctcaacagcttactcactggtctcaccttccttcttttttccctcaaggtagagcctcttgaggtagtagctcaacgggttctttattccgcggcagtacttgtccggtttgcacagctggggtgcgtttgcccggatcttgtcgcagtttgggggaaagtaccacgttgagtttccgctgtcctccattgttgggctgtcggtcagaccaaagccgaggtggtaccagatgttctttatctcatgaggctggtcttcgaagagcggcggtttacagcggtttccggcctctattatgaccggcagtatctcctcttcgatgatcttgaggtcgttaatgcagtcttttatcctgacgtcttttttgggtggattaggacagattcttgcgtagctgaggaaactcgtcagaagcacggttatggcgtagtttctcatgcccgcgggcactcccttgagcgcttccttaacgcacggggggaagaggtcgaaccttagcggtgatgcagtccccttgaacatctctcccctctctttgaagtactcctcagctatttcttcgagtttctccctgagcctgtggtagaattctgggagttcatccctgtactcgtagaggatgttaacggccctctcgaaccttttctcaaaggctttttcccacatcttcagggcggtttcccatctgaggtaggcgtatccgtttcttatatacacctccttcagagagctcccccacaggtttagaaggtcctttatgggtatcttgtattttattttcagcttctccttttcctcgggggataaattcctgtccattctcctttcaaggatgttcaggtcattatggggaatttcattttctcccacggggacaacgggcaacatggtttcactgagatttttagaggcctttattctctcggaatacagccgcagggtagccctcttgacgacctcggcctcaagcccgtagggagatatggaagccgctccgaggagagcataaaacttgaacagatcacggagttcctctaggttgtctacctcaacaagttcttgcggtggattttctgattcaagcatccagcttactagacttatcggttcctcaactgaaatggcggagggtacccgctccagaagggccagcaggtccccaaattcttcccttatgaggctctccgctctttttccaaaggggtcgagcatactcccacctaatatgggtgacataatcaacaataaaacggtttcctttttgggaggtgcacaataatgtactgtgaagacaataaaattccctatggtgtctgaacatccaaaagttttatattgtgatagtttctaatacctagcagttagcgaggacttatcagaatgtaatcatagcaatatcgcggtgattggaatgaccggtgaatggactgttcccagagtaaaaagcgggattcctgggttcgatgagcttgtaaacggcgggttccctaagggtacaactgttcttgtgactggtccaacgggtagcggtaagaccacctttgcagtccagtttgtctataagggtgttgagctctacgacgagcctggtgtcattgtgacacttgaggagcgtgcagtcgatctcagaagggagatgcgcgcgttcggatgggacatagagaaatacgaaaaagagggtaaaatagcaatcatagacggtgtcagcgccgttgttggcctcccctccgaggagcagtatgtacttgagggcaaccttaacaccgaggacttcctcaggtacatataccgcgttgttaaggccatagatgccaaaaggcttgtaatagattcgattccatccatcgcgttcaggttaaagaaagaggaagaaatcagggaggttctgctccagctgaacacgatacttcttgagatgggcgtgacttctatcctgactactgaggcccccgaaccatccagggggaaaatcagcaggtatggaattgaggagtacattgctaggggtgttgttctccttgacttcatagagcgtgaggttgagctgaagaggtatctcctgataaggaagatgcgtgagaccaagcactcaatgaagaagtacccgttcgaaataatgagcgacggactcgttgtgtacccgagcggtgagatatactgagccgtctctagtgaacggcttccctttcgcgtaacgttttagccggttagtctgtgttttgttctagctagtgctcccttttttcaaaaactttttaaactttcgagtgattacttttttgaagagttatgaagtctaaattagttattgttttgttgatatcattaacaatagtttctcttgcgcttattcggctctctccacccggcggggatacgtttaccgggttgtgtgtatattcttcgcccagcttctccatcctctacaacggaagtcaaaccgttgccgttggtaaatccctggaagttgggagggtttacacggttcacggccgtttaaggaggaccaaccggggcctgtggatggacgtttcatcgtttgaaacctcactccccgactttccactggagtcaattgagggagcgtactggacagaaggaagtccttaccttttgacacctgatagggtgtatctggcaactccaatcaacgcatccaagggtgagctggttttagtgaggggtctagggtatggcagtaagttctatcctcttgaagtccataggcgcggattttctgcatctcccaagaacgggtttccatttgtggttgagggtgtggtcatgtctattggccgatacatatcaatctggaacgagagtgaggagttcaaagttttgaagttaaggggcgtggaagtttctcctggccagaggattcgagtagctggtattgtcaaagttagagattacatctacctttatccttcagaacccaaggatatagcacttctagggtattcgaagcttaaacctctctggaattcgtccattggcgatatcgttgaagcgaagtgcctcgttttggattcgggaagcactctaaagctcaactgcactgacctgagactctacgggtttaaagctagagtgggggatgttgttcacatcagggctttgaggagaaagtcttctctcctgtgtctgaactgctcggttgttcatcccagagaaaagctgccaaatgagctctgtgagtactcgccggggaacttcgccaagatttctggaaccgttacctgggtgaagaggtatcgcaacggctttgggctggccaacgttaccgacggaaactgctgggttctgctcaagctccccaagtcccttggggtatctgtggcttctggagagaacgtaactgcctacggctttttcacgacttaccgggaaaagccagcatttgaaattcagtcgggtgaggatttatgctcagggatctcctgctaggagtgctctttggaacttttactggtttaacgccgggaatccacgtcaacactctagcagttctgctcaatggtgcactgttgccttcactcacgctgtttgcgatgggactcacccacacatacctcgacgcgtttccctcaactttccttggaattccggatgagggaacggccctcagcattctgcctgcacacagactcgtccttgctgggaagggaatggaagtcataagaatagcgctgtattcgagctttctggggacgctgtttttcacccctctggttccactgtatctcgcgatagcacccatgtacactttcactattggcaaggcggtcgttttgctcctgatgattctgctggtgctaacggaaaagggcacaaaaaagctctgggcggcgtccatagtaatcctttctggactggtcggacttatgatcctcagaatttccctcaacgaaccgctttatcatcttttgacgggtctgttcggagttccagttatcctcattgcgttgttttacgagacgtccgaggtatcgcccggaagtgctgaactggagatggacactaaatctctcgtgttattttcttttatgggaacgcttctcggtatgatcgcttctttggttcccgcgttcacatcatctcaggcggcgcttatagggtcgtttttctcaaaggacgagcgctcttttctggcggttgtctactccacaaacacggcaaacttcctcttttctctggttaactttctcgaaaccgggagggccagaaacggtatcgtgatgaggatgtccccaatgggtctttcgaccctttacacctttatcctcgcttcactcttcgttgggattttggtaatgctctacggtgaagttatctcaaaaattctggcatcgattgtttttaaaattccgtacagagccctcaaccttggtgttcttgtgtttcttataattctctccgcgtattttgacggagcctcgggaatcctagccctcgctgcctcctccatcgttggcattctggcggttctgctcggtgttaagcggaccaactgcatgggggctctgatggtgccagtgctcttgggttagattcaaagaaaaaagagtagagaagtgaaaggataatcaggctgacttctccttcacgagtttctggaattcggagtagtcggtaactatcttcttgccgtcaagggtctcgaaatagactttcttaatcttgaccttcttaacgtctgtatacttcatctcgggagggtcgtaagaacctggctcgacgacctcgtcttcaataacgtacgtcttaagctcgggctggccgacgtacttccagacctcatagaagacctcggggtcgaggtgtatctccccctcaatctcaatccagtcggctccgatgtcctccagaaactccttgactacctcgaagtgcatagaatcacccttgagattatagggtggcaatggttaaatacctatcgctcggccgtgttggaaggttttgaagggcttagaaatccagcaatgaaaagcaacagtttttaaagcccttgccttttaacgcaggtggtggtgagaatggcgagagttatagttgatgctcaagcagcgagggcaataggaaagggtgcgatgatagtcttcaagaagggtgtcgtgagaaccgagggcgagataaaccctggagatatcgttgaggtttacacgaggggcggcaagttcctcgggaaaggttttgccaacccgaactcaaacattatggtcaggctcgtcacaaaggataaggacaccgagataaacaaggagctgttccgcgagaggataaggaaggccaacgagtacaggaagaatgtcctcggctacgacaaagcctaccgcatggtctacggtgaggctgattaccttcctggtcttatagttgaccgcttcaacgaaatagcctcgatccagatttcaagcgtcggaatggagaggtttaagctcgaccttgccgaggccataatggaggccgagcccgaaatcgagaccgtctttgagaagaacaccggcaggagcaggagaagggagggcctccccgaaatagagcgcgtcctcctcggaaaggagaagtacaggacggtaatagaggagggcagggcgaagttcatagtcgacatgcgcggccagaaaacgggtttcttcctcgaccagagggagaacaggatagcccttgagaagtacgtcaagcctggcatgagggttttagacgttttcacgtacacgggcggctttgccatccacgcagcggttgcgggagctgatgaagttgtggcagttgacaaatcaccgtgggctatcaacatggtgaaggagaacgcgaagctgaacggcgtcgaggataagatgaagtatatcgtaggctcggccttccctgtcatggaggagatgataaagaggggtgagaagttcgacatcgttatcctcgatcctcctgccttcgtccagcacgagaaagacctaaagcgcggactcagggcctacttcaacgttaactatgcaggacttcagctggtcaaggagggcggaatactggttaccgcctcctgctcccagcacgttgacctgcagaccttcaaggacatggtcatagcggctgcggcaaaggcaggcaagttccttaagatgctcgaaccgtacaggacgcaggccccagaccacccaatattgatggcttcaaaggacaccgaatacttaaaggctctcttcctctacgttgaggacatgaagtgaggggctctatgtatggctttggggacgatgaggagaaagcacctcctctgagaccggcgtgagtgctgagacgcccacggtctgagtcccttccctttattatagtcatttagctgaccaaaattcgtctatattggtcattcaaatgaccaaatgatgggctttcttaggacttatgtagcaggaggctgtgcctccatctcgttccgaccttgaacttaacgtccctaacggagtagccgagctcttttcccttttccgcgatagcctctatcagcggctccttgtctggaaggaacagggcaactttgccccctgggttgagatattcaagtgcctcctcgatgagccttacggaaaacgcctcgccgtatcttcctccaccgacaccctctttttccgttaatactcctctcgtgggggcctcatagtagggtggcgcagagaagatgacgtcgaacctctctcccttgggaacgacacctctgatgattccgccgttgctcttgatgggcttcacatttgccccgttcttctctatgtttctctttgcgtattcaaagaattcctcgtcaagctcagtcgcggtaacgtcgcagttgaaaagcctttccgccatgagggccatcatagccgtgtgtcctgttcctatttcgaggactttttcgcctcccctaagaaaagtcttcaagaagaggtagcgcgagattggagttgtcacgaggcctttgggatgatactctacatccagcccgaagattgccctcgcaattgccctgttgtagagtattctggcttctctgtttgaaaagtcgagtctcccactttcgtcgatatatttcccaagttcgggaaagactttgagggcctctttaactggcagtccgagcttaccgtccttccaagtgggcatgggggaagttagtattgggagttttcaacctttgtggtttatcacttgtatttattgagaaaagttttaaattatgcaagcaattacgtactgatgataagcgtaatagtcaagcgggatggactgagaagggaatgcatcctggatagatgttggatttgccagaaaattggggtgaaaaggtgaaagggtatgtctaaaattccccttttcagattaatagctttgtctatttctctccttgtttttgcatcccctacggcatcctccgacattgaggtcataactcaaggagttcttccaacggagggaattcacatttccattggaaccctcccaaactcgaatataatattaatctcaacgggggagatcgatgctcacaacgacgtgttggtgcacccggacacggaaatttactggtactattatttgaactcctccggactgcactttcttggggcggagtgctacaatccaatgtacgttatgtgtcccaggttaagtttgaacgtttcagacaacctggcacgctttaagtcaaagggcagactagtcagtgggcttcatgaaaacggctttctcggcttcgattttggaaatgagagctacaaagtatccctttctgagatattgccgtatctctgggatgagggctggattgactatctctccggctaccgcctcaacgggagtttggtgttctttcccgcagtgaccatagagataactggagctgacgttaagtgcgtggactgtattccgggggagggcgcggtgtccgttcgattcaaacaactctacaacgttacatattacaccaggaactcggggacaacttggaagcgctcgaccattaaaaagtgaagtcctcgatcaggctggactcctcagcctcctcgaaagacagatctacgtatttttctacaacggtactcttcatgcttttgaaaccggtaaagttcagcttgagtattcaactgctaccgttaatgatggtaacctgacgcgtgttctagttgccccgcgtttccactattcaaaccttgcagccccagttgtattttatgggaatacattctcctgtggggatttaaaaactatggatcagtccgatttatgctggttttggtctctggtcgttatctttgtcctcgtcgtgtggcttgcttggaaaagaaagtagtggactatccatcctttgggttcatcatgcgccccatgaagagtattgttccagtctctctgtcgtagatgaagaagatgaacgggtggtcggccttgaagatttttggttctttctcctgcataggggcgttcatcgttagcgtaactgccgtcgccgcggccgcctcggttccgttttcggccacgctgatgaagctcttgtggacgacatcctctatcgctaggttttccccgttggagattccagagaaatccggcaccagaaatgctcttttcattcccatgtccatgagaacgtccctgagcttgtacgaagcctcgaacctgaacttcgggagggcaactttcaccttttcctcgcgcatgtttttcaggatgttctctatggagccagcgctcaggttgccttccaccttttcgaacttcccttctttgggcaggattatcagcatgcccagcctttcaccctcgtagggaagttcgagggcctgaagatcgtcgttttcaaaataagggaattctccagtctggtgcatcatagggacgataactgtcccgttgggagcgtggaaggtttcgtttctcgtgtcgcttgccctgaatctgctcgaccagtttgccttaaagtaaaccgcgttcgttatcacgagccttgtcaggggacttaagcccgatacgatgtcctttatcctgccgttcgtctgttcctcaacccactcatttatttccctcgccgcttccgcgggattgccctgaaagtctacttcctttgcctccccgaggtagaactccttcacaattcccagatactcctcccgtagggaatatcccctctgaacccagagtgcattgacgctcctgaggatgaaaggcgagccttcgggacttttcagggaaagtagaagatacctaaaacctgtccacctcgcatcatcgtcttcaggaagatgtaggaccctcttcatttcttctgcggtctttcctcttgctccctcatatgccatggcaagggccgtctcgatgctgaagggcgagaagaagacgttgttattgttccctgccagctctttgtataggtcaaatgtgaaggagttgatcgcgttaaccacaggcttttcctgcccctctttcaggacgtcgtactttgttgtgggtaaggtggagtaagagtccgatggatgtgatgttgatgggttatttgtgggcctgggattctccatctgaccgaggcatcccccaatgaaaacgagaagaactgtaacaagcagaactgtacgcctcatgcgatcaccaagattactatgggttgggagtataaatacatctcgattgtttcaaccgcggttaaagttgaaggaaaagaacatcagagaagcgccagcgctgccatgactttcgcgtcttccaccatgttgtctattttggcgtactcgttgggctggtgggcggtctcgtcgagcgtagcccagaccaccgcaggaaccccaagcttcctgaagaaggccgcaaaggttccaccgccgattcctccaaccttggcctcctttccgcggagctttttgatggcttccttcaggagaacaactatctcgctgttcggatccgttggagctggagcgtcgagcctctggaggatttcaacgtctatctcgggcagaactttgccttctatctccctcttgtgcctttctttaacctcgtcggcgagggccttaacgtcgttgagaatgtcatcgaggctgtaatccggcagaaccctgcagtcgaagacgacctcgtgttctcctggagctatgtttggagaatcggctggattctggaccatcgttggctcaaaggtgctctccggaggctcaaacagctcgtcttttttgttgtacttctcgtggaggagcttgtcgaggtggtaagctaagtcaagggcgacgcggtgggcgttaaggcctttgtcaggcatacttgcgtgaacctgctttcccctaaccttcagcttgaaccagaggatactcttctcagctacctcaatgaatgttccgtcctcgtttccaccgtccgggactaagactaggtcgtcctttctgaaaagctctggatggttctttatcagccactcaacgccgtagtggcttccagtctcttcatcgctgacgaaggcgaggattacagtcctcttcggcctgattccaaggttcatcatggctctgaccgcgtagagggaagcgacgaggctctgtccgttgtcctctgatcctcttccgtagacctttccgtccttgacgacgggcttgaacggctcggtcaccgtccacttgctcaggtctccgggtgggacaacgtcgaggtgagtcagaatccagaggcgcgggcttttttcgccctcttctccgtagtagtaagctagaatgctcggcctaacgccgttctttgccctctcatcgggggcctcgtaaacctcgaccctgtcaaagggccagtcctttattatctcgaggagcttctgggccttgtcgtactctccctcgccaccgtagtcggggcttatggccgggattttgatgagttctataagggtgtttaccatctcatcccggagcctgtcgatctccagagagactttttcaagaacttcgctcatggtaatcaccattttcgatttcttcattgggcttaataaacgtaatcagataccttttgtggaggttgagcaggaaaacaaggagacgctcgtagaggggttcgacttcgtccccaaagcgggtcttgagggcctttccgatttccctgaccgttctccgcccgtcgcagagctcccatatgtacgcacccacttcgtcgagttctattcttcggtaatccccatggagttttctcgcgagaaagtcaagcatcgagtccatggggatgaggaggtaatattttccgtcaatcttcctcagcttgatcttctcgtttcttactggaattaaattcaggtactcctccatggttattcctccgggtgcaaaattaaatcaaagaagtggaaaagagaaatcacttcttcttgcccatcatgtagagccagataacaattccggctaggaggaggactccaaggacgttgctggtgaacccgacgctcggcgctacgttggcaacgatgagggccgcgaagataatgcccattagggcctcaccggctattagtcctgccgcaccgaggactccagcgtcggtcatgtcctctccaccgttgcccttggctttgctggcgaagtgccttatcagaccgcctatgaatattgggacaccaaggctgagcggcaggtagataccgaccgcaacgggcatgacgggagtcctgaactttgccttcttcattgcgagtatctcatcaacgattatgagggctattgcaatgcctgcacctatgtagaccatcttccactccaggtttccggtgaagacaccctcggtgaccttggccatgaggaaggcttggggtgccgcgagggcgttttctttggctgttggtgttccggctattccgtaggcctctatgaggaggttgagcacgggagccataacgagggccgcggcaaacgttccaatgatttcaaagacctgctgtctcttcggcgtcgctccaacgaggtaacctgttgcgagatcctgcatcgtgtcgcctgctatggcagctgcggtacagataaccgccgcgacgaggatcgtggccaccatgccctcagttccggagaggccaagggcttttagcacaagggccgtgaagagaaggctcattatggtgattcctgaaactggattgtttgatgacccgacgacacccgcgaggtagccagctatcgcgcttccaaggaagccgacgataaggagtatcacggccataactgcggcaattccgattgagcctatgatgtggtagtagagcaggaacagcggtattgcaaaggctgctataaggataaggacgtagttgagcggaaggtcttcttcagttctaagaactgcctctccagcctgccttctctttgcagcctcaagacccgccttgatgcccctggttatcggccccctgagcttgatgaggctccacaggccgccgacgaccatcgcaccgacacccatgtagcggatcttggtactccatatcgtccaggcaaggtcgagggcactcatgtcggttgagcccatctggcctgcatagaggggtatcgctatgaaccatgctattgcaccaccgaggaataccaggaacgctatgttgagaccaacaatgtaaccgacggcaacgagggccgcggagaggtcgcttccgaagtagtagacgcgggaacctatcatcttggcggtctcaactgttccgctccacaggcccgtctggcccaggagcttgtagatgccgccgaagattccaccgtagaatatcggtttggcgtggcttccacccttatcgccagctataagaacttcggcacaggcggtaccttctggataggggagcttctcctcgactataaaagcccttctcagtacgaccgtgaagagtgcaccgagggagccaccgagcgctgctatgattgtcacgatgtagtatgggaacgtggtgtagtactcgagaactactagggcagggaaggtgaatatgactccagcagcgagcgattcgcctgcggaggccgccgtctgaaccatgttgttctcaaggatgttcctgtccttgaaagccaagagtatcgccattgagataaccgctgcgggaatgcttgcactgacggtcattcctgcgtacattccgaggtaggcgttggcagcacccatcactatcgatagaaggacgcccagaacaaacgcctttacggtatattcaggcagggatttctctgggggaatatatggtttgaactccatgggttgcaccccctgtagtaaatggcatatcactttgtactccggtttataaaaacgttttgtattgtcagatgttttctggtttgacgtcgaacttgtgttgcagtggcgggttcccccattgcgggctgatggacgtgactgtaggcaatgtcttatataccccctaggcgatactcttacgtctgcaaaagaactgggaggtgtccctttgatagagattacgttcctcgggagcggaggggggaggttcatcaccataacccagttccgctccacgggaggattccacatagcggccagcaggaacatctacgttgacccagggccaggagcactggtcaggagctggcgctacaagctcgaccccaggaagctggatgcaatcttcgtctcccacaggcacgtcgaccactgcaacgaccttgaggtcatggtcgaggcaatgaccggcggagcgctgaagaagaggggtgttttgatagcatcgaagagcgttgtctatggcgacgaggaacacacgccggcgataagccagtatcacataaacgtccttgagagcgtgcacatcccagagccgggaagcaagatttcaatcggagacgaggagttactgataaccccgagcaagcactccgacccaacaacaataggcttcaggatgaggacgtccctcggtgatatctcctacattccagacacggcgtacttcgacgacctcgtccgctggcatgatggggctagggttctgatagcggcaataacgagacctagggacatgggcattccttaccacctgagcactgacgacgccgttgagatgctcaagagcatggagaaaaagccggaagtcctcgtgatgagccacatcgggatgaagatgcacttcgccaacccctacaaggaggcaaagtacatcgagaacgtaaccggcgtaaagacgtacgtcgccaaggaaggcttcaggataactgttaacaaaaaggaaatagcggtaaggaccctgaggccggcgaggttcgtctgagtctttatttcttttcggcttcctttacaatcctagaaactgttgaataagccatctcgaacagctcgtcccttctcttctcggttggagcctcagccacgacccttatcttgggctcggttccgctcggccttatcagtatccacgagccgtcgttcagggcaatcctgaagcccgagatagttagcacttcctttatctcgctggagagctttctctcgacctcttcggcggcccttctaacgacctcggccttgtattcgtcgggacagaggacgttagcctttttcaggtagtaggttggaatctccttgacgagctcgctcagcgggccgttctcgtctatgagctttatgaggagacccatcgttacgaacgggtctatccatggtccgaacttcgggtggacgagcttccagggctcagcggcgaagatggctttatatcgctttatgccgtcgtggggctgtccgagcggaatcctcacgacccttccgcctgccctttcaactaccgcgtctatccttgagcccgtgtctattgacacaactacagtcccgccgccgtgctcctcaacgtagagcttggcgaagagcgctataacggtgtcctcgtcaacgtagttccccttctcgtcgaagacggctattctatcagcgtccccgtcctgggctatcgcgaggtcaacgcccagctccctcaccagctttccgaggtaggctatgttctcatatctcggctccggcttcctgcccgggaagtggccatccacgtgggcgttgacgctgaggaccttcgcccccatctctcgcaggaggtagggggcgacgaggcttccggcgccattggcaccgtcgtagaggactttaaggttcgtttcatggccaacaaagtccagaaccgcgtttatgtagtcagggataacctccacattcctaacgggctttatctcgtcccaccttgcctttctgaagttcccggagaagattatctcctcaagccccctctcctgctcgacgtagaactccgtcccatcgccgttgaagacctttaccccgttgtccgtgggagggttgtggctggccgttatcataaccccagcatccgcgagcttcctcgttccccacgctagtgcgggagtgggaatcaagtccgcgtcgaggacttccatcccagtgctcagaagaccagagatcatggcgtttttcagcattacactagaagtccttccgtccctcccgacgagggccttcccgctcttgtaggtcccgactgccattccaaccttcatggcgagctctggcgtaactttctcccagagggttccacgtatccccgctgttccaaagagcctcataccaccaccgtagggagttgagacgaaccttaaatatctttcacgtatatggccaggcctcggtagttgatgagccgcatggttttcggcatgacgtccccggcgagcgggagaatatagacgggaacacccagcttttttccaagttccaggatggacctcactatctcaggagtgggtcggactgagtatagggctttaaccccgcggtagagttctaggttcgggctgaagaggtcgtcccgaacggcgttgatcccgagctccccggccttctcaaccgaggcgggattccagtcaacggcaagaacgtcgtagccaagctcctttaaccttagagccactttgaactgaaagcctattccgagctctacgacttttcccttcggaaccctggatgctataaaatccgcgaagtcctcgattggcatggagaaaaatgggagaagaggtttaaaaaccttcagaagacggccttcccgcttcccttctcgaagacgtgggccttcctcatgtcgaagacgacgtcaacttcctggccttcctgaacccttgactcggcagggaacttgccgaggaaggtaacgtcaccaatgctcaggtgtactatcttctctccaccgaggttctcaatgatctccacgagtgctctggccatgttttcccctgggatcttgacctgggcgaagagggcgtcgtagatgtcctcgggccttatgccgaagatgacctccctgccgacgaggttcttctcccggagcacttcgaactgatctgggaggaatttcagcctgaactcgccgaagtctgcaaagccgtcctctgtaacggtggcgtccatgaagttcatcggcgggcttccaatgaagcctgcaacgaatgtgttcgcaggcctgtcgtagacctcctcaggcgttcctacctgctggagctggccctggttgatgacggcgaccctgtctcccatcgtcattgcctcgacctggtcgtgtgtgacgtagatggtggtgacgccgagttgcctctggagcctcttgagttcggcacgcatcttcaccctcagcttggcgtcgaggttcgagagcggctcgtccatgaggaagacctgcggctttctcacgatggcccttccaagggcgacacgctgtctctgtccacctgaaagctcccttggctttctgttgaggagctccgtgaggccgagcatctcagcgacttccctgacgcgtctgtcgatctcgtcctttggaaccttcctcagcttgagtgggaatgctatgttgtcgtagacggtcatgtgcggatagagagcgtagctctggaagaccatggcaatgtccctgtccttgggcgggacaaagatacctttctcggggtcggcgacgagcttgtctcctatgtatatctggcccttcgtcggctcttccaagccagctatcattctcagagtagtggtttttccacagccgctcggaccgaggagtatcatgaactcgccgtcctttatgtggaggttcatatccttaacggccgtgaagtcgccaaactgcttccagacgttgatgagctttacttccgccattttatcacccccaaataaaattggaaagggatcagcgcctcctcctgaggaggagcggtactactgcgagaccgacgaggaacgccgggccgcagattccgccaccctcttcaccaccgccggtgcctggggaggtgctggtagtggtggatccgctgccacttccgcctcctcctggggatgtggttgtagtagtcgtggtggtttgtggctgtctcggtggtgcttgtagtggtggtctcggtgctgctcgtcgtcgttgtggtcgtctttgtgggggtctcggtctcggtgggcttctctccgccggtgccctcgacgagaggtatcataactacggtcgctagttttccgttttctgtgtcgtagcttttgagctgctcttcttgggttggcttgaagccctctgggacgagcatgtcgtaaactctcggcgcgacaccggcaatgactgcctgtgggtcggcgccaccgcccttccactgctccgcctcaacggcaactggtctccacttgtccggaccatagccgtcctgcgaacctacgaggacgctggcgtagagtccgtagtcagagactcctgggaagtacttcttcgggagcttcacaactattgagttcttggttggatcggctgaaatctgcatctcgccctgtatggcagtgccgttcgggaggacgatcaagttgccgtagtcccagccagcgatcctgagggctacatcccaggggtggaacgggtcgagattcacgttgcttcctggcccatccgggaacatctttattgcgctgctgtttcctccctccttgaagtcaaggtaaacctcgattatctggaggctgaagccgtttggaccgttccacgggttgccgccgagatccttgaagtagaactccatgacgtagctgtcggcctgttcgagcatcctgaagcggaggaggtcgaagacacctggcttgaagaccgagtcagttgggtaggtgtaggttccaggcccgtggtcatctccttcagggtcagcgatgtcagcaatgactgcacccttgacctggacggggagcttgagctcgaccggtgagcttattacctccagctcaccgttctcgtttacggttgataccgcgaagtagaagtcgctcggattggagaggtagtcgaatggaacgacgacttcaactccggcgtcggtctttttggccgtaacgtctccaactttctcgcttgtctcgtagtccttggccttgtaaacttcggccttcccgtccttatagaccacgtgggtcgttatcagcatgccaacgctgtcctttgagagtgggaagagcgagtacctcagctcggtcggcctcttctggaggattgtgaacgtgttgccgatcctctcgtccgggctggagaggctgacctcgaactcgttcagatcgcctttaacaaggaagtggatgccgtcgccctcgaagtagacctcaactcccttagcgagggctgactcgcttgagtactccttcttatctccctctccaaggccgtcgagcgccctcgtaatgtatggctggccgtcagggaagtagtttccgtagaggtagctcgggggctcgactcccgccagcttgtagatctcgtagaggtaggtcttcaggtagcggtcgaaggtgtagtcctggccgctgtcctggtcgttgccgtaccaccagaaccagtcgctcgcctctgccctgaggaggtactcgtaggccttgttccaggcgtcctggctcatcttatctttgttttccatgagggcctttcttgcctgatagagccagtaccagccgtagttctcctggggctcgcctatccaggtggagagcgttccgtcaatccagcttgactcgggccactgcatctcttcctggactccaaccatgtcgtagagctctccgaggctcttggccttgagaagtgcattcaccttgtcctcagtagtgaagtcgaggcgctccatcatcttcggagtgagctccttcgccttgtcgccgtagagcttgatgtactcgcttggggtgagcgtctttatcagtccagcgttctggagctcggtgagcttcttgtagagctcctcgaggaatagcttgccgtcgtacggatagtgctcccaggggttctcaccgtcgagagtgacaacgtagacgagagagccgtcgtagttctgcttctggagctttagcagctcgttcacgaagtcctgaaccgcctggtactggttcattccactgtaggtaaagccaacgcggtcgctgagggcgtggtcacgggggaacaggtagatcttctttccgttgaactcggccacccagggcttgtggtagttctcgatcgtcttctctacgccgagcctgtcgaggacgagctggtcggtcataacccactgccagccgttctccgctaggatttcaagggtcttgtcgttgagggctgactcggccgcccagcctccctggggagtaacccttccgtctccgaggtacttcttgtagagctcatgggacttcttgacgtgagcgtcaaagtcgctctcccatccgaagtcgttgagtatcggccctatcgggtgggcgtaggggacgacggtgacctcaacgttcccgttgccgaggaggtagttgatcttctcgtgctcctcgaatgtgtggttgagaagccagagctgagcgttgaggacggtcttaacgtcgtccctcgtgtagccaccttcgtcaaccttctcgtagagggccttgagctcgggggtgttcattatgtagtcgtagtctatccaggcgaggttgaagaggacggccaggtcgatgtagtcctgctcggtgaactcgtttgttacagcaaccttctgctcctccagcggaaggttggcgtacttggccttagcgttcatcatcttgttcttaagctctgtgtacctgtcccagaagtcccttatcgggttcccgttctggtcagttacgggttcaccgttccagggtatagtgtggtcgaagaaccctccaggagcctggagcatgaaccacttgtcttcgacggtcaggggctccccgttggctattttctcggtgattatctggtgtgtgtctttcttcccgttcatataatcagcgagctgggctatgagtgaacccgaaaggtcgattgcaacgtgcacatcgggatattcgcttaggtagtgggccatcttccagtagttgttggcagcgtggagcctgacccatggcctcgtgtagacatcttggatcgggtcgtagtagtagggctggtgctggtgccagactattatgacgttcagcggctttggttcttccgccagcgcgaacttggcgttcgctcctattatacttccaagcaccaaaatggtaaggaaaagggaaaccagcttcttcatcttatcacctcactctttaaggcctccaacagtgaggccgctccttatgtagttctgggcgaggataaacatcacgaacacgggcagggcgaacagcagcgccgcagcagcgaagtagctccagtcaattcccctgccgattccacccaggagtgagtatatccacaccgccagcggctggctttcctgacccaggaggaggcttgccaggatgaactccgtccatccgccgatgaacgcaaagactgccaccgtcgctattcccgggagtgccattggaaggagcacgtgcctgattatctggaagtagtttgcaccgtcaacgagtgctgcttcgtcgaagtcggggcttatcgagtctatgtatcccttgaggagccacgtattgaagggcacgcttcctgcggcgtagatgaaggccagcaccggaagcttgccgtagaggccgagcttgacgagcattccgtagagggctataagtcccgctatcccgagaccgcccgagacctgcgtgaacatcaggtagaagtagagtatgtgctccctgccgaagaactggagccttgaaaaggcgtaggccgccgggacgacgaagatcagtgccagtactaccgtaagggtcgccaggatgaggctgttcttcaggtacttgaagaagttggagttcacgaacttgcccagggcagtgaattctgcttttccggtgtccctcgctctaatgtacccgtccatctgtccgctgacctttactccgttaatcgtcccctctgtgagtgtgacgttcctgactattccaaagcctatagttccgtcgtcgttgatcctcgtcaggattatcgtgcctttaacatttccactgaagtccccactgccggagccgccgttgacggtgaaagttgccctggaaactggaatctcaaacttcaagcccgtgaaaggcccgtattttacagttccgattaaggtgccgtctgttacgtagagcttgccgttctgaattgttccctttccggttatccttccttcaaagtcctccatcaacctgtcgccggagaatccaaagaggacttctctgtacgaatccagggtgacctgctttggtatgagctccagctcggtcgttgcgagcgttgattttgggcttatcgagactgtgaagatgtagtacactgggaagaggattatgaacattatgaagatagccagcaacgtcaggacgaagctcttgagcatctcggatctcttacggcccatcatcccctggcaccctcctggagtctggttatcctaacgttcacgtacatgtagaccgccaggatgagcgtggctatcaccattatcgccgcggccctgccgtagtgcggactggcgccgaatgccttcctgaagccgtagagcagaaggaacctgtcctcgaagaggcccgcgttgtagatgtacggcaccatgaagtactggaagctcgcggcgctcgtgagtatggtcgcgaaggctatcggctttccaactattgggacgacgacgttccaaattctctgccagtagtttgctccgtctatgatggccgcctcgattaacgtgtccggaactgactggagtgcggcggttattacggtcatcataaacggataggccagccagacctcgattatgttgagggccacgaagccccaggttgggttgttcacccagtcgggcccggtaatgccgattgatttgagcacaaggttaatcgggccaaaaacgggatcaaacatgaacttccacacggttaccgagaagaggagcggcagcgcccaggggattatgaggagcgacctgtagatggccttgcccttgacgtacttgctgttgtagagcaggctgaggaataggcctgcgagggccttcagtgtgacgctcgtgaatacgaatatccacgtccacttgaaggcgttgatgaacttgtcgtcagagagtgcccacttgaagttttctaggcctacgaaatgcatgggttcaactgcgctctgggggttgtagatggggaagtttccaagctgggcgttcgtgaacgctaaataaatcgagtagactatcggccagagattgaagaacaggaacgcggccattccgggcagtatgagcatcagtgcagcagcggtcgtcttcttcatttcagcacctccataaggtaataaaaagagaaagcggctcagcttgagcccatgtcctggagtattttctcctggtacttcttgaggatggcctcaaagtcggcgtgggccggatcctggagtatctcggttattgcaccgtcaacgccgccccagaccgcgcccatcttcgggctcttgggcatcaggtaagcgtgctgaaccgcctgaccgaagccgtaaatgaccgggtcagccttgatgtctggatcctcaagcactggcttgaggactggaatgtaaccgagctggagtgagagctccttgatgacctctggagttgttgtgaaccacttgacgaacttccaggcggcgtccttgttcttcaggcctgccgcaaagtagatgtccttcacaccaccgtagggcctcggccagtactccttgccgtccttggtgatcggcgggagtggaacaacaccgaagtcaatgccagcctttttaacgtcgttaatgctccacgggccgttaaccatcatcggcgccctgccctcaaggaagatgctctgctgggtgttgtagtcggcagtcggggccatgtacggccatatctgggtgaagaagaacttgaaaccctctatggtctcgggcttgtcaaggccaggctgctctgtggcatcgtcgaagtagtatcctccgaaggcttgggcgatgcctgagatgaagtaggcgttgattggccaggcgattccgtatttttcgttgtctgggtcgtagtacttctccatgatggctttcatttcgtcgaaggtctttggcggctcgctgaccatggccttgttgtagattattgctacggtctcagccgcgaagggcattgcgtagtagtgccccttgtactgcatagcgtcaacggccatcggggcgaagtccttcaggatgtcgtcggtaatgtaatcgtcgattggctcgagaaggcctgcgtcggcgaactttccaatccagtcatgggcccagatgaagaggtctgggccttgtccgctcgggatggctgccttgagggcgtcttcgaggttaggcttctgctcgaaggttatttcaacgttcgggcattcggccatgtactcttctgctatgctctggaagacctcaagctcgttcggctgcatattgtgccagataacaaccttgccgcttccgcactcaacagtaggagcggtggtggtctcggtgggtgaggtagtagtggtctcggtcggggaagtggtctctgttggagacgaggtcgtctgactctggctggtgcttggggtagtcgtcgtttccccaccgcctatgcagccgctggccacgacacccaggaacagaacccccacaaggaggagggcaaagatgccttttctcattgtttatcacctagttatctcgttgcatttgagtatcatcgtgggtgatatatataccttgcgcttcctggctcattcctgcaggtctgaaccgatgtgtacattcatgctgtctttcactctgatgattgaagagaaagcggggatttttatctgttcgttgctcccgttagaaggcactggggtctctacatcgttccaggaacagtttattccgaccaaaacccgctcagatccagcttttctttcatacacgaaccatttctctccagccccgatgaccctgaagctccccacctgaagcgacttcagagagcgcctcagttctatcagcttcatggtctgccggagtatctggaaatcccacttttcctcatcccaggacatcggtgtcctccctgccgacataccttcgcctgaaccccttaggccgatttcgtcgccgtaaaagatagccggaatgcccttgtacgtcatcaaaaacgtgagggcacagagatacctctccttgccggccaggtctatgaacctctccgtgtcgtggttgtcgaggaagttgtaggtgaagtactccgccgggccgaggtgcgcactcagtagctcaatcccgttgatgaactcggtagcgccgatttctccaaaggcaaagaaccttagaaggaggtcgtataggggatagttcatgacaccgtggaagacaccgaagaggtagagcctcgggtcgtccataacttcaccgaacaggtatgcatcgtccggaagcccttctcgaacttccctccagaaccctggtggaacgccgtgggcaacgtcgagcctccagccgtccgcccccttctcaagccagtagttcataacccttgcaacgaactccctgactttcgggctgtcgtggttgagcctcggcattacccagacggaaaagaaggactcgtagttccagcccatcttcttgagcgtctgatacttttccatcggcggaaggtccgatttgagaactcttatgaactcctctgaaacgacagggaaccccttaacgcggtagaagtcggcgtattcgctttcttctcctctctccacaacgtccctgaagaaggggtggaaaaagctggtgtggtggaaaacgccgtcgagtacaagcttgatgtccctgcttttaagggccttcacgagctcccgaaacgcttcttccccaccaagcctctccgcgactctgaggtagtcggttatgtcatagccgtggtacgtcatggattcgaagattggcgttaaatagagggcgttgacgccgagttcctcaaggtggtcgatcttttcaacgatgccccagagatcgccaccgtagtattcccagctgagaaaagggggttcatgatccctgcctttggcaaacctgtcgggcattatctggtaaaagactctatcgagaatccacgagggagcgtcaagcctgaatggtgccgcctcaaatgggccgagggttaggctttttccctctttgaggaagacctcgaaggagtatctcagtttttcggtttcctgtaaaaccgcctcgtagtactcaaaaacttccccatctgccttcttccgcattttaacgtgcgtatcgtctgtcaccaaataagctgcatccactttgccctttttactcctcaagaggacgtgagtcctgtccccaaaggaatagagatagagaagggcgggcctgtgaaaaaccatatcattgcccgctattttagccaagctcacttccctctcgaacttgtatgaaggcctccgatagagctccttctctggattctcggggtcaagaaggaactccccgccagcggagaaggcgtacctccagaggccctccgggagcttgatttcgattatccacctcttatcctcgtgcttcatcctgaaggagccctcgttgaaggcgttaaagttacccagaaggtatgcgtagtcccaccttccggcgtctggaagggagaactcgaccctcgccactctgccgtggatgaagttttcttcaaacccgaaaaccttatacactcataccaccttgtatcactggtgatgattaaactgatgccagtgaacttaaatgtctttgggggttaagccatgagggaagacgagataattgaaaagctccagaggctcggcctcaccaagtacgagagccttgcctacataactctcctcaagctcgggccaagcaaggcaaccgacataacgaaggagagcgggattccgcacacgagagtttatgacgttctaagctccctccacaggaagggcttcgttgatgtcatgcagggcactccgaggctctataagccagtgaaccctgaagtcgtgcttgaaaggattaaggaggaactcatcgaggacattgaggccctcaaaaaggctttcctcgacctctaccgtgaggctcacggtgaggaactcccggagatttggacgatacagggctttgacaacacgcttgagagggccgagcacgtcataaggactgcaaagcacgaggttctgataaacacgcccttcgagtttctgaagctcctccagggcgagataaagaaccgcaaggacgtaatcttcgtaatcataagcaacttcggagacgagataccgaactggctcaagggcgacaacataatcctcgccagaagcggcggagcaccctggctcatggcgagctggataatcggcgacatcgactacgccctcttcttcggtgccctgcccaaggacaggaggagggagaagttctactccttctgggcaaaaagcccgaggataatccagaactatatgcactggttctacacgatatacttcgacaacagcgaggtaataaagcccctcgcctacgagaggctccagaagccggtctcgctggtaaacatcagaaccctgataaccgttctcaagtttgcaggcctcccgagaaaagccgagatagtcgggaagctcatagacaccaaggagcccgtgaccctggatggggaaatcgttgactacgagtacacgccccttacggcaaacgttaccttcaagtacaacggcaagcagctgaaggtcggcggcataggcagctactttgaggacgtcgagggggagaagttcatcctccttgagtgacccatcatttttaatttctaaacttcaacctatggctggtgaagaaaaatgagaattctaatgctcggtttcgagtatcttccagtaaaggtcggtggtctcgctgaggccctaacgagcattggggagggcctcgctgggcttggaaacgaggtcgtggtcttcacgccagaccacggaaggaagctcggcgaagagcttgcttctttcagggttctccttgagggtagggaagttgaagtgaaagtcagaaagcgggaacagaacggcgtaatcgtttattccctcggtgggagttacctggatttggatgtttatccgggctgggaagatttgctcaagaaggccgtcctcttcgggaaggccagcgcagggctcatgaacatcctcatcggcgagttcaagcccgatgtagtccatgcccacgactggcacaccgtctttgccctgggccttctgaagaagtacttcggggttagggcggttttcacagtccacaggctcaacagggcaaaagtccccgcaagctacttccacgaggccaacctcggcgagctggcgccgttccccgacctcgaccccgaacacacagctggctacatagcggatgcggtaactaccgtcagcaggagctacctgtgggaggagtggagcttttttaaaaacttcgacggcaaggtaacccacgtcttcaacggtattgactgctcctactggaacgaggagttccttgagggcaaggatttgccgagggaggagagaaggaagagaatcctccagcgcttcggactctctgatggaaaggcgttcatgttcatagggcgcttcgacagggcccagaagggagttgacactctccttcgggcaatcgagcttctatcaaccgacccagcatttaaaagccttcgcttcttgatagtgggcaaaggcgatccagggcttgaaagctgggccagagaaaccgagcggcgcttcccggagaacgtgaaagtgataaccgagctcctgtcgagggagactgttagggagctctacggttcggttgacttcgtggtaatcccgtcctactttgagccctttggtctcgtccagctcgaggcgatgtgcctgggtgcaattccgataggcagtgcagtggggggcatcaaagacacagtcattgacctcgacgccgacccagagagggcgacggggcttctcgttccgccgagggatgcatttgccctcgcgaggacgataatccgtgcatctgaactcgatgaggaaaccctgaagaggctcagggagaacgggaagaggagggcaagagaggacttcacgtgggagaaggcctgcaggaggtacttgagggtatatcagaacgctgtggacaaggctattcccttcctccgctagcgccacccgtactcggctaagaacttcctctttaatctttttatcgtccccgaaacgcctaaagttctgaagatgacctttgagccgtttatctctgtgagcatggtcagtgcaaagcggagctcttcaacgtgcttcctgtcaaccctaactattccagtctggcttttctcgtcgaacttgatgaaccatggctttgccctcgccgagccgaggtaccccagggcggagaggctggcctcccagaccgctttctttatttcgtccttcttgaagggcctctccccaataacctggaacgctatgtatctgttcttgtccctgagcgtcggcggcaggtacttcggcttctccctcatcccaacaccttcacggatttgtccaccaacctttttaagccctcctcctacctgggcttgcgaggtgagatggttggtctgggagacgccttacttttcatacgctgtgagagagctccccaagggctgtcagctctgcgttaggggtgagaagctcgtcctcttcaccacaggtgtctgtccgagggactgcttctactgccctctgagcccctggagaaggggggacgttgtctacgccaacgagagacctgttaagaatgttgatgacgtcattgaggaagcgagaattcaggaagccaaaggtgctggaattacgggaggagaccctctggcgaggcttgagaggacggtcgagtacataagaacgctgaaggagaactttgggaaggacttccacatccacctctacaccactggagcgctcgcaaccgaaaaggccctctcgaagctctacgatgccggactggacgaaataaggttccacccagatttattcaacccaaactcaaagctcttcaaggtcgagatagagaacatacggaaggccttcgactttgactgggacgttggaggggagattccctcgattccaggacagcttgacagaatgaagtggtacgcggagtttttagacaagcacggcgctaagttcctgaacgtgaacgagctcgagttcagcgagatgacgcttaaaacgctccttgacatgggcttccagccagtcagcgacgagagctccgccataaagggctcgctcgagcttggccttgaattcctggagtggggtgaggagaacacctccctgagctaccacctctgcacggcgaagctgaaggatgcagtccagctgaagaacaggctgaggaggatggcgaggaacgtggcaaggccctacatggaggtaacggaagagggaacgctccgcttcggcatagcggaatacgacgaccttgacgagctctacgagttcctcgttgaggaagcggaggttccaagtgagtggctccacatcaaccgcgagaagggcaggatagagatgcctgaagaggtcgccgttgagcttgccgatgcggtagaaggcgatgtgaagttcttcatcgtggaagaatacccgacgtgggacagacttgaggtggaaaggattccgcttccttagctgtttctccaatttcattatggacaaaagaggagaagagaggggtcaaactggaactgcaactgccacctgagccgtgctggcaaccggctggaatgccttcatgaacctcaggaaggcgtggctgaaggcccaatcggggtcgctggttcccctgtggattggtgagacctctcctgtcggccctgggtgatctctgtcaacgctccagaaggcaagggagcgtatcttgtgctgaattgcccagtcgacgagcttttcggcatcctggagcgagaagacgctcttgtcgtcgttggttcctatcatcggagtcaggccgatcatgccccatatttcgtcgtcgctcttgtcaggatagatctgcttgagctggttaaagacgtgttcggccacgcttatggcgttgtcggcgtttgctggcgtccagtagtagtccatcgtcatcggattgaccctgtcgacaatgacccccttctttgccatggtctctattattccgtatccgcccgcgagacctattcccgggtcgctcgggagtgtgaagctgaacctgacgttcggcctctccctctggacgatcaggagagcatccgcaagtttgtcggcgtctacaccagattcgatgtcaaaatcgaggtatgtggcgttgtaggtgtctatgacctgaatgtaccactgggcgagctgttctggagtttttgcctgctggcagaggtaggggccaactgcgcccccgaaggctataataacgtctcccccagcttccctgagcccttttacctcatcaacgaaggcatccaagggaatgcttccagcccaggccggcccgttgtagactgaactgtagaggacgaaggcgagtgtgaagtacggtgttcccgtgaggttgtagtactcaacgagcggcttgtgtatgccgaggctcatgtcgatgtatggggcgaagaagtgctcgggaagacctgggcctgctggaacgtacgggcccgtctcgtttcctgggctgggatttggattggtttcgttgcccggtgatggattcggattggtctggttgtcggatggagtactctcgttgcccggggctgatgcggtttctggccagacgtcccagagctgatcgtttacgtagaggtacatggcctcaacgggctcgctgccagtggcgatgaagccgaaggttgccgtcggtcccttgttccagcttacgggagtgaagactacgtaaccaccttcctcggccttgttagcgctccagacgcttgagacggctgatccgtccttgagcttgactttaacgacccagtcgtaagttccaccgaggttcagggttacatcgtactccgtgcttccccagtcctggattttaacgctgaatgcatccggcttgactagatctcccgtggacggagttgtctggttctctgagggtgcggtctcgtttccgggggagggtgtgggagtcgtctcgttgccaggtgacgggcttgggactgtctggttttcctccggttgttgggtgtttgagggccaggcatcccagagctggccgtctacgtagaggtaaatcgcttcaacggactcgcttccagtggcgatgaatccgaacgttgccgtcggccccctgttccagctcaccggcgtgaagacgacgtaaccgccttcctcggccttgttcgcgctccagaagctcgatacgcttgaaccgtccttgagtttgaccttgacgacccagtcataggttccaccgaggttgagggtgacatcgtattcagtgttgccccagtcggttaccttgacgctcaaagaacccggcttgacaaaatccccggtggatggagtcgtctggttgtccgagggtgtggtctcgtttccaggtgacgggtttggattggtttcatttccctgtgatgggtttggattggtctgattgtcctcaggggttgtctcgttgctcggcggcagtggcgtcggctctggaacggttatgttgctcgggatgttcgagccgatgtagtaggtgtccggaatccacgccggcggcttctcgccgaggtgctggagaacagtatcgagaagcgggtggtcgttggtcccgggcttcctgtcagctgtgatctcccatatcatcactccgccgaggccgttcttcagcatgtagtcaacctttatcccgatcgccctgggatcgtcgaaggttatgaatatcctcttgctcggggagtagagccaggccacctgggctatcggatcccagtggtactcgtactcgctgctctggttcttctcggcaacgtcccagtagtccataactccgtaggtctcgtaggccggtccccaggttccagctggggtgccgctgaagggctggtagaggccgttgttctcgggcgggacgttggcaaagctcctgctgtagaagggcaggccgacggttatcttggtcttatcgggaacgtgctggatgtaccactggacggtgtagttgacgcagaagtggtacttgacgttctcatcggtgtatggcgcgtttggatcgcagtagagcggggcaaggtggccggttatggtctcccaggcgccgtggtagtcgtaggtcatgatgttgattgaatcgaggtacttgctcgcctccacccaatctatcctgccagccttaaccggatcggccggcgttgcggccgttaggaggtagtccttgtggtcctcttttgcggccttgtcgagggcctccctcaaatccttgaggagaagaacgaagttcttaccgtcgtcgggactctcgtagttgcccgccatacctccgccgcccgggtactcccagtcgatatcaattccgtcgaggttgtactttctgaggatctctatggcagtctcggcgaagcgctgtctcttggccgggtctgcggcgaccaccgagaagtacttgctgagagtccatccgccgactgagatgagaaccttgacggctggatacttccttttgtactccttcatggcctcgaggttgagaggatcagcgtaggtatcgtagaaggcaacggttccatcctccttgaggtcgaggaaggcgtagttgacgtgggtaaccttctcccaggggatgtcgctcacgtagaacttcctcgcgtaccttccccaggagatgtagtagactatgaccctgtaaggttcgaggggagtcgttatggcgaggacgttcgagggacttcccctgcttccatcggcgagaaccgggacgaccccgtagtagtaggttgtgtttgccttcaggtgatactggtcgaggtagcttgtggttgggacaacatcccctacgagctcccaggagtcgtcgcttcctggaacgctctgggtccagtacttaacgcgccatatcttcccgttgtactcaacgacatcgccctggttgtatgtcttccctggctcatatttcggatagctgctccagttaacgaccaccagcaggttgttcggtgagaacaggttggagggatccgtgctcctgtacacctcgtacgccttggcgctgctgtacgggctccaagtcaggttcacaacgtcccatgctatagcgctcccgctcaggcttacgctctccgccgctgaagcccaggggaaagtgcccacctggaccagggacagcaggagcactgcggtcaaaactattgaagtccaaatcttcttcacacacaacaccccttgagctttgaatgttttgggagatgttgcatattttacatgaacttccatgcttataaatgttttcaaaattacatttatggcattttatatattatcgatatcccggcttagatagcctttatggcgtcagaattggggccaaacagcggcatatttaacactccaaaaaggttataaaatcatgaaattatataaaacccgaggctctggagtgtggggtgtcggttatggtgtttgaggagttcaacaattttgacgaagctttctctgctctgctgagcaaactcgacttcaagatcaacgagccctttaatgacgtgaaaaaagtcctctgcatagagccgcatccggacgactgtgccatcggactcggcggcacgataaagaagctcaccgattcgggaatagatgtcgtctatctcctcctcacagacggctcaatgggaacaaccgatggagaagtctccgggcacgagctggcccttaggagacttgaggaagagaagagaagcgccgagatccttggagttaagaagatacatgcccttgactttggcgacacggagcttccctacacgcgggaggtcagaaaggagatagttaccgtgataagaaaggaaaggcccgggatcgttttgatgccagacccgtggcttccctacgagggccaccctgatcacaggcatgcaggttttctcggaattgaagctgtcagcttcgcgggccttccgaacttcaaccgctccgacttaatcgcgggtcttgacccccacagcatacaggccgttggcttctactacacccacaaacccaactacttcgttgatataagtgatgtcatggaggttaagctcagggccgttaggacacacgagagccagttcccggaggatgtgtgggagctttgggagccctacttgagaacgatagctttgtactatggaaaaatgagtggacacaggtatgcagaaggaataaggttcgttcctggcatcttcctgcacatatgtccgttcgcgcacgttatctgatgtttctggcggccttcggtcctaagacaggctggaggccactatcctctccacctctcttaggaagtggtcgagctccataacgtccagtccaaactcggtcaacgccctgtacctctctggatccgccgtcactaacagcatcctgtgctttatggcaaacgtccctgtgaggatgtcgtcaacgtccagccttaggccctttttgaggagctttgcctcgatctttgccccgtggagtactatctcctccgtgagggggaggattgtgtatatttcgttgaggattctgaactcgtcctcaacgttgcggtttatgtaggctttggagactaagtacttgtaaactgagattatcggaacgaagacgttgaactttgccagcgtgacctccaaaagccgcctcctgctagctgtatgcatttttatcagtgccgtcgcatcgaagagtatgctgtcgggcagggtcatttcttatccctctccttgatgaccctcaggagtacatctgcctcgtcgtcttcaactatgatcttctcgacctttttgtcgagctcaactagatgccaggtctctatgagcctttggagaacctcgtcgtaggacttggcgtcgagcttgtccttcaggagctttatcttcttccaggtgttctcgtcaacggcgatggtcttcaaggtaatccctcccgcactatctttttgtatgtttccacgcttctggggcggggtattctctgcttgcttattggatcaacctcatagaggccgaacttgattttaaaacccattgcccactcgtagttgtcggtcagggcccagtggaagtatcccctcacatcggccccagcctgaattgcttcgaacatcttctccacatgctcctttatatatctcggccttaggagatctctcgaatcggctatgccgttctccgttatgtatatcggcttcctgtattcgtttcctatcattatcgaatcgtacattccttgcgggaagcactcccagccaaagtcgctcgtggggttgttgtccttcgagacgctgttaggctccgaggagtaaccgtacccttcggtccccacgaagtttattatcgggagctcctcgtatttgggttccgtgtacctaatgacctccctggtgtagtagttgttgccgatccagtcgtttctcttcaagtgatcgattttgacatagttcccatcgaaatcaagatcaaccttcccttcgttgactccatcgaggaatatcctgttgtggaagagatcgtagttctccgttgccttaacgtccttagggtcgttggggtcgcgggggtaagcggggattatgttgagtattattccgacgggcttgtctgagaaggttttaactgcctcgtaggcccttgcgtgtccaacgagctggttgatgataactgctttagctgccttcgggttaagtatccccggcggccatccgacgtagggagcgaggtagccaagctcaaccgtaaccattggctcgtcgaaggttgcccagaagtcgactagatccccaagcttccaggcaacaaaagcggcgaacttggcgaactcaaggatggccctctcgtcgacccatcccttagcccttgctttttcaaagttttccctcacatggattggatcgtggagccatatcggctgcgtctggtggtttagggttacgaaagttgaaaagccgagttcctttaggtttttgagaacctctctgtagtgctcgacttcctttgcgttcgcgatttcctcaagctcgtggagggtttcctttgtgatcttcactctttttatgagtccgtatgagtccctctcgaagtccacttcaactccataagtcggacacggaaagattctgctccactcaaccgttatctgataggcgttcagtcccatatcctttgcaagctgatggtctatctcatagaggccgtagttgtttatgccgtcctcgggcaggtgcccgctcacgaggtcgttctttatgttgagcggatcgcggacccagtgccaccagtccgtccgagtgtctataaacctcctcaatggatctcccatctcaaactgaaacgccgactggacaacgccccatgcaaactccctcatacttccacctgaatggttataatcatggcatcttttataattttcgtaaccgcaatatgtaggatctgacagctcttggtatttctggacggatcagtattgcaatgctcatagtgggcgtccctccacttcttggcgctttgtccacataattgctaagatgcccaaaaatagataagtttatatagatgtccaaaaatataaaattgaccaaccttataagtggtggtgtccatgaagaaagctaccgcggttgcccttgtggcgattttcattctcggcctcttcgaggctgggtacggtctggccgcagagagcctgccgaggaacgagaccctctacactgccaacagtgcacccccaacgaacgccaaccccttcactggaggttcggttcttggaatagacggcctcgtcttcgagccacttttcatgttcaacttcatgacgggcgagctcaagccgtggcttgccgaaagcggcaagtgggttggcgacaacgtctttgaggttaaacttaggtcgggtctgaagtggcaggacggcgaacccctaactgctgaagacgtcaagttctcctatgaatactatgagaagatcggccttaggaactggggcgaccttggcctcaaggagataaaggtcgttgatgacaggacggttcagttcatcttcgacggaacccctaactaccagctctggcagcttcagatgttcttcggctggggacagggtgcactcatagtcccgaagcacgttttcgagaacattaaccccgaggacatacccaagatgaccttcaccggcgatgagatgaagtacctcgtcggttctggtgcctacaagctcaaggaggtagtcggccaggagaaggccatcctcgagaggaacgacgactggtggggtgttaaggtatttggaaagcccggaccgaagtacatcgtccagctctacgtcaccgacaacaaccaggcagcgaacatgttcatcaagggtgacctcgacgtcggtacatactacatcgacatagtctcggccaagcagaagaaccccaagctcgtgagctggctcgacaagtacccctacttcccgcccgttgaccccgttctcctgtacttcaacaccaagcacgctccgctcgacaacccgaaggttagaagggcaatagcgatggccatcatgccatatcagatcgtcaaccaggctccgataagcgagcttccgaaggaggtacccttcggtcccggtctcctcaagacatggggcgataggttggtagttcccctntctgtagcccctagagtcctccatacaatgcaacattgtggtgctgcatacaggtgtttgagtactcnagacagtgatctccaaatcagatacaagtcactgtgcatgtgcaatgtcaccgtgtcgcattgtttgccctgtgggnctgcataacaagctcccctcgcattgagtgcttggttgtcaattgaccaccgactggtgcatggcatacagggcgtacaactggcaagccgctcatcgtcaaccagggtccgataagcgaccttccgaaggaggttcccttcggccccggtctcctcaagaaatggggcgataaggttggtatcgacggtctcatcagtcagtacggatggaagtacggtgatgttgccggggcgataaagctcctcgatgaggctggtgtcaaggacaccgacggcgatggaataagggagtacaacggcaagccgctcaagctcaaatttgtcacctgtgcaggttgtaacgactggctccaggcgggtgagataatagccaaccagctcaaggccgtggggattgaagtcgagatagagaagggagactggactaacttcttcgttaagagcctccagaacggtgacttcgaccttgcgctccactggtcaggcaccttccagccgagcgcctacgccgtgttcaacatgctcctctcaaaggacggcggtgcaaactacggaaagtacgagaacccacaggtcgatcagattctagcggagttcggaaagaccgtggatgagaacaaggaggcccagtacataaagcagctctgccagatatggctccaggacgttcctgcggttcccgtttacatggcaacgctcttctacgaggccaacaccgagtactggatcaactggccgaacgagaagaacccctacggcgttccgatcttctggactaactacggcacatggggtaccgcccttgcgctcctcggcgtcaagcccgccaatgctcaggaggtttcgacaactacaaccacgaccagtgagacaaccaccagcaaaaccccaacatccgaaaagaccaacaccggttcgggctccaccacatcctcaagcaacggcggcggcatctgcggcccagcggtcgtggtgggactggccgtgattccgttgctgctgaggagacgccgctgagtctttcctcatttttattgtctctcgaccgatggaggggagttgcatggcctctggtggattcagaaagtacctcatgcgcaaaaccttcgtgtacctgataaccttcctgttcgcggtcacgcttaactggttgctcccaaggttaatgcccggcaacccgatagagggcatgatggcccaggcgggcacagggggcagtgttaacgatgctctggtgcggttctatgagaggctttacgggctcgatcagcctctctggaagcagttcctaaacttctggtcgagcctcttccacggggatctgggctatagcatactctaccgtgccccagtcgcggatataataaagcacgccctcccctatgatattgtaatcctcctgcccgcgatcgttttgagctggctggtcggaaactggcttggtgcgcttgcgggtaaaaataagatgtatgacaggtacgccatgcccgttttctatttcctcgcgagcatgccctacttctggtttgccatgctgctggtgtacgttgtgggggttgagcttggatggcttccctaccagggggcctacgatccaagcctcgtaccctcgatttccctgagctttgttggcgactttctgaagcactggatactgccgttcctcagcctcttcacggtcatgatcggaagctgggccataggaatgaggaacatgataatctacgagcttgaggccgactacgtccgctatcttgaggccctcggcggcagtgagagactcctaactaagcacgcatacaggaacgcaatactcccccaggtgacaggactggccctccagctgggcctcatggttgctggagctatagcgacagagatagtcttcaactaccctgggataggcgttctcataatgaacgcggccctgagccaggactacttcctcctccaaggggcgtttctaatggtggtcatagcggttctcctggctaactttctgatagacataatctacgccttcatagatccgcgcgtcagggccagctacacggagggttgaaaatggcgagaaggggcaggcttgacacggttaaaatagcgttcaggaacaagaagttcgtgttcggcttcagcgtgttgatgttcttcatcgttttctcgctgatcgggggtctgttcacgcccttcagcggcgacggtctgtactacgaaagggtaccgaacacgagcatcaaagtggcaacgtactccaccaaggtcctcccgcccatgagcaacgagacgctgatcacctacctcggcaacagggtagaagtcactcacctcctaggtacggatgcccttgggaaggacgtttacgcccagctggtcacgggccttagaacgagcctctgggtggccttcctggcggctataataggaacgatccttgggataaccatcgggttcatagcgggatacaagggtggctgggtcgatgagacgctcatgatgttcaccaacataatgctcgttataccctctatagtcctgctcgtcctaatcgccgcctacctctccgccagaagtccagaggtccaggccttgataataggaataacgggatggccgtgggttgccagggccgttagggcgcagaccctctcgctcaaggagagggagttcgtcagcctcgcgaagctgagcgcccagggtgatctcaggataatcttcggcgagataatgcccaacatggtatcctacgtcttcatggccgggatactgcagttcagcggtgccatactggccagtgcgaccctcgacttcatcggcctcggaccgacgacaacggtatccctcggaacgatactccagaaggcgatagcctacaacgccctccagttcgggcagtggtggtggttcataccgccggggctcatcataaccttgatcataacggcgctgttcttcatcaacctcggtatggaggaagtgttcaatccgaggctcaggaggggtggcgaatgacggcaattcttgacgttaggaaccttaaagtctactacaggactccaatgggcttcgtcaaggccgttgatggggtttcctttgacgttaggaagggtgaggttttcggaatagcaggagagagtgggtgcggcaaatccaccctcgttcactcccttatcctcagaaaaccccccatgatccatatgggaggagaggcgatcttcaagggaagagacctcatgaagctgagcaaggaagaagaacgtaaaataaagtacactgagctctcgataattccccagtatgccatgaacgctctgaatccaactaagaagatcaaggacatagtctgggatttggcgagggaacacggggcagaggacagggaggaggtcgagaaactcctcagggagaggcttaggatggtcaaactcagtgataaggttgcggacatgtacccagtggagctgtccggtggaatgaggcaaagggcaactatggtagtctcaaccctcatgaatcccgacttgctcatcgccgacgagattacttcagcgcttgacgttacaactcagagggtcgttctcgaactcctccactacttcatgaaggagggcatcgtcaagtccatcatcttcgtcacccacgacctggcactgctggataagatagcggacagggtgatggtcctctacgccggtaaggttgcagagatcgggcctacagaggaaataatagactctccagcacatccatacacctcccttctcattgagtccttgcctaagataggcgtgcactacaagcgggcaaagctgaagggcattccaggtacgccaatcagcctcctcaacccgccaaagggttgccgcttctatccaaggtgcccctacgccatggaggtctgccaaagggtcgaaccgggggtattcagtgttggtgatgaccacatagtggcctgccatctctatggaggtgagaaaaatgagtgagcctctcgtcagggttgaacacttaactcgggtgtttacatcgggattcatcagtggttttcagatcaaggccgttgacgatgttagcttcaacatccgggagggtgaaataatatccctcgtgggggaaagcggcagcggaaaaaccacgatcggaagaataatacttcgcctccttcctccgacatctggaaggattctgttcaaaggagaggacatcatgaaatttaacaagaaacagcttaagtcctactacaagcaggtacaagctgtattccaagatccctttgcaagtttcaacccggtctatccagttgacagagcctttgacatgatttttgactcgttctttccggacctaagtcacggggagagggaggagctgatcgcaaaggctctggaggacgttggtctcaaccccgatgaggttctcggcaaatatccccaccagttcagcggcggtcagctccaacgcattttaatagcccgcgcccttctagtcgagccttcccttctggtcgcggatgaagccgtttcaatgctcgacgcgagcacgagaatagacgttctgaacctcctgggggatgtcagggacagacttgggacttcggttcttttcgttactcatgatttggccctcggttactacattagcgatacgaccctgataatgtatagggggcgtttagtggagtttggggacactgagagggtcttcaagaatccgcttcacccgtacaccagaatgcttctggaaagcgttcccgacctcaacgtaaaatgggaattcaagggtgaaattcggcctgaggcggaggaaaggagcgtttacgagatagggggatgtaactacgctccccgctgcccttttgcaaccgagaagtgctggaaagttaggccccaggtcgttgaagttgagaagaaccactgggttgcctgccaccttcacgggggtgagtgaatgcacgcaacgcttagagaaattaagagaactcccgaggggataaaaacagcccagagggcctttgaggagttcgtaaccaatagcgacttcctgttaccgagagaagtggtctacactggttgtggcagttcccacttcctgtcgcagccgctggccatggcaaccacccgccttgggggcaggggagtggccctcccctgctccgaacttctttattcgagggagtactaccctgttgggaagcccgagcttttggtttcaatatcgcgctcaggagagacgaccgaggccgtaaaggcccttgaatccttggacgttccgaaatttgccctgacagcctacgagagcacgctgtcgaggaaagcggactacgccctcatagtccccacccacgaggagagcgtcgtcatgacccactcttttacggccttctacttcgccttcctccagcttctcaacgcctccttcggcctggaaacctacgatgctgaaatgacttcagaactgacgagggaagccctaaagaacgagggctatatacgggagataactggggagtttgacttcaggaacgtcatattcctcggatcgggtatcctttacccaatagccctcgaagcgatgcttaagatgaaggagatggcactcttctggagcgaggcttaccagaccttcgaggtcaggcacggcttcaagtcggttgccgacgagggaaccctagttgtccttctggttaacgaacccttcgactggcacgagaagcttacgaaggaattccaggggcagggagctagggttctgacgataggcaacggagatactggagcggactacttcatcgatcttcccaaagtcgatgaactgctcactccaatcctccatcttccgattattcagcttctctcatactataaagccatcaagaggggcctgaaccctgatcagccccgctttctcagtaaggtcgtaaagtggtgatgggaatgggaaaggttgagtttagcggcaaaaggtacgtcatcgacggtgaacccgttacgatagctgggggcacactccagttcttcagggtccccgccgatgcgtggaaagacaggctcctcaagatgagggaagcgggcctcaacacggttgatacctacgtagcctggaactggcacgaacctgagaagggaagctttgatttcaagggtgaaactcacccacagagaaatctagtcgggttcctggaactggcagacgagcttggtttttacgttataatccgcccgggcccctatatctgcggcgagtggcggaacggcggcattccagactggctgatagacgaacatccggagatactggccaaggggccgaacgggccgcttcctagggacatctactacccgccgataacgtatctccaccctacttatctggaggccgtgggggagtggtacaacgccgtctttccagtgatcaggaagtacctatacactaacggggggccaataataagcgtctcaatcgatgatgagccatcatattgggaaacaatcttccagcctttccttacagactacaacgagataataacaaagccagggggactgtgggagaagtggcttgagcagaactacacccttgaagacctcaggaggcgctacaagggtgatttcaaggactactccgagataaaggttccgacgagtttctccgagcccctaccaaagcttattgactggcaccacttcaagctctggatgatcaacgagtacgtccgctggatatacgagaggatggcgagggagttcgacgtccccatcagcattctcgacccctaccttctccaagtcgcctggaggcacttcttcacctacatgagggagcacaacctcaaaattcatgtctggacagagttctggtactccttctaccgctcctccgactttaaggaggacaagctcggccacatctactataagacgggaatctaccgctaccacgtcaggaaagctggaacgccaccgctaagcatcgagacccagagctcgctggcgcacaccatagacccgactgaggccgagctcctgtactcaatactgccccctctgggcataccgaacatcaactactacctcttcgttggcggggaaaatccagagggatatgaatcacacaacgggataacctgggacgtttactcaccggttggccttgatggatccgagaggcctcacttcggggtcataaaggctctctcagagaccatgacctccgccgagggactcgccgatgccgagcttaggccaaaagttgcggtcggtctctacgagccctacgaagctttgaatctctggggctatgagggccttgaggagagcacagacctgaacgagtacctccttggagagaggggccttttcacgcttttggccatgagcaatactcccttcgatgccgttgacctcgaagatgtcactctcgacgagctcctgagctacgatcagctctgggtctacagcctcgacttcatgtccagggaagttcaggacaagctcgtcgagttcgtcgcgaggggtggaaacctcgttatactcccgatgctcccgcgctacgacgagaatctggagccctacagctctcttaaagacttcctcggcgttgaagttgagagggagaaagccaggaggaacccgcgcctcatccagttcctcagcgtttcagcggagggaatagacagaatgctcgtcaggaacacggtgcgcggtgtgaggggcggagaacccatagctttcctgggggagaagcccgtcggggcgttcgtcaggaagggcggggggagcgccgtagtcctcggcttcaggctccagtactacacgagccaccacgacctccacagaaagttcgtctggaagctcaaggagctccagggggtaagggaggacttcgaggtcacgaacccggacatgatagtccttcccatggagggtaagggctacgcctaccttgcggttacaaacccgcgggggcaccctataaagggcaggataagctacagggggctggaagtcccagtcctcctcgatggcattgaattgaagaggaggggcaccctctacctgccgttcggcgttagaaaaggggacgtggaggttgcctacgccacggccactttggtcatgtgggaaggtgatgtgctgacgttcaggaaccatctttcaggccacagtgaaattgccctgaagggggttgaatccgtcaaggtcagtgggggcaaaatagttgacggaagcgatggagaagtacttaggatagtgatagagcaccctggagagtactttgaggttgagcttctttaaccatctctgttctgctcttctaacttttttggccttcttttggaatctccctgaactcccttctcaatattgccatttgggatggttccagtgcctttggatctgcaaccacgatgagggttgcacctttcagcaggaggttgtccttcagggtggtcagaaactttatcacgctgttgaaaccgttttccagaatcaggtattcgagcccatccactatgacgaccgtgtccctatcggcgctttcaacgagcttgtggagtatcgcaggaaggcggagggggtctatggtgttttcaccgggcaccttgctgagccagaggtaaggaacacccattttcttgaaggggtctggatttctggagagtgcgatggccttcttgccccttataagctcggggactgctgggatgtttgggtctgtgataatgtgtgccccatttggcagatttgagtctccgcttagagcctttgacggggtaacgttaacccttacctttcgcatgtagtcaatcaggtagtaactcccgagaacgagggcgaaggagattattatgtcgtcgaggatcttagtgaagggtgttgggtacatgtcgttcataacatcggcaagaaagccgagccagaaaatcaccgtgacgtatgtgccccttctcaggaggtttgggggcagagccgtctcaaaaatccggtgatatttgtacagtatgaaaagggctaacgtaacgatggctagcttgaatatctcaatgtcgagttttagtgtgaattccaccatgctctcacgatactaattatgacacattgtcttaaaaaattttccttcctctccattaaagccactaggagtccacaagatttatatgtttcgtgcatgcatgcacttataggtggtgcccttgggaaagacgataaccatagcggacgacgtctactacgagctggtaaagatgaagggaaagaagagcttctcggaacttctaagggagctgatcggcaaaaaaaagaagggaaacctggatgtgctcatgatcgcctttggaacgagaacacctgaagaggttgaggagcttaaaaaagagctcaaggaggtcgaagaatggatggactcctggacaccagcgtcgttatagagctcttcgggggaaacagaaaagtcatagagggtctttccccaggtgaaacttacgcgctccccgctatagtcctctttgaactctactgtggaagcttgaaggagagggaagagttaatgcttgaaatgataccgaaagtcgaattcaacgaagaggccgcaaagatcgcgggtgcaatcttcagagatctgacgaagaaaggtcagcggccgccatttaaagacttactcatcgccgcaactgcaatagcccacaattcagtccttttcacctgcgataagggcttcgagcgctttaaggagtacggactgaaggtgaaaattttggaaaaatgaacttccgtgctcttttgttgcttttttgctttgcttttttcgtttgatcggcttgaattttaattattacaagttggttataacaaaaaacgttagttggttcaactaataactgcaaaaatagaaaaatttatatagcatcatacatcattattagtgaccactcggttagatgatgctctatgaagttgaagaacaggagcctgggaatactgctgatgtttttgattttggggatgacattacttaacacggaaagctacgttttcggtgaccctgcccttgaagtggccaaaagttctactaaagttctaccgcaggtttccagaaacgtggcgttgtatctagcaaaaaacgagcttaacagctttccctttatggacttcaaaggggcagaaatcgggaagaagctggttctgttttacttccccgatgggagacccgcctactatgaggttcccctcctcaaggatggaaaagttgttggcgtcatgttcatacctgcgttaaaaacaatgcctcccggatggatgcaggtgttcgaggccaggaagcttgtcagccagcaactggacaaaattgcggaaacaataggaattaagcactatcgctacgttgttcttggggcggcaatgtttggaattcagaccgaggatggcacggtcgttgatttggccggtagggagtacaggatcgatccgagtgcatcattcagattctcaatagaatccaagaaaaacgaggtgctctgggtcaagttggaaaaggatgccctcaaaagttccccaagaaagatcattgaaggggtgccaacttggacatccactgacactggaaacgccaacattggataccctaacaacgtgggtcctgcgccagatccgtggggtgactgggatggctgttccccaatagcggcatcaatggtggttgcatattatgactcccaatttagaagcgcctatatgagggaagcaataattgatattcttcactttacaatgggaacagacagtagtggtagaacagaggcaaacggcataacgaagggaattgaggacttttactgggaggtcatgaaactctataacgacggacatcttagtgttcatccaacctacagctacgatgccacgaatcgtgaatactcttcggactatcaactgttcttagcgattaaaggagaagttgataagaaccatccgggtcttttgaatgttcactggagacttagaaatggcagtattgttggacactcaatgacctttgttgggtacgattcaagcgtcccagcaatatacgtacacacaacatggaaggatctacctgcgggatggataaaggtcggcaactgggtggacgcaatgataacaactgtaaaacccataaagatgtgctggaatggaatatgcccctacgtggcagtaacttctggagggtgatttaaattgaagagggggtttgttttcggtgctgcggtttttcttttctctttgctcttttttgtgcatattcttccagaaaggaatcccgattgtaagctctcggtaagcaacttctccaccgattgcctctcctcaatcccttactcttccaattggcccacgacggcagtacggatttctggagggggattcgtttttttctccgagggatacgtgtatgaaaccgaggacagtgagataatcccaccgtttctcaacggtgagaaaagcagctggaccagaaaactgggtatcacaccacaatgctccgtatggggaggggaagtgaagatgatcctgcccggagatactgcccgtttgaggcattatttccagtatgaacgcggaagctgttcaggtgagaactccaaacttgagaaggtagagatgggcagtaccagttcatccagtggagaggttaagattgcctactatttcattcccctcgtcaagggacgatgggccttctggccagaacccctttttggtggagagactgaaccccgcttaattgaggccggttgttcgtgttccattgaggacatcattgagaaaattaacgaaaatataagactgcttaactttaccgtcgttgaagatttggggaaatggcaaaacggccccataaaggtggtgttttcgaagctttacaccaaaaacggcgagtacatatacgttgaatgcggaaaaatagatgaccttggactggccagaatactggtagtagctggagcgaagaacgttgtagcgccctacgcgaatcctgctgctaaaaaaggatagggagaggttaaaccttctcaatccctatcttcgcctgcacctctggccactcgacgacgtagcccttggcctcctcgaagcgaacctccacagccctcgtttcgcgcattatgtagtcgaggttctcctggaggagctcgcggttctcgtcggtcgtctcgattgttacaactattctgtcgttcacgtcgaggtcgagcctcttgcgcatctcctgtatccttctcacgaactccctcgccagtccctcagccaggagctccctggtgagggtcttgtccacgaagacccttcctccatcgaactcctcagcaacgaagaagtccgggagcttctcctcgatggttacgtgctccctcgtgatgtggaaggtcttgccctctatttcgacgtccatctcgcccttctcgtatagctccctgccgtgctcgcttatccaggctattaccttcttggcgtcgcccttgaactcgggcccaaccttcgcgaagttcggctttatgataagctcgcgctcgacctttccaacgacgacttctttggcgttgagctgatccctgagtatcctgttgatcctctcgacggccttcttaactgtctcgtcctcggtctcgatgattatccttctgacagggtagcggagctttatcctggccttctgtctggcgcttgagcctgcctcgactatcttcctggcgtactccatctctttttcaagctcctcgtcaatggccttctcgtccgcctccggccagtcgagcatgtggacgctctccacaccgacgaagggccttatgaggttctggtatatctcctcggctatgtatggcgtgaacggcgccatgagccttagaaggacgtcaaagaccttccagacggtgtagtaggccgccagcttgtccgggtcgtcgccctcaacccacattctcttcctgatgagccttatgtaccacctgctcaggtcttcgacaacgaagttgtagatgccccttgtagctcttgtcagcctgaaggtctctattccgtcggtgacctctccgatgaggctgttgaccctgctgagtatccacctgtcctcctccctgaagggaagttcctctggattgaccttggttgggttgaagttatctaggctcatgtaggtggctgaaagcacgtagacgttccagaggatgttgagcatcctcttgacctgctcaaggcccttccagctgaagcggaggttctcccacgggttcgttgcccagagcatatagaacctgaacgggtcccttccttccttctggacaacctcttccggccttatgatgttgccgaggctcttgctcatcttgtcgcccttctcatcgaggacgtagccgtgcattgcaacggccctgtacgggacggtgtcgaaggctatgactgaagccgcctgctgggagtagaaccacttggtaacttgatcttcgccctcaactatgaagtccgccggccagagcttctcgaatagctccttgttccttggataatccagggaagcccagctcgctattccgctgtcgaaccagacatcaacgacgtctttaacgcgcttcatctccttgccgttcacctttatgatgaaggcatcaacgtagggcctgtgaaggtcttctgggccgagcttctcctctattatcttcagcttctcctcatagccctccgggagatctatcctctcgccgttgacctctatcgcgacagcgagcttaacgagctcctcaaagcttccaacgacgtagtattctccgtcctcgctctcccatatcgggagcgggattccccagtacctctgcctgcttatgacccagtcgccggagttcatgacgccgttgtcgtacctaactttcacccactcagggtaccaggtcaccttctcgtcgttctccttgattatctggtccttgaccttactgaccttgaggaaccactggtcggtggcgcggaatatgagcggggtcttacagcgccagcagtgcgggtacttgtgctctatctctccagccttcacaaggtagcccttctccttgaggtactcgattatctcagggtcggcgtcctttacatagacgcccttccacttgccctcggtgtaccttccggcgtcgtcaaccggactgtagactggcaaaccgtagcgctggccgacctcgaagtcctcctcaccgtggccgggggcggtgtgaaccagtccagtaccgtcctcaagcgtgacgtgctcgccgaggattacgcggtgcgcccactcgtacttctcgcggaactccttctgagctgggtactcttcaaggaggacatgggtgtagcgtatcccctcaagctcctcgcccttgaacgtctcaacaatttcacccttgacgcctacctcgctgagaaccctctccacgagggcttttgccattatccagtactcctcgccgttctcggtctcgaccttaaccttcgcgtactcgtactccgggtgggcggcaacggcgaggttggccggcagtgtccagggcgttgtcgtccagatgaggaggtactctttctccttccactcaatcgggaacttgacgtagatgctcgggtccttcctcatcttgtactcgccgcggacctcgtgctcagcaagggccgtctgacacctcggacaccagtggaggacgcgcttgtccttttcgagaaggcccttctcccaggccctcttgagcgtgaaccatcccgactcgatgtactcgttctttatcgtcatgtacgggttgtcccagtccatccagacgccgagctgtttgaactgctccgtcatgatcttgaggttgttgagggcgaactccttgcacttctttatgaagttgtcaacgcctatcttggtctctatctcgcgcttgttcttcagcttgagggcctgctcgaccttgacctctatgggaaggccgtgcatgtcgaaaccgggctgtctcctgacgttgtagccctgcatgctcctgaagcggattatcatgtccttgattatcttgttccaggccgtaccgaggtggattgcaccgctgacgtacggcggcccgtcgaggaagtagtacttcgggccgttctccctgagctttttcaccttctcgtaggtgttgttctccttccagaaggcctctatcttctcctcaagctgacctgggttgtactccctaaactctggctccctgatcatggaaaatccctccagaaatgatagtcaatgctaacccagaagagggtctcaagcctcgaaacgggcgaagcggaggataaaacactcccccctcatgggtatcgggcaaagttgggaagtctgcttataaggtttttggatggttctcgggcaatccctttaagccctcttggttttctttgggggtggtggtagaatgaaagtggccgtcggctcaacaaacccagccaaagttgaggccgttagagaggttttcctggggatttatggagacgttgaggtagtccccatcgaggtggacagcggagttcctgaccagcctgtcgggctagaggagactgttaagggagccatcaacagggccaaacaggccattgagaaaactgatgcagactttggagtgggcatcgaggccggcctttaccgggttccggaaacgattaccggctacatggacgtccagttctgtgctgttgttgaccgggagggcagaataaccctcggccacgggccgggctttgagtaccctccaggagtaatcaggcgggtgtttgaggaaggtgttgaggtcggaattgcgatgggtgagctggttaacgaccccgagctgaagagaaaaatcggtgcgataggcgttctgacccatggaatgctcgtgagaaaagaattgaacaagctggctgtcctaatggccctggttccgaggctgaaccctgaatggtacggactgtgaaggtgtgccctccccgaccgccccccggtcaccgctcccgggggtgtgagaggggagggcactgggagttcagcgtttgagaatttaagcgttctcctcgatctgcctctcttcctcgggttctcccttcctcctgctctcgttcttgatgacctgtatgacgtagtctatgaacttcctgacttcctcgaggtcttcctcaggtatgtctgctatcttcttgttcttggtcttgtaggtcaggagcttgaggagcgcgagccttccgagggccgtcttcgtgcttatctccccgttcttccagtccctccagatggcgttggctatgccgtagaactcggggatgctgtcgaggcctgggtctccaacgtcgatgacctccttgccaaggtacttgtagcgcttttccttctcctccttcgtgaactccttaatcctctccttaacgtactcgtggaccattcggcctcacctccagagaaggttggattcaaaatttattaacctttcgttaatttttcctgacctcgttcagaattccactcatgatcagcgccgcacccaggtagcccctaagggagagcgtctcgcccagagctatgtaagcagcgagcgagccgaacactggctcggaagaatagataagggccgccctctgggccgtcgtgtacctctgatacttgagctggaccgtgaaggctatcaccgtggcgaagaccgccgtgtagatgacgcccacccacgggagcacttccctcggaaaagcaggctcttcaaaggccagggcgaagagcgccgaaaagatgaagttccagaacagctgccagaaggtcaggcttagataatccttctcgccgaacttgtggacgaggactatctggaaggcaaagctcaccgcgcagagcagtgtgaggaagtccccgtagtttatggacgttcccgccccggatatcaggtagaggccgatgacagccaagactagcgaagttaagtcccttccggtcactttttccccgagcatgaagtaggctatgaacggtgttaatacaacgtagagggatgttatgaacgccgagttcgaggccgtcgtgtacttgaggccgactatctggaagccgtggccaaaaaagagggtcaggccgaggatgaagccttccttaaacgtctcacgctttagggccctcctcccgaagataagaagcatgaggagtgaagccagaccgaagcggtaggcgagaaagagtatcggcggaaaatagttgagactaaccttcatggcgggaaaggtgaagccccagaagacagtgacaccgaggagtgcgagttcggcttttttcatcggaagtcgtccgatggggagcttaaaaatttactcccccggcccgttgatgcagcccatgttcatagccaggagcatctcgacgaagccgctttcaaggttctcctttatcttcgggagcagcctcaggaactcctccgtcgtgagaggcctcttatccctgagccactttacctccccgtcgttcttatcgaggacaacaacttctccctcagtgattagaggaacgtagttcatcttgactccgtacagctcttcggcgaaggcgagctttgccctcaacagttcgaggtagttggccagctcctcaccaagaagctcccttatctcccttctcattcttccaccgggagaaattgagtgtacacctttattaatctgtcggacatctctgggtaataatggacttccgaaaggcccataaacttccgaattgtatcactcacggtgagacaatggagatgaagtacgcccaccacttccacgcttaccagcccggcgatatagtctacgtcaaggacggcgatgggaaatccccaattgagtatgaagagcgtaagagccccgtctcgattaaaatccgcgacgagtacgtcaagggcgagaactggacgagggccatgttgtactcctatgagtacataaacgacgtcctcggcaggatgaagggcgtgagcgttgacatagagccgttcactttcctcatgctcctccactaccgcaggcgcgcctttgaggagacagtggagcttttgcgggagcttgacgctgtcccgacaacgcccttccatcctatagtgccccacctcgacaggtttgagcaggaaatactcgctaaggtctcctttgacttctactcgcccctgatagagaaccgcccagtcgttggctactggcttcccgaagcagttatcacccgcgagagcgcttcaatagttgaatcttcaactgacagaaagcttgtcttcctcctcgacgagaggcagctcctctacgactttcctcaggcaaagtactcctgcaaccgctatctgaactcctttgtcttcgggagggagtgggagctgagcgacgcctttgccttcaacaccctcgatgttctaggtttgatcggcaagaccctggagagacgggacgaatacaaggagagcgttggtgtcccctaccttgtcttcacggcaagtgacctggagagccttctcggaaaccctgcacagctcgacaggttcatttcctggatgaaaggcctcgaagagaacggcgtcgagagggtttcagctatggagttcgtcagacggaagctctcgggagagttcaggcgccttgatggggagtgctcctttgaaatgggcgtcaaggactactctgcctggagcgactacttcgatctgagcctcgacggcaagacaagcgattcacgctggctcggctaccgcagggccgacggtaaggtctttgcgagggcggttaacggaaggaagataagccagctctggaaggttgccttcacgaggctcttcgaagagctgaacagggttgtgaggctcggagtcctcagggcccttgaagacatcggtgctgaccgtgaaagagcggcggagttcctcgtccgctacgcaagggtcttcttcagggactactatgactactttggcatggacacctccctggactacgtccttgagccggcgaacggagaagagaaggcccttaagcttggtagggtttactacctcatgctcctggccaaccactcctgtccgcgcttctgggagaacctcgacacgcgcgtggcctttggcaacgtctcggtcctttcgaaggcgctcatagagctcatggaatactttgaggggagcgagcttcagggcctcttcatcggggcttacctcaagcttctgaactttggagagctttaccacctctggaacctcggcactcttccgtcgcttgagggctgggaaactaccgaaaaagcctgggccgacgccctagccccagaggttccaaacagcggctacaacgtcgtgacgagagcggctctcttcgtcggaaagcgcgacctcagggggtcgctcagggagctgatagagaactataaacttgaatgggcggtcgcagatactggacacatacccggcgaggcgcatggtcactgggagaaccgggagtggtgcgagcacaggggatagctttttaagttttgtcctcctaattttatgacggtgggttacatggaaaaacagaagtcgaataagaaagtcgagggaatgctgatagattgcctccagcggggattcagctgggagttctgctcaaaattggaggatgccctcaaccgtcttgagaagctaaaacgtgaaacgaaaagaaaagacctcctcttggccctaatgtttaaggccttccttctctctgctaaggaagaggtaggcctcgttctctaaaggcctcggcacgtagtccacgagtatctctgctccttttacagtttcccgcagattctttccaagggccacctggttcttctcaagcagttctctgacgacgtcaatgatattttcctttaccctcttctccgcgtagagcctcttgccaacgagccataccctctcgttctttctgtagaagtccctgcctctctccgtgaagaactccgggccggggtggatttttaccctcggcctctcaaccctgtcgagttcgagcattacgaaggccttttcagcaccgtaccgtccagtgttccaccctaagacttcaaaaccctccctcgaaagggccttctcaaaccccctcgcgcttctctccagctgtgggaagagcaggtcgtccaccatctccggaacgtcaaagagaagcgttattaggtgagtcccctttctcctcagctccgccagatagtcccctccagtttttcccgtagggaagaagaactcaagcgatggcctttggaggaactcgtctgccttgaagtaaaacctcccgtacttctcccagctcaggttagcggccacgttccttctcggatcaacggggtctatgacaacgaggggcttgtcctcttcaacttccctccttactgttttcatcgctatttcgggttcccttttcagccagcctgctggatcaaccaccttttgcctcagtatgaagtcggccttttcgaggacttcaacaaaagagccgtactttatcacgagtatctcggagaggtatcctgaaaaacctcggacgtatatctcgctcccgtaggcttttatccccttgaggaagcgtttgagcagtctaacctcgttgttctttccgttgaggttctcgttcacccactttgtgtggagaattgagcggtcaacggcggttcttacgtccttccagtccctcacgtcgtagcagggaactaaatcgactttaacgtccctgtatttagccctcacgtatggatgctccgcgtaggctatttcgtattctccaagtgttttccctatctccttcccaagctccagtcccctctccctcacttcttcaagaggtgtgtcgagcggaaaagccaagaagagatcaacgtcgtggtctccagcgagataggtatccttggcgagggagccgacgaagtatggcttaacctcgaggccaagctcttgcgccttttctctcgctataccctcaagctcccctatcagttccttaacgaaggccctctcttcctcggttggtacgattttctggaggacttcagcgattacttcttccatctccatgctcacacctgattggagttcgcattgaggtattttattgcttttgttggtggagttagagagaaaagtaggagttactttctgagcttagctaccagagccatcccgacgattaagaccacagctaagataactccaaagtatgctcctttagcctggcctccatctccagtattctgaattccgcgatctggccgtgtggcttcctttatttttgtcacctgcagatgagcttcccccactttcaactccgccgggacgaccttcacgtctggagtgatctccttgaactggacactggatgagtacgcgcggcactcagcgcccttcagcggcaccgttaggagagtcccgttcgagaggagaagaattgaattgttctccactctcagggcttttccggaaaagttaagccccgttagaagttttccctcggcgttgataacaaacgtcccggtcgttgttccgagagcgcaggtgtcatcgttacaggccgctccgaggactttcatgctccaaaacctgtcccagtcctcttctcttgggcaggcgtaggagttgaaccactcaatttttccgtcgggagacacccttaaggcaaagtagtcagctatccacggagcgtcgctcccgccgccgtaaacccctgcaacgagcccattgtttccaagggagatggcgacatctggatagtcatagtatcccgtgttgagaactttggtccagataagggttccatcccgggagagtgcccctataaaaaggtgggactttggatcgtcgggcaaaatgtaggttcctgccacaaggatgtagccgtccagcggcgcaagggcgtttattctcacaccgggagggacttcagctattcttgttgcgaacttgattgtccagagtggttttccatttttgtcgatcactccaacgaccttcccgtctgtgaagacaatacctccatcgggcaaaactcttgcgtcgcggacgctcacgttctttgcccagagcagggttccgttaccgtcgagcttggctaaaacatcgccgacaaggagaacgccgttgtcggctggaattaggcgtttgatatgggcattcttttgaatctcaaccacccatagaggttccaggctttcagtaagcttaacgagggtattgttttcggtcatagcatatataccttcgtccgagactgcaactcccttgaaaatccagttttgggcagatataatgtcagaacacagaagaaaagccaaaaacatggaaatgaggggaaaaagaatacgccgatccatttttatagtaccccctcaggattttgcaaagtactgactggcggatttatctggtgcaaagcatcctccacagtgtgcgtttgcccattttgaatattgacagccgtatccattgcagtttcctccgtacttgcatactaaccaatatggattagtaactattttagtggtgtatttgtatggaggagtcctaggatttgtaaataaatattttccgtaagacgaggaaggtagacatctgactcttcccttgctgaaataacaatcgtattggaatatcaagtttgtctcttcatatcgctgtgtttcctgccggtataccaaagcagagtaaaaaaactttatctgaacagaacttactttaagctcccagtttctgcttatttcttgggcagtctcccaatagatgttaataattgttgattctttattatctgggggaaaagtgtaagtgcaccaatctccaacgtggtaatccttattagggaattctgaactgtacatcccaacccacacagctacgggtctgaggttgatgaaggtgtaagtctgatagcttttaagcgcaggtaagagtctataaaagctcaaacaacagtcaaagtcttcgtcgtagcctttttgaatttctctacagtttatttttccgttactttttaactgacaattgtgatcgctattagcactgatggctaagctattgctattttttgagagaaaagatctaactcgtaagttatctcttaatgcagcatacgctcttagctgattccataatattgattgattgttcattaatgaaaagactttgctgatgacgtcatctcccatggcagttcctgaagagatgttttcaagtatgctgtttattttgttgtcaattaatactattttatcaaaggtcatttcacccataattgaaagctttattatagcgtcctcagggttccttacgtctttgaagttaggcatggtcttcttatatttgtttaattcagcacttgttactccaatgttttcgccgtttaggtattgtctatatatctgtgtgcttcctgcttttctttgatagaatgctcttttgctttttgacacttcaatatccctgtggagttcaactatttccttcagtaacttggaatcccgtgttgtctttatctctttagagatctctttcaatctgttttctttttgagtgatatctaatgtgagcttttgaattgtcatatttatttctcgtaatgcagtatctgggtcaaaatttgcgcatacccttgtattggtctcgttgtcttgaggtagggatattacctgagctggaggattgttgaagtcaagatttactgcgctcaattcgagggaggcccccaagacaatcattcctaatatgactatcactataattttccactgcattaggttcattctccataacttatcttcaattcattatagtatccttgtccttataaatatttttgtcattttctctaaattttttatgttaacttgaaatgaaaaaaattgttcttggatgtggtctacttttatgatatctcaaaagaaaaaatctgaataatggggggcataggcatgcaatcgaaagaaaaagatttgtatcagtcaataaggataccgaagttctccagaaatgtccacaggccccttacagcttcaatcggccagctcaaacctggcaaccgtctcgtatatcgggccctttggcgttagcgtgctcttcttcagctctatcgcctcgacctcgaactccccaaagtcctcgttggcgaggtctttcagcgccatggcaagctcaagcttgtccctgacgaacttcaccctgccaatagtgatgtgggcgacgaagtccttctccttcttgaagccgagcttcctcatggccttctccacatcctccgctatcgcctttatcccctcgtcgttctctattcccgcccagatgaccctcacgtagttcgggttcgggaagacgcctatccccttcaccctgacgcggtgtttcttgtgtttctttgctatctccgccagtgccctcttaacttcctcggcggtcgtctcgtctatctcgcccaggaacttgagcgtgacgtgaaagttctccctctcgacgaactttatcttggctgccttgttccctatcctttcctgggccctgagaaggttgtccctaacttcgtcgctgacgtctatcgctatgaacgccctcatgatatcaccgagaagagtgggagcggaagaataaaaacctcactccctcacaacgaccgggaactcctcccacgggaagacgatccacttgtccgtcctgaagacgtagaagtccgggacgaccttcgtccagggcttcatgctgaggcaggcgaccttaacctcctcggctccagctttctttacctcctcgatgacaacttcgagggtctttccggtgtcgcttacgtcgtccacaataacgaccttctttctttcaagcgagccgtggagcgggatgtttatgaccggcttctccattctctcatctatgtccttgtagaacttgacgtctatgaccttcacttcaaggtcgccgaggatgtggctgagcctcacagccgggataagcccgcccctcgcgactccaacgatcacatccggcatgaagttcttcctcagctcgtccgccagggcgaatatggccctgtcaacctgccaccaggtgaggtaaaccttgtccatgagcatcaccccttaataagtccggttcgtcttctcaaacttaaactttcccaatgagtggcagaagttaaaacttcccccttaaaaatgatactttgacaggaatttgtaaaaatgccgaaattggagaaaaggagagagttcagcttatgacgcacttgctccagccgcagcgcgggcaggttgcgcagccgctctccatcctgagctcaacgagctcgccgtccttctcgtagcagaccgggcagtaggcaactccgaggagctcccttatcttctcctctgggatatccggcctcttggcgtggtgcgagtgctcgtgggcgggttttacggcggagacgtgggaaaccgagaatgtcagccctccagcctgggcgctcttctcctttccgttcgtcccgttaaggatggcctcgacgttgatgaagcgcgatagccacggctcggcctctactatcgtcttcagcttctcgacggcgtagtcgctcggcttcgcgggaaccctcttcttcttttcaccctcgacgctgtagacctgaaccgacagcgagccgtcgcggtagacggttacgcccttacagccgagcttgtaggcgagcaggtaggcagctttcacgtcctcgacggtggcatcgttcggcatgtttatcgtcttgctggcggaatcagtcagccagagctggatgttggcttgagctagaatgtggtcgagccagtggatgtccatggccgttacaaagaccctctgcatgtcctctggaatttcctcaaggccttgaactgaaccgtagttgtcgcttatcttcttgagtatctcatcactccagagcccgcgcttcttgagctctgcttcaaacacggggtcaacgtagtagaactctccaacggtgacgctcttcttgtagacgagggcgaatataggctcgattccgctggaggtgtcggctatcatgctgacgcttccggtcggcgggcaggtggtcaccattccgttcctcacgccgtactttttaatctcctcaacgagttcgtcccagggcaggttccatatctccctgtggtagaagccctcgacgggcagttctccgtccttatacctggtcttctcgtagagcgggaacggaccgcgttcttttgccgcttcaacgctcctcttgtaggcgtagaaggtcaggtactcggtggccttcctcatgaagtcgaagccctctttgctgttgtagggaatgccgagcttgaagagcgcatcggcaaggcccatcatgccaactccgatcctcctcgtgagcttggtgttcctgtctatctccgggagcgggaacttgttgacatcgatggcgttgtcgagatactttgcgactttctgaatgacgtaggcgtactcgtcccagtcgaagtacggcttgccttcgtcgtcgtactttacgaactttgcgagatttatggaggccagattacaggattcgtactcgtagagcggctcttccccacagttgtggctcatgaagccgttgcttatgtagctgtgatgctctggaactgtgaagtcgtagacgatttcctcgccaaggacttcaacactctcgacggtgaccacaggctcgtcgatcttggttttctgaaggctcagcttctccatcttgtagccctcgaagcctatcttctcggcgaagagcttcctgctgtagttagctatgacgagctcgtagtagccctccgccctgtaggttctctcctctccatccttggtcgtgtacttgaactcgcttgaataaggtctctcgtatatcttggagagtattccaaagagcaggagaaggtcctgaacatccctgaggagccccctgtccttcgatgtaagccttaccgcattgtcgttgtcaacgtagccgtcggcactgaagagtcccctgaggaacgccgctatttccctcggcttgagcctgtagattatctctggtactctcttctcattgcttcccatgatgctctcaagccacctgtaggcttctcccctcacgccgagctttatctggttgccgtagcggtggggctcggctttaatgccgaagtgcttcgctaatatctccctgattttccacgcgatatcttcctctttctctgcgttgaagtagaaccaagccctcttgtcgttaacgttgaggtagccgtcccctatgaaccatccgaggacgaaggcgaggtcttctcctatgctctcgcttccgaagtcctcctctatttcaaagcgtggaaggaggatctcgtctcccggcttcagctctccaacttctttccagccctcggaagtcataagcctgtggtcgagtgtcgccgttatctcgtagccctgctttgttctgacccttgcgaccttcttctttccgaccttccagacgtaggccgggacggccacggggtctgctattgcgagggcctttccatggacggtctcgtacttgacttcctcctcaccgggcaggagaacctccactgagtaggcgtagggctctccctcctccgctattccctctactgcaacggcctccttcttacccctctccttcgcgaggctgaacagttcctctgccttgatgtatccttcaggcgtgagaaccctcgtgtccccgacgacacacgggttggtggcgcggattttttcaccctttgcaggctccaggacgttcctcctgttgatgacgtcgaagaagacaacacccgggtcggccttggcccaggccatataggccagctcttcaaacaggctcttggggtcgatctccttgaccttttcaccggtgcgcgggttgatgagcgggtagcgcttgccctctttgagggcctcccagaagtcctcccataatccaacgcttatgttgaagttgctgaggacgttggttcccgtgttcttctcctttgcgtggatgaacttctctatgtctgggtgccagacctcgaggatgcccatgttggcccctcttctcactcccccctgctttatgacgtcgctgacggcatcaatgaggtgcatgaacgagactggaccgctcgccgctccagtggtggtcccgacaaggtctccctcgggacggagcttcgagaagttgaggccggtattgtggacaaagaccatcccgttttctccagcgagataattctggtacctctcaaccgtaaggtcgtagaaggtctttggctcgttcgtgacgttgatctccttaacgacttcgaggccttcaatgaggtggagcatccttttgacgtcctcgctctttgtagtgtcgtagagtttcctcagcatcttcactagaacggccttggaaacgcgtcctctcctgtgccactgaccaagagataccttttcgttctttattatagccaatgtctgactgccgtttgtcttgaactcaacgccgtactttgagctccatgccttaaaatcttcaaagctgagtgtaagaccaaatgatccaccattatgtttgctgagaagttcctcaagctttattctcttctcagagttctgaaggttctttcctatgagttcgtagaacctgaggagtgaggagtactcctcaacatgcatgacgtaatcaacgccgtcctttctcggcttcttccgcatcctggcttttatcccaagggaattgaggtagtatgtgatgtcctctatcagcttcctgttcaccattccaagttcaacaccaggtttgctgttaacgtgtccttcggcgtcaaagaggccggttatgaacgataatactgcatttctgccttctttgagtatcggttgtggaatcccatttgtaatacctctcagaagctctatatagtgggatgttatcccctttgcttttatgtcaatgtaatggatgtttctgtccctctgaaggctgtacctctttccaaaggttttttcaagatgatcattgattatcccgagtgtttctgttgtgtagtcgtatatccttagcctgtcataaacgtactcgtggcctttgacgtgagagcggtatttgtctatgctcccgtcccctgctatgaatcccgcgagccagtaatccaaaaggaactcatagtcatcatcacttggcattccgccaactagcatatccccttctctgagttcatcggccctcttctcaacaatcttgaggtcctgtgtgataacaaagaacggatgccatggcgacgttagaactcttgtacccttgttagtttttatctcgtacttaggaacatcctcgccgagctcgtacttccaaatgactttcacctttcctttggtgatctcctttgttgatgggtcaaaggatttcacgtatactggaacttcttcgacgtttatcccccagcggttgtactccgggtcatagaactcgccgaggtctttgtacctctcgtacatctcggccatcgtcatgatgtgttcttcgccgtcgttttcaaagattattttggcgtttccgtctatacatccccctccggccttctgtatcatcgccacgtcgtgggccgctttcatgatgctctccatatcgtcttcaatcgggacgacgaagcaggccgagagcattccaaggggccttcctgagttgatgagggctggtgtgtttggcatgaagtactgcccggtcatcagcctgaagtactcctctatctcgtcctcgtaattgtcaaaagcgccgttctcgagcatcttcaggacttcgtctatggggagcttcatctggcccttctcggccagctcgcggtagaggttgaggagccgctcaaagtgccacttgttgagcctgaacctgcctatcgagaactttccgtcgtactcatcgaggttttcgcggtatctttcaatggcactaacgtcttgttcgtgtccgccgtttttgtcaaagaccctctcgtcgtagaggatgtctgggatgactgcaaggattgcaaccctctcgaaaagctccctcgggctctcgattatctctcccttctcgttctttatcaggtagcgggaagcgagaacacggagtgcgttgagggaaaagcgcttgtcaatctcatccagcttgtccttgttgagtatcttcttcttttcttcacggatttcggccttcttcttgcggtagaggatgtaggcctttgccacatcaaaaagaccagcgcgcatgagctcaagctcgactatgtcctgtatgttctctatgttcggaatctggccgtcatagagctcgtttaccctcctcacaacgcgcctgacaaccctgttgagaagcttctcatccctgacgccgacttcaagcattgccctctgtatagcccaccttatacgctccttatcaaagggcacaattctaccgtctcgtttcatcactttttcaacaggcatataaacacccctgtcataattgataaacacatacgtgtctattggtattatggacagcgggtagggctatggaggaaaaggtacatataccttaccctgcttcagcttggcatgttgacaaaaaatgtctgtgatgtttgcataacggtgcagccatgttaaaaaagggggcatcacaatgctggacgaattatccatcgatcttttcgtatataagcctcagtctgtaggcgtgtttcagctcttctcctgccatcattcggaatatctgcgacagacttccctccaggatgtgcgagagctttgtgtagagttcgtacgcatgtttctcccttatcaatgcctccactatcagctcctcgaggctatcggggtgtgccctttcgtcgtgcaccatcggctccagttcaagctcgtccatgtaatcgaggaggagcccttcgattgtaccctccgaaaggaggccttcaagggtctttctatgtctaagttcttcctcggcgagctgggcgaagtcgtccctcaggtcgggcctctcaaagagggcaaaggtctcaccgagcttgtataggttgtagagctcgttttcctgccagatgatcttctttatgagctctcctgcgtccatctaaagggcagcctccagataccttttcagctcccccacatcggggagaacgaggttcggctttatcccgctttcggcaacgtccttgagcgtgcttacacccgtgagcaccattatggccttcatgccgaagcgctttgcgaacgctatatcggtatcgagcctgtcgccgaccatccagagctcttcaacgtctccaagtttgtccttaacgacttcataggccggttcgtttggcttgcctatgatcactggctctctgtccgttgatgccctgagggcggctattattgccccagcaccggggtagagcccttcctccgctggatatgtcgtgtccgggttcgtccctatgaagcttgccccgttccttatagcgagcgttccgtacttgagcttctcgtaggttaactcggggtcaaggcccacaacgacgtgcttgatcctcttccaggcgcctttcctagcatcttcaaggctaacaactccccagccgaggcgctccatctccctgagaagcccctttccaccgataacgaaaacttctcctggctcaaagtgcttctccatgtagagcctcgtggccaggcccgacgtgactataacatcttccggcacgtctatgcccatcgagaggagcttttccctgtacattgcggggtctctcgtggagttgttcgtgaggaacaggaagggtattttcctttctttcaggaactcgatgacctcttttgcaccatttatcggctcgctgcctctgtagatgacgccgtccatgtcgaagataatgccgatttttctcgtcatgagggaaaagaggaagagggagtttaaaagttcactgtttatgaccagttgttgctactgacctcctccccgccctaaaggacgaggcttgttttaaagggaaaagtcagctttttaaatgcctgcacgtgaccaatcaatgtcatgaaaatcgcttatgtgtacgatgcggtttatccctttgtaaagggtggagttgaaaaaagagtatatgagataggtagaaggctggcaagaaaacatgaagttcactggttttctctgaattgggatggggagctggacgacatattggtacacagagttggcaactggaagcgtttttatcatggagatcggagatccattggagaggctctgtactttgcccaaaagctccttctaaaatttgggggagagtacgacatagttgactgtcaggagttcccgtatttctcgtgtttttcgactaaactccacagcatactaaagagaactcccctggtactcacgtggcatgaagtctgggatgggcattggtatgagtacctgggaaaactggggggtattggaaggagagttgagagactgaccactagattaaccccccataatattgcggtttcaagatttactcaaaaacggctgttgaggtttggtgttcctagtagggttataccaaatgggatcgactttgaaaaaataaggtctgtcccccgtttagagggagttgactatgatgtactctttgttggacgtttgatacgtgaaaaaaatgtagagctgcttgtacgtgctgtccagattctcaaaactgagataccagacataaaggtgctaataattggggatggtcccgagaggaggcgtttggagcgactttcagaggagctcaatttggttgaaaacgttgattttaagggatttctagatgaatatgaagcggttatttcccacatgaaggcctcaagagtctttgtgctaccttctatccgtgagggtttcgggataacggcgctggaggccaatgcatccggcattcctgttgttactgttgttcatcccttgaatgccgctgctgagttgatagttcatgaatacaatggatttctggcgtttccaaatcctggttctctcgcggagagtattctagtggcgctggatcacggtaaaaagcttaaaagaaattgcgttaggtatgccaggaactacgattgggataacataacgaggttgatcgaaaacttctacgagagggtcgcagatgacagttgaagtctccgtgattttgcccacaatgaacgaggaagatgcagtgaaaataataatccctcaaataaaggagactctggaaaggttgggcgtttcctatgagataattgtggtggataaaagtacggatgcaacacccaaaatcgcggctgaattgggtgcgagggtaatccgtcagaaaagaagaggctatggagacgcatacattgaggggttcaaagttgctcggggaaagtacatcgtgatgctggatccggatgggagctatgatccccgcgagattccgaagttgctggaacctctactgaaggatgaggcagattttgtcattgggaccagacttaagggaatgatcgaacccggtgcaatgccgtggcttcatcggtacataggaaatcctcttctgaccaaggtcctcaatctgttttttaaagctggagtctccgatgcccactgcggcttcagggcgataaaaaaagaggcattgcagaggcttcctctgaaatgccgtggaatggaattcgcaagcgagatggtcatagaggcggcaaaagcaggtttaaagattagggaggtgcccataacttatcgcccaaggattggggaatccaaactgagttcgtttagggatgggtggaggcatctgaggctgatgctactttattcgccatcccacttgttccttcttccggggttgtttttgatgattactgggatagttctcctggcctacgcttccaatacggacccgctcagggtacatactatgattctgggaagccttttgaccatagttgggttccaggtgataaactttggaatctctggaaaggtctacgccgttagggaaggactcgataaaccagataaaatcacgaaatttttcatgagatattcgatattggaagaaggccttatgtttgggggaatattattcatcgccggtttaacattgggaattagaatattcttgaagtggagagctttaggttatggggaactgtttgaaattaggtcagccataatagtgctgaccttgatagccatgagcatccagctgatattcttctcgtttttcgttagctccctaatgttgaaggaggagtttgaatgagggttctgctcgttgctccctatttttatccagaaggcggcgggctggagagatacgcctataagatggcaaaggagctgagcgaggaaaatgaggtggttgtcgtatgcgcaacaaaactatatgaaagaactgaaaaaattggcaatattaaagtgatacgaaaaaaacccaacctcattatctcgaacacacctgttagggttctcctgccgttcgagcttatacggatgattaagagacagaattttgacgttataattgcccacacaccggtaccgttttttgcggatgttgcctcttttgctgcgaagcttatgggaaagcctataacaattgtttatcacaccggcgagctgaagaagggttcctggactgatgtcctggcagggttttatgagagaacggttgaaaagatgactttgcggaatactaaaatcatatcagtttcccgatatgtccagaggattttggggaggaaggggtttcattcaaaagtggaatacccgaagattgatgaggcgttcattcttgaaagacccgatttcagaggtgatgggaatactgttctctttgttggccaacttggcaggttccatagatggaaaaacctcgatttattgttaagggctttggttttggtcaagcgggaaatccccgatgttaagcttgttgtgatcggcggaggagacctaataggctattacacgaaattagccgaggatttgggcctggaaggcaacgttgaatttcttggacgggtgagcagggagaggcttatcagcagttataaatcggctaaactcctggttttgccgtcatccaagagcgaggcctttgggatggttgtcgtggaggccctcgctttggggactcccgccatagtcagcagagttggggaatttccggtaatcgttgatgataaaaagagcgggctcctggctagactggatgagcgggatatagcagaaaagatcctttttttgcttgaggatgagaagatgaggagaaaaatggcagtaacggggagaaaagcgattaaacgctttatttcctgaatttccagagctttaaatcacttgaaacgacgtatttctttatagcacctttctcctcagcatgaattagcaggtatgggcccacggaatagatttcaagctcacggatttcttggggattctccctaaaattaacccagctcttgaacgttatcaaccagtctggatcgagctctacggccttctttatgttcctgtctgcccaggtccaatttttaaaaccaatgagtgcgggatggggggttccaacgaaaaactcttccggggctgccctctcttttaggatgttgaacaccttcctatcgtaccagtagccgtagtcttgaattccctttgcccctatgtcgctgagctttaggacggcggcgttgaggagaatgagctgtacaatcagaaacagcgctatccatttctcgacagttagaatattcaggggcttaattttcgatttaaagttgttgtagagctcgattatgccatacccagagaagatgctcattaacgccaatggtccaaaggtgtagcgctcgaacgggccgttaaggatgaatccattaactccgttcagcgttatcactgatggcagtatcattaacaggatgtccctatgtgttttgtcgtgttttgtcccgtatataaacccaacaactatcaggacataagcaactgaaaattcaagccagctccgcgctagtctcagcacaatgtagcgggctccccatttaatgtgtctcgcgcattgtagcctatgggactttggtatacactgatcgatgctataaacaggaaattcaatactatgggaaatgccgagatcatcagaattttcaagaactcttttctcctttttctccacgcgtacaccaaaaagaaaggatacgttgtgagccaagtttccctcgcacaaaaggccaagcccattgaaagagatgctgtaaggggcttttcctcgaaataatagattgccgagagtatgaagagcgtcccccatggctccagagtgtatcttgccccgtatcttaaagctacaaatgaaaaaaggaacattagagaactcaggaatccagctttttttccatgatatcttttggcaatttcatagatcaggattgtgtctgttagcgttgcgaaggctgttgcggccctgggtagaaacaccctgaggtcgacactatcaaatgccatcaggggcgacgttagaatgaaaacgagcgaagatctgggcagaaattcgaagtggagtactttcattgagatgttcaagtataacatctcatcctggaaaagcctcaatgtgaataaggggataaagatcatcacaacccagattaggactagtttagttctctcttccatctgttgattccctcattatttttgtttttaaggcttgatgctctacccgctcttttcttttttgcttttactctttatttcgtagattatgaatccttcctcggtttccccaactatctcaatctcttcgatgctcactttacccttggggactgttgctttagccccaggtggagtttcaccgttctttgattgtaacctcagcaagccgacaacggtccctagggcaaaaattgctatcgccggataaacggtgaacgtgtcctttgataggtacatcaacaatgcgagcaggtagacgctggagacttctcttatactttccctgtcccacttgggctccaggtactcgacccactcgtttagaactccaactaagaggagataatacaccacgattgccacatcgttggcgtagttctcggccccaagcgctagtatgaccgccgctattatcagtcccaccactgcgaagaacacgaatctctgtccgattgaaaactccctgtatgttttaaccagcaacctccagtatcttctgatcaggaggataatcccgaggagtgaaaacgctgagaacacaactagcaaaatccattcgaggtttggctttaccgttatttccccttccagctctttcgtctccctgcccgcgggagttatgtagaacttcagggtgtatctgccggggggagtgatcactgggagtttggattcctggaatatgtggacagtttttccctccctgtattcgcgccaggaggggtgctcgtacgagaacactttgattccaaggtaatacacatcgagccttatgtctatctcatagattactccctttttgttggttatgtagaagtccgcccttatggtatccccggggtggtaggttttgtttagaaagacttcgactttgatatcgtcatcgtcaattgaaagcttttgagagttttcatagggtatggttccttttccaatttcttgagatgttgtggtttcggtcttttttggtgccccggttttagttggggttgtgctctccatctctggtttttctgttggcttagcttcgctgacggtgaagttatcaatgtaaaccatcccagtgccgtttatcgcaatcaccagggaagaaaacgtcgccccttcagctggtagggcgactatttcgacgtttttccatccaaacgagccgtttcctacgactgtaacgttcttggcgaacatgaaagttctgttttcgtcaaaataagcaatctccgctaaaacgccgttggtactctcgctccttattgagaaggaatatttcagggttgtatttattggaaatagtggggagattagggtgttaagcccgctccgtgtggaggctgcttttattattccattttccatcagggttatattaacgccatggcccatccattctttctgggccagagcgaaagtgaacaacatagtgattaacattagagagactaactttttcataggattcacctattaaagtctttgattcttgcataagtctttatgtcccaattttggtcatgagctttaaaattttcttaatgtgggagattttgggaagaaaagaaacagatagggatagaagaaacacgagatctctggtgatactaacgttctatcgctagatcagcgtaaaaaaccggcggatgactagcttctttgttcatttacttttttcttttgaaagcctcacccttcggggcggaaggggatcaggcttcacttaccggggatatttgcttctgggagagtctttgagaacagaccatttataaaacaatagaaagtacggggatatgagatcagataacgggcacactccctaccgggagtgcaccctcattatgacgtttaatcttcaggtataaaaatctatcggtcagaccccgttagcgtttgtctcgtagcgttcaatgatttccaatatagaatgtatctctattggatatttaagtacttttttaagatactcagctcttttcttgctttcatctccgaagcaaacaataatatcattctctcttatattataggcatctttttcaagcgatataaatttcaaccctcccccaatatcggaggcaaatctaagaagatattggaaggacggggaattctctataactgttctttcttcctttcccaattaatccttcggttaaaacataaagcattggtcttgcgaggtagtctctaattggaatcttcctgtgtgaatatggtgctaggtatttaacatctctgtttccactataagatactttaaaattatcaagacctaagtgcttttcattaagctcatacatctctctaactcccaggcggatgttttgttccataattttcctataaacgtattcgactatgatgtctgcagtggagataaaaagattaacttgatccccctttgggaagataactggccggttagatactgttatatcatcccatgcgtaggtatattcctgttcatcgaaattgtccagataaactttgatgccgttaagtccaagctctcttattgatttccatgcggttatgtatgagaaataactcgttagcttgtctataaacttcatgggcttttccgtctttactgtattgtccttggagtaatatttaacctcccttaaacgcttcgtgttgaatatagagaacacaaaactaacggtgactttagattcattgattagggaaacaaagtcctctataatttcgttagatttatcatgaccaaagagcgactttatgtctttgcttttgaatacgtatcttggattcttagtgttgagattacctttaaggctctcaaaatagttgatgtaattctctttgaattttttggggtcttcgaacaataaagcgacaccaatgtttgccttaaactgctttttacgtacaataacaagtgactttgagtctgcagacaatattttatccgtcatgtgatttccccgatctgagtatctcctatgggatttattaaattttttacaaatcttcagtctgtttattgttcttgaaatatcaacgtgaaaagtttcacaaagctgaactcgtgacccgaaactttctctagttaagggcttaattttcgtttaactttgctggttagttttttgaacttcttctctagcctcttggcccatttgtcccccttttctcttctccagtcgtagaagatgtagaatacactgaggaggaaagttgttaaggataccatcagtcccctctcgaaccagtcctgaggagtgtatctcaggactatttcaaggtcccctgtctgattaatccagaagccgttgatgactccgtataccggaactggggagactttttccacgagtttgccatccttgtaaactctcgcctcccacagcggatcataggattcggcgaaggttaacatgaagggctttgttgcgttgactttgaccttccagagggttgggttgacctttgtgtagtcctggactgtggcgggagtttcatttgtttggaagagttcttcgagtgtttcgtttttatcagttgagtagagccagaccacgtccaagagggcgtcctttgatgtaggggttatttctaatttgtattctccatttctcaagtagaacagtggggtatattcaaatgttgaattgtttacagttaaaacatacttatagtctcctatggatatattaaatgtaccattgccctttaatgcaagtctgtaggtactgtttttcactatctccacgttttgccatgcttttcccttctggtcgaattttatggcctctccgttacttgcgttgaagtcttttataatctcggtgttttccctgtataaatcggattctgcttcgaagagatatattatggttttgttctgcaatagttctatggcctcttttcttgctttattgtactctttttcaggtatcaacgcaaatagattaactgcgttaaatcccctaacgttctcaaggactatcttgtgttttcctttttcaagcttgaatgttcctagatcttcccaaacgaatttgttaagctggtctttggtcttgatataaattggagttccatctaaataaacccttattgcgccgcccttctggttcttaaagtagcggatgaaaagcttgtaattgtcagttttatcgactttgaagggaatgtccagagttacgggtttggtatagtttgttatgtcatagactttcacgtcatctatccagattatgttaggtagcggtttatctgtttcgtggccatgccatatctggagttggatatagcgggtatcttcactttggggctggtagttgaaagaaattgttttccagttgaaagttccatcacctataaaagggtaatataagaaagagcctttgatcagcgttttattgacatcatattctttaacataagcatgaactacattagtattttgacctttaactttaaacataaatctgtagacgtgatcatatttaaccggaatcagaggggatctaattgtcttccagacccaagttgaattgtaaagttctgctctaagagcttgcacactttcgtcccatgaaattgtttgaatagcactaaactggatttttggagtgacattttcccatgctttaacttgatcttgggatgtaaagtcccaactggcaattaaattggatataggcatgttttccggtaaatctgccgtgggaggggcccacgtgagtactgtattttctccatagagaggggctatagcaatggagggattaatataccaactaagcaaatcagttgcccagctcttctcaggtctgttgtttggtgcgtttggcgttacaaataaagtagtgctcaaataggagtccatcaagtataaatcatacaagggttcgttagtgaatacaaatgtgttgctgatattattaataagtggaaattctcttaaatggacattcaaaattattgcaaaattattatctaaataacgaactccggacaacaaatcgtcaaatgaagagaaaaccaaaggagtcccgcctacattgataaacggagaattatctatctgaactaaatttatgttgttaaagttcaatatttgtcccctatgttttatattgtcacatcgaaggcttgtattaaaccagcggtggtatagtatagtactaccataaactttttggaggtatctcaacattggaacgtaatatgggtaataggatgtacaattgggtctacaaattatatattttacactgatctttccgagtaattcatgaatattctctattctttcagggtgttcaattgaggtcaacacataatattgtaaaatcccttcggaagggaataccctagtcacatgctgtggaaacgttggttttgggctatatttaatcatcaagtccacagagccccgatttatagtagggtatcttatagggcttaaggatggtacataaactacgcgatatatccctgattcatttttcagaaaattatacacctcaatgtcgctgttcccataatttaatacgtttaattgatgcataaacgaatttaacgaagggtatccagaagatagaattataaacaataatatcactactaatagatttttcgatctaggagaggagagtttcttgtgaagctcttctatgagcattccaacaagtaaagtatatgcaaatgttactataaacattgaatgatatacctcacgaaatactgaaagaattggaattttaaggtagagaagtttccacaattgggggaatggtccgtttagagcagacacaaagaataatccaatagaaagcaatgagagtgagtacacagcgagatatgcttgctcttttttgttaatagcaaagatgcttgctataagtgaaagaattgacaaggataacagagagtatatgactaaactgggcagtttattgtgagtatagagataaaatggatcataaacatgactatatccagtcattaaaaatgctggaagaagcttaggagcgttcataatttcatgataatcaattggtgctgctttatttatcacaagtttagatcctggattcataaacattgttaaaatccaaaaagagttaagtatgataaatagcactataagaatagcgatggcttttaatgatattataagtgaggagtagtttctttttgatatagcaaatatcaacaagtacagagccgccataaacgctaacattgggggaaactgcacttgaacagccgacatgccaaatactaatgcggctgtgagaatatatgaacatctttgtttgtaataaacatatttgtgtaaaaatgcaaaaaacaatggtgagattgcatatgcaaaattatagagatgatatccagctatgattctattataaagtacaggagtcaacatatagaaaagacccataaagaatgcggacttactagagaatcttagtaccttgcctaaatagaacatggtcaaagcagaaaccaacataataatcggaacaataatctttgataatacctcaccattaaatctgaccaaaactgctagtgcgagctcaaagagtctttcatataataaagtgtttggaactcccgacacccccctaccagagatagaattccaagtaaatattgcttcaaaaaacctgtcccacacttggccagggaggtacgggattctccagtcatgtctaaatccgataacgcctggagaaaaaatatagtaagcatttgagaggaaagacactagtgcgtatataaaaccaactcgtagatatgtataacgcatcctttccatatttaccccctgtttactacggttttatatctaaatgatctcttattatgttataaaatcgaaaactatttgaactgcgaactaaaaaaacttggtttcgttttaatagtttccaaagaagttcttcttctttgtttagtaattcatcaaggttgtaccaatcatctaataaaaaggatgatgcacgtagcaaagggtttttgaaccaggaaaattcgtaccgttgaattgaaagtagtattttcataatatatctatggtcaacatcctctaagggaataattttgtcatctattcctttctgaagtaaaaatattgaggaaatattctgaggagtatctagtattctacccctaaaaagggatcttcctgttggtttatattttacacgaaatagtccttcaatatgcccaaagcgagtttcatgatggaagaaagttgaagtatgaggtgtagggtatacaaaattccgtttagcatctatgatcacagtgtcttctccgacgtataataaatttttatgattatttagaaattgtaacacagtagtggtcttacccgtatttggaggagcaataaataaatatgcaccatcattatccgaaataccgctagcatgtaatacaaagaagttacgcacaagaagttcaacaaagacataatctaataacaatactccaggtggatatgccgatccaatcttctcttttactaataagaagtatgtgggattaacttgaatctcattagtattgggtctaaataccaaattaagcatgatttttggaagtatgtgattggagtagtatatagaaccatctcttagaagcataaatctatcaaatactttaacgacatcatgtttgttaatatgaaacttagaatccacttgaaatctgaaccagaatggtgttttttctgtggtgtccttggcatctactaaaaaaggcgaaattgaaaaccctgggattatctctttatttgtctctatagtaattagtttgggaatggcctctttttggatcaaaatcagacccccctttggattatcatcagctcttttccagctatttttctccaatcatatctcttaacaaatctggctccattttctcctactctttttccaacattctcattctcaagcaattcaacaactttcttagcgaattcttttttatttcctcttggaatccagataacgttgtccttccaaattggtcgtatttcgggtagatcgtaacatactacaggtaatcctgcggccattgcctctccgattactattgcccaattctcttcatagctaggtaagagaaacactttgctttttgccagtgtcttaaatttctcttcgaaatcatatattggacccagaatttttacgttttcttcgagcttcttatccttaatcattctttctaatttattcacatttgttttggttccgtgaccgatcaaaatcagttttgcatctggaatctctgagactacatgttcccatatttccactacatcgaagacgcctttagtaccgtcaaatcttttcataaatactccatcgaattgtttctcttttattttggatgaaatttgtcttattctctcataatctacacctgcttcaactacccttattttggactcaggtatccctattctttttaaatcatttccagttggtttggatactgctaaaaaaacatctgagtatctcttaccaacaaaatatcccacgcgttggttaatataaaaaaggatgctatttatagccgaagttcctttccttattagtggtgcaacccaatgagctactattgcgaatctgttctgaggatttttccttttaattaatgctccaggaataacatcataccaatgctctgtggaagcatagattattccctcaaatctcatgagttcttgggggatcctgaaagaattaagggcccttaaaagatacccccttattgaatattcgcttggcattttcatcctgtggaactcagctgttagccctactcttttgcaaagttctattccggcgtcttgagtcaatacatggatttcaattcccatctcttgccattttttagcaatttctatccatcttatgtctccaccacttattcctggttttccattttcagccccaatgccatttgctatgaacaaggctctctgagggatcctcatttttctccaccttcgtaagtttaagatgactttaaatatccaacacttgcggctaaatactccaatccctttaaaacaattactccggcagccaaatgaggtttgctccaaaatctcttccttttaaaaaacaacccaaacctgtaaaacaagcttatctgcttgtttccatactccctatatttcgatttatatcttctggctgtctgtccataataatacttctttttgagccattttattagtgaaaagttttcttcatggtgaataatatgagattctattctggctttgacattgaatccaagtttctcaatcttctgagggagtgtagactcctcaaaaaatacaacgtcttcatcaaatccccctacttgtagagctaaatcccttctgaaaaatcgtgcggattctatttcagttccagtatagaaacttctctcgaaatctctaaccttcacccaataactattaccgacagagcgctctgggattattatccccccgattttgggatctgattcaattaatataacacactcctctataacctttggagttaatcccatgtcagaatcaataaaaaggacgtatttcccatttgccttttttaacccgatattcttcgcttttgtcctctcgctcttgatttggataacttttgcattgtattttttacatatctcaaccgttttatcttgggaaaaattgtcaacgacgataacctctatgtttttgtaggtctggtttttgattgattctaagcactttccaatagttttttctgagttgtacgtgggaataatcacagagaccagcggcatctctttattctccatctcactcaccgactgaggagtttaataccctctcaaacttctccgcactctcatcccagctgaaccttttggcccactttaaagcgttttcacttaatctccttttgagttcttcatcttcgtgcaatactctaagggcctcgctcattgccttggggtttggatcacacagtaagccgttgtatctatgctttattgagtccctgagtccaggaacgttataaccgattgctggggttcccagggcattggcctcgatcacgaccctcccccagccctctcttattcctggaaccaacaatacgtgggcttttttcatgagttcaattttttctttctcagggatgaaccccctaaattcgatgtttccattattatgcctttttttaagcttttccataagttcgcctctgccaacaatccacatttttcccttattgagcattttaaaggctatcacggcgtcttcgggctttttagttggggtcaacctgccaacgaataaagcggtaaactcgtcttccttttcggggaccttctctaaaatatttctatccaatccattgtaaactatctcaatatctttaaatccgagcttttctaggtcgttcctcgtggattcggagacagttattgttttaacattgacgtaatgctttaaccagtagggttctaggatgtgtttcccaagggtattgatcggaaacggtgtcttataatcccaaaactcaactgccaattggtgtatcagcgctattattggcttatcaacgtattttggagttagaaatggccgggtgtttatctcatctattactacatcaaaatcgtttttgttatccctgtagaacctctttgcgtgggaatacaccgtatcaaagagaccaactatttttccgcttctgactattttgacaccatcaatttcgtcctccttttcagctccattaaaatacgaagtgaagagggtaacttcatatcctttttcaactaatctttttgcaatctcatgagtataaacctcagctccccctgcttcggggtgtcttatatccttccagttgagccatagtatcctcatcttttatcaccattgtagtaatgcaagatgttttttctgtaaactattgctgcagtgtccaaaaacattcttgctattgccctatagtttatggaggagttaaaactcttatgttcaatcttaatcggcagttcataaatcttgtatccatacatatttatcacggttaaaagttcaacatcaaaggcgtacttcttgactaagactttggaaaatgccttttccaggacttctctcttaaacaccttgagtccgacctgagtatcgctgacgtcaagcttaagcagtaatttaacgagcgttctgtaccagatgctgaatagccttcttttctcggagtacctcaccctagctcccggaaggtattttgaacctataacaacgtcgtatccattttgaagaaactttatgaacctctttatttgggaaggaggaatatccaaatctgcatcgaagaacacgattatctcaccgttgctcttttcgaagcccttttttagagcgtacccttttccccggttctttgaatagctcactagttggacgttcctaaatgactcgcagagttcccttgcgacttcgggggtattgtccctggatccatcgttgattatgattatctcgtagtctagcccttttaactctttcatggtttctataactgcctttctaaggttttccccctcattgtaagcgggcatcagtattgatatcttgggcattattttgcctccaaatagatataaacagtacaatgggtattgaggcacttacgccgattagcatgtctataatcgtagaaatgttcttacttccaatggatagcataactatctcagttgtcagcagtccaagtaggtaaagaaaaatatctgtcttgtctattgacagggaataattaatcattacgctcgccaacgaaaagaacatcatcgccagcccgtatctccacagatacggggcgacattgagatattttgccccataaatgattttgataatgaactccggaaacagggcgtaggccaaaactattccccctgaaatcaggagtgtcaggcccattcccctcagcagcacttggaagtgttcctctcccttctcgtgcttttcggcggccttggggaatatgaccattccaatcgctccgggtgcaaaaaggacaatctttcccagcgcagagatggcggaatactgccccgcctccaagggggacaagtagtgcttgaccaaaataacgtcgatattccacattgttgtgtacgcaagaactgcgagaaacgcgagaccgctgtatgagaggatgtctcgaatttcaaggtcccctgtttccctatactggaacagatcctttagaaacattagtgttaagaaaaacgcccccacgtgtgccaaaaatatccctagtagacctccaaaaactccgtagccgagtgcaaccagggaaacaccgaagagcaccttaaggaacgcccaggaagacgtgctcagccccaacgccgagaacctctgcataccccttaaggctccctggtatatggggagaaccattgagaggggaagcgatgcaaacaaaaccagcaaaagtgtgttgtcctcaatctggagaaaactggaaaacatgggggagattagggctatcaacccgaacaacaggacaccgaagagtcccaggactttcgtccccttaattatgatcgattttatctttccgtattcctctcttgcccagtaaactgccgtaaatttggttatggaagtgtttatggttgttgaaaacacggagaatatgtagaacagggacaacaggctgaaaagttcaccgtattcctggggggagagcattcttcccattaggagctggtagaggtaattaaagaagttggagagtgtgaccgcgaccatcatgataagggcgtcccgatagaagtcttgtttccagatgtgaaagatttgaacgggcctgctggccatgctattaatctcaccgtgccactgtggagcgagagtttttataaatattactactatgttattagcttaaatgcatactgcttaccttatcttgtagcgtccgaatccatagtagttaagtctatgcgctcggtgggaatgtgatggaaaaaggtttaaacatgataacgagttgatacaacgggaggtaagaaacaatggatttcaataaaatcttcaggccaaaaatcgcactccccatgataacggccgttgccttgattctcaggttaatccccataaggttcagatatctcttaggctacgacccttatttccacctcgcttacatagaggaggccctaaaagcgggcaagtggctcaattttttcacaatcgcaaacggaccttggggctttcagatgaggacatttcaccccctcggcctgtgggcaacgcccgcttatgtttacaaactcctgaagatctttggcctttccctctacaatgcttttaggataacgcccgtcatctttgggatcttgacgatagccgtgttctattgggccctgctgaaactctacgatgaaaagcgggccttttttgcttcgctctttctagcggttagcttcggccacgtctttcgctcaatggccggctactaccgcggcgataactacatgctcttctggtattctatttcgcttctcggaatcgcctacgcgttttcaacgagggaaagacttggacataaaagccttgccttctacgctgtgccagccctcgcaagcggccttgcggcggctttctggcaggcttactacccgattttcgtgtttctcctggccagcgcggtctttctgggagtcggggattttctcctcggtagggacaggtacatcctcgacgggatactcctaacagtctccacggcgattggcgcccttattgcgaactaccttggggccagggttggctatggcatgctcgggtacgacaggtggttgagtaaaacggtcgccgaaaagctgtccctggaactcaccacggtaagggacgcctacctgctcttccatcttaagtacctggtccccctcgccctggctggactcctggccctcctcgcgctctcgaagttcatcagggacaaaaggctgaggaccctgacagtcctggtgttcggtgctctcgccgtttacctcctcttcgcgaggtttgaagggctgaaagacctctcaactggctttggaatattcaatgaatggccaatatccgagacccgcccgtcgaccttccacgacctctggagcgcgtttgccgttggtcttttcctcgcccccctctttttcctccggttcaggcccgggaaagtcagagttcaggacttcatgctcctcgggcttgtccttcccagcctctacatgatcaagacctggacgaggtttctattcataggttctatgggagttgccttaatggcaggaatcgggttgttggagctttatgaaattctgccgcgctttgaggggagaaaaggactcgccgttgcacttgggcttctcctcttcgtccccgccgttgacactgcaatcggtttcgagaaggtcgcggcagtggagccgtttatgaacgagcactgggagagggcgttaacgtggctcggcgagaactcgaacgaaaacgatatcgttcttgcctggtgggactacggaacgtgggttacctattatgccagacgcgcaccagtcgctgagctagcccccaatacaggtgtggccctgtattacctcggcaagcgcgatgagaactgggcgatgggccttggcgtcgactacgttatcgtctcctattacgactttctgaagtttggaacgatagtcgacaccgcgatgatgtgctcgaggtgcaacgtgagtgaaaactacggcctcgttgtcctgcccatggtttcttcagcgggggcgctggtgttcaggaactcgggctacacggtcgttgcaagacctggcgaaaaatgggacgtgaagataagcgtcagcggccatgtctttggaccgcgggaggtctacgtcgagtacggagataagattataaaaccgaacataacgccgtccgaatctggggcttacctttacatcaacctcaactacaactacgcgatcctcatgaacggggaggccttcaacactaacctggcgaggctcttcataaagccagatgggccctatgagctggtttactctgatggagggatcataaaaatcctgaggcttaagcacccgaacgttgtcgttgagagaaggggtggcgagacactccttcagttcgagaacgcaaccgggacgagactcggaatctggggcttcctcgacaacggcacgaaggtctttgagaagtggtacaacgtcgaagggctgaaagagtttgagctgccggcggaggtcaacggaacggtgataaggtacgcctatgccgagggcgagaaaatcttggacaggggtgtgtttagaagagactgatttttgttctttttcaaatttaaaatttcctcgctaaagcctccccaaaaacttgaggatgtatatcctggttctcacatccaggaatgaggataagatatcccgaatgttgccacgcatcactgggttcaacctgaacgcctccagtacttccctcgcaccgctcctatccccactgaagagtttcaaaaccccaatttggagaagatggtagctcagaatcctgggatcatgtcttatatctccgtgggcatcgatcatcctgtaccgccccgagagatacttggaaaatgagaactggccggagtggatggagtagtcaaccaggggctcatctatcgccccaaagcggcaaaccttggccatcctcagccacatgtcccagtcctcgcaggtcacgaagtcctccctgaataggcccgccttcttgaagcattcccgtttaaccattatcgtggatgttccggttatgttgtcctttaggagatgtccataaacgtctccgctcgctttcggatgctttatccccagaactttgtcccgttctaagtagtaatacgtgaaggcggtatagacaagcccgtaattcgagggaagctccccgaaggcctcaagctgcagttctagcttgtcctttctccatctgtcgtcatcgtcgaggaaggcaatgaaatctccacgggcctttaagacaccgatgttgcgggcgttcgctatgcccttcccacgctgggggatgtacctgagccttccgtcgccgtaggaacgcacaagctccttcgttgattcgctccgggcaccgtctatgatcaggatctcaaaatcgtcgaaggtctggtttaggacgctctctatggcccttctcaggagcctatccctgccgtaagttgggatgacaaccgagaccctgggcctcaacgctgctcctccagcacttttatcagggtcctcgcgatctcaacgtcttccctgaaggtaatcttcaggttgaagcagttacaatgtagcacgtggacgttgaatcccgcctccatcgcgagaaggatgtcgtggggaatctcgttcaggattccccgtgatagtgccgtctcaagagtcttcttcagggcatcgtagcggtatcctgtgggagcctctcccatggcgtatctcgaacggtcgtggattctctttacctttccattatccagctctattaggttcccggttattgggttcacggttgttaccacatccatctcgtccaggaggtctattattttctcaaaaacccacctgggtgtgaatggtcttacggcatcgtggactataaccttggtctctcccggtggaacttccttaaatccgttgtacattgattcgttcctagtcttcccccctatcgtgaccgtttctatctttggaaagctttccgccagttccagggccgtgtccatgaattgaggattggagacgaggattagcctgtctatgcctccgacttttgacacgttttccaacgtgtactctattatcattttctcctcgatcctgtagtactgtttggggaggccgaggtttgcccgttttccgattccgcccgcgagaaggataagggttgtcattcaaattccccctttattatgtgtttgtaaaccctctccgaagatttattgtcctgcccaacttcgtaaaggaggtttttgatagtttccctccactctgcatctatctggggatcgtctatgtactctctcaggctccttttgaggtcttcgacagtttcgggcttcttcccaggagcaaaaaattcatacggcaagagaaagccgcttttttgctccaatgcttccctatctggcaagtagaatacaattggcctgttcaggagtatgtagtcctcaaagatgcttgagtaatcggttatcaggatatcaaacgcccccatgatgtcgtttatgttgagaaggtgtgactgaagcggttcgtctgtgaggagaacaacgttcgaacttacttttactttggattttaccgcctcagccactagtttgtggggctttatgacgagcaggatgttctcctctcttatgaactcgatgaagtctctccgaaagaggctctcaacagccctgacgctggcctcaaagtctttcaggtagctggtatacctgtaagttggtgcgtagagaacaacgccatcataggcctccacatcaattcccagtattgacgagagcgtgtcttttgagtccttcatgtggtcaaagaggccgtcgtttctgggctgtccgaggattctgaacttccgggggtttatcatgaactgcctcacgaacgaaccgacgacaagttccgaggttgttacgaagtcagtcgtccacctgtccatgtagaggtagagatccctgatgcctaggggatgttcgtagccggtcttcttgcccggaagtccgtgccagagctggattaccctttgacctaaatggggcgtcacgggtagaacatcagtagtgatgatgaatttggctctcaaaagctcttttaggcccttaattgagtagagaggcacagttttcgcttcagaataccttcccttgaggaccttaacggatggagagcttggattattcaggagccagaccagctcgtaatcattggtctttctggaaacgtacttaaagagtgctagggcattgtcagatacgtcgggagttgagtagaagaggagtttgttttcgtcttttggaataacgtttgccagtgaaaggagtctggaggctatcagctgtttggttactctgtccattctcaccctcgccaggataaatgccctaaaacttttaaccattgtcccccagctatatttgggaaatgcatggctaaggtatcaatcatcgttcccgtctacaacacgcgagactacgttccaaggcttcttagttcgatagagaagcagacctacgaggactgggagcttatactcgttgacgacaactcagatgatggcacttacgagcttttgcttgactttaaagataaacatcctgatagggttgaagttctaaggacgccaaagcgaaggagtggcgtttctgtcggtagaaatatgggtattgaggttgcttctggtagatacatagctttcatagacagcgacgattggtggagcgagagttttcttgaagatacggtgagccatataaagggttttggtggcgtctcaactgaatactacgatgttttcgaggaaactggaaagaaaatccacgttagagcttcaaaacacggcgaactgtcttggaaggatgtccttatgctcaaagcgaggtttggtgttggtagctctcttttgagagcagacataatcaatgattacggcttgcggtttccagaaaacattcgctactcggaggacgcatactttttcactttgtatctgtcattgattgagaaggtgtattctgttccgaaacctgacttctaccaccttgtaaggagaagctcggctgtccaaggaagaagcaaaaccccagaagagaaaattaggggaacgcttgaagcttacaataagctctgtctaagagtcaaagaagtgtcaggcaaacatcgtgaggtctgcgacgttgttgcaaggcagttgagaccttttagctttatgacctacatcacaatcgtgtcggatacttacggtaggaaggaagcacgtaagctgttttggaaatactttgactacatcaaaacttacaggccagttaggtctcattcgtcatatttgacgttgatatggattgttgatttgttcgttcctattaggccacttttgagaaaaatggtgagtaaaaaatgaaaatatacgtccacggatgcggcacagtgggtggtgccgaaagagtcatgctaaaagttgcagaggttcttactgagcttaaggaaaaatatgatctgtatctcatctgttcatatgtgggggatgtcccctgcgtgtcatgtgatgagatgataacacttccaatgctaaatggtcttggcagtataaatgagcttgcacagaagttagctacattaagaaaatacagagatgttgatataatttttgcacacacatcccttttaccggtaaagaagcctgtaaaagtcataatagatggtagagattgggataagttctttaaattttatctgaactggagaggaaagttgctgaactatccactcaaaaagattcgtgatttatatgtttctatgcccaatacattgatcctgctactcaataaaaacagttttcagtattatggacggagaaattcaaatatacgccatatttcaaatggtattgatgatgatgtcaagaagttataccaaaggaaatttcggcgtaggtgggattttatctacgtagggaggtttagtgaagaaaaaaatccccagcttgtgattgatacttttaaagacaaaccttataggggtttaatggttggagctgacaaagaatatactgttgtgggaaatatagtagtcaaagcattttccccacgtaaagatgtactgaggatgatgaaagagtctaaggtattgattttgccgtctcgtcatgaagtttttccattagttttattggaggctcttgccctcggagtgccgtctatcgtgagtgatagcatccagacagagatttcgcggtatacaattccattcaggtgttgtgacaaaagggatctctatgagaccttcctctatgttatggaaaattacccctattacgaaaaaagatacaggaaaatatccagactaatccttaaaaagtatgactgggacgagatactcaaaaaagctcttactacaattttggaaacctacaagtcagagaaaaataaacaaactttggacaaatcatgcaaggtcagttggattgactaagcctcttagagccctgttgtttttaaattatccgtatggcggattcagtcaataacataagggcggtttaaacaagtagaacagtctgacttctcaatagctttgtaaatggctattcatcaagaaacgcaatgtattgttcatgcgtatttttaatcttatagtttctagcctgtaatacgttagagccaagaagttcaagattcttactctgttgtcatcgagaggtagtctatggggctattattggccatcatatgatctcagaatcctgacaaaagtttaattcgaaacactaaacaacatgcttcaacagttttctctttctttgatggtctgaataataactgagaccttaggcaccgttatatttcccgttttttattcctactctaaaacttaaaacacttgctatcccctgactaaccaccgtcgccatcgcggctcctcttgctccataattcagtatcaggaagtagtttagcacaacgttcagcaacgcagtgaatcccgttatcttggtaaacgttagttcccttcccgttgcattcaaaaagctcccaaatagtgagtttaggaacataaatggaaccgcaaaggccaagattctgagcataggaacgcttgccaggaaaccttctccgaacacaagtatagttccccaccttgcaaaaacgtagtaccctatcgttcccagaacgcccaaaccgctcaaaatccgagagctcttcttcagtaagatctcaagggtttttcgatcctcttgccacagccttgccattgagggcatagtcgtcgggacaacaatattcggaacaaatagggaaacttcgattagagtataagctgcccggtatattccggtctcgtagtctcccctcattaggcttagcatcaccatgtcagtgcggtagtagatcagcgtaaataatccgatgaaccagaaggggtaggacttcttgagaagggagagccatttttggggctcaaaatggatgcggatttctctaacgaatcttttaccccattttatcctcaaaagttcccttaggacgtatccaatgagaagtgtgattataaatggtgagagagatctgcaaacatagagaacggttcctcctataaaaaacgcccagattctctcaatagttcttgcaatagcttcatatttagtaacttcatgggcatacatcatgttcacaaatacatacgctatccatcctagcactgcctcagctccagcaagtacaatcaaaaccttcatccattccggctttgggagctggagggttagggcaacaattatcccaaaattgatcagcgctagtgcaatcttaagcccaagcacatcgggaagaagctcttcagccttacttctatccctcgcaacctcacgcatgaagtagtagccaactccgagatcagagaatatccccagaagtccaacatagtagaagatgaacgagtactggccaagtccctccgggccgagggttctgctcaggatgactattaccccataggccaggagtttcgaaatgacctcggccccgaagagccagccagcatttttaatgagtctcagcttaaggctttcggtcatggcgacccttcagtagggaaaggaaattaaaaacctaatcccccctctgtatcttcgcatgtcctccgaccaagctcttcttaagctcgaggttccttatctcgcacttttcgtctattattgagcgccatatcgtcgcgttcttgagtatagtgcccctaaaaactattgaatcgcttacgtccgagttctctatgacgcagtcctccccaatgtacgcgtagggcccgattatggaacggcccagtatcttcgtccccctctttatgaccacaggtgggattatcttagagtaggggcttatctggatctcctcgatgtggctctctttgagtagagtcttgagggcttcaagataactgtctgctgaaccaatgtcgtaccaaaactctgagaagcggtaggcccttatctcgattcccttcttcaggagccagctgaggaagtagcccggtgcgtctctgtggccgtttgcaaggtattcatcaatgagagccataacatccctggggagggcgtagacgccggtgcttatcagcgtggacttaggtacagccggcttctcctcgaagtcaacaaccctgtccccctctaggagcacaacgccgtacctcttggcgagctctgggttaccaacgtcatagaccgctatcaggggcttttcatcgtatcgcttgaggaagtcctggagcgagaaggagaagaggttgtccccagcgatgatcaaataatcgtcaaggcctatttcttcgattatcttcttcagcgcgcctatcgttccgagcttctcttcctcgtggagtgtgtcctcaactatgagtttgacaccccatttttcggcaaagggcctgaatctgctctcgaagaacctgttggtggagatatatgtttcaaggccggtttctgcgaccttctccaatatgtggtcaagtatcgtcctgtcccccaccggcagcagggccttggggacatcttttgtgattggccagagcctggtggcgtagccaccggccattatgacggctttcatttgttatcccctccgaggattttacggatgtgctctaagaacttctctatatcagttatgttttcggttatgattctgtatatcatcctgtcatcaatgtcccagtatatatgcacaagtctgtttctaaaacgagccattaagataaggcggcgtgccagttcattgcttataacattgttttcctggagaaccttaaacgcgtccgagtagtctttcggtagtctcagtttgttttttgatatcaggtgatacgcaatgtctatgcatgcctcaattgcaaccagaagattgtactttgcgctagatatgtaatgcttgttccttagaaactcttcttcatcaagctctgcaagttcatggatgttgaaaagggcattcttggcttctcccatcagcctcgttactctgtccctatcatattccaagggcctccctcccgtagagttcgaggtagtaggagtaatcgtggtactctgccatggtctcttcctcgaacctgcaccttgctttttcatccttcgagaacagtagttctccgcctatgaccttaaacctgaaagtaataggggcctcgttcagaacccggacgtcaacgggaaaccccgttagttcagtaagttcatcctccagcgtcatttcatagaatatatctagcttctccttcacgtaaacggctacatcaatgtctctgaacggcctatcttcgatgaaagaaccatggagataagcaaatataacttcctctcttctcatgagggcttcttgaattttcacttttattttctcccttccctgtgggggaatgtcatagattttcatcatggtttaacttaaacgttagagtaaaaaagcttttcccaaagtttaataacgtgacctcgataactacatgggtgatggtgcacatgaaagtcctagttacgggcggtgctggctttatcggttcccacctcgttgacgggctgatggagagtggctatgaggtcagagttctggacaacctgagcgccgggagcttggacaacgtaaagcactggctcgataacgagcgcttcgagttcataaaaggtgacatggttgacctcgagaccgtaaaaaaggccattgaaggcgttgatgttgtcttccacctcgcggctaaccctgaagttagaatcagcgcccagagccctgaaacgctctacgaaagcaacgtcacgataacctacaacctcttggaggctatgaggaattccgacgttgaatacctcgtcttcacgagctcctcaacggtctacggcgatgctgaagtcattccaactcctgagagctacggccctcttaagccgataagtgtctacggtggtgcaaagctcgcggctgaggctataataagtggctacgcccacatattcggctttaaggccttgagcttccgcctggcgaacatcatcggcaagcgctcgaaccacggcgttatatacgacttcatcaacaaactgcggaagaacccgaacgagctggaaatccttggagatggaactcagaggaagagctacctccacgtgagcgacaccgttgagggaatgctccacatcttcgaacacttcaagaaaagcggcgagacctacgacgtctataaccttggcaacgacgactggataacagtgaaggagatagcagaaatagttagcgaggagatggggttgagcccgaagttccgctttactggcggggtagatggcggaaggggctggaagggcgacgttaagctcatgctcctcgacataggcaaggccaagtccaccggttggagaccaaagatgaacagctacgaggccgtcagaagaacggttaaggagcttcttgaggggtgatttttgatattttctccccctaacgttgaaagaaagtggagaagtttaatctctgctcaaacttctccagctttgcgcgggtttgttctcaaaatctcttggtaattgcgatttcacctttctttttagcgctctttgagcgctatactgtgaggaaatcctgtaaatctagcaactagataagtaaacccgctcaaaagccagctcattaaaaacgcatactactcttccgccatccgttaaggacgcttgaacgctagtgaaagcggcgctgaagcttttggaaaaaagcttcaccaaaagcttgaatgtcttcgtgatattggctgagaattgggattctcatgacaaatttgcagatgaataggggttttcttatttttaacgcctttcgggcgttatactgcgagcaaaccccttgaggatttccaatttatggtgagaatcactgaaaagctgggcactcaaaaggacattcgatttttgatgaaactttgcccagcaaagtttctatggcgggccggccgggatttgaacccgggaccttcggctccgaaggccgacgccccgtccagactaggccaccggcccacatctgggaaaatgaaaagaaacttaaaaacctaaccgcctttagaaggagtaaaatttataaatccaccatcggagctatcaacgggtacagccccgtggtgtagcggccaagcatgcgggactctggatcccgcgaccggggttcgaatccccgcggggctaccattcaactgggctccagatgaacttcgaaccccgtgttttactctcctttgtaatcccccttctggaaaataactatactatgtccctgcagttggaaatcccctgaagtttttgttgttttctagtttaagtaatgtcctcttagctcccagtgggagaagctcaggggatatttaactgcagaacccaatgggcaggggtttattcttgcagcccaactgttggacttttcccataatttgccatcaaaaaactgtttcaggactaaaaagcgcgcaaatcgaactttttaagaacccttttaaggaggtgcgcctaataggtgttaagtgggattttagtaacttgttgagaatgatgtctcatttttaaatcatgtaattacaagaaggtgagagaatgaatggaaatgtaaaccttgaaggcgagatcattgccctgttgaagaaaaagggccccttaagcgttgcttttatcactaggttcttgaacgagatgggagttgaatgcacccgtcagcgagttgagagggtcttgagggatcttgtctcgaggggtgtggtggaggcattttacaacagtggtttctacaacaagagaaagcactacagggtgagatgataagctatggctagcaataaagctccttccaggatgatactcggcaacaagaggcggatgctcctcatagagttcctccagaggaaaaacgggagcgctgagctcagggatgttgtggagtacatagccgagagggagggcaacaccgacagaaaacacaggaagagcgtctatgtcagccttatgcagacgcacctgccaaagcttgagagggagggaattgtgactttcagcagagggaggataaccctcctcaaggttcctgacaacgtcaccctctacatggaagttgtccagaagaacgacataagctggagcgtgttctatgctggcctctcagttatctttgccctcatggccctatggctcggcaacgtcctcctcctctttgctgcagtgacttatctggtagtatctgccatacagcacaggaggacgtacctcatagccagaccaagggagcgaaaaaaccctgaaaaatcagaggataatgtgtaggtaatgactgattactatgtggtaatccccaacttcatatatatctgaaggacccatgtgattgtggagcgaccgtaatggtcgtccgccaagggcactgtgttgcccaccgatgtggtgtcgaaacacctctggtatttcggaacctgcttccgtaccacagtgcctccgtataggaggcgaaaaaatgaaaaagaatcttgctttgggaatttttggcctgttggtggcctttggcctcgttttgggggctggagctaacttcagggactacaacgcggacaggagcgttcattggaacatcgtgaccgatgacaacgagctcatcgatctgactccaattcagccctacgcgtacattaacgatggcggcgtcctagttgtggacataagcccgaacaacccgaactacccaggatatggaatgggcctgagcccgaactcagagtacaacttcgatgaagtgtttgaagtcagcaacgacctatgggaagagggaatgccgatagtcgtaaggataaccagcgacaacaccatgatccagttctacggacatgagtttgacgtccacgacagcacaaccggccagacagtttacgccagcgacatggcgaggaacgacgtctgctttgttgtgaacaacggagacgcggttaaggtcggtatggactttaccgtcgcgaacgacgcaccaggtacaaccaacaacgcagcggtacacattgaagcctacaggctcggcacagagcccgctgagatagctggaaactgcggtcagccgtgaaggaggaatgaaagatgaataaactatttggattggcattgttaatggttggaatgctcctggccgtcggcgcgggtgctaactttaggtactactccgccgacaggactgcgagcttcgatgtcgtctccgacgacaacgaacttattgacctgaccgcactccagccctacgtgacctacgacgctggaaagctctacgtggacataagcgaatataacccgaaccaccccgactggggcggaacgggcatgagcccgaacaccacctacgtctttgaggaaatgttcgaggtaagcaacgacctttgggagaacaaccagacaaactatccgatctgtgttaccataaagagcaaccacgacaacgtcctgctctttgcaggagactacgacagtccgatagcagggccgtcaaacaacctcgagttcacggtcaactacggagaccccgtgccagttggtatgatctttgacaacaccaacgcaagcctcggcatggatcagttccagctcagctttgaggccgttgcaggcgaatgcggaagcccgtgatttccttttgaggcctttgcctcactttgttaatcttgaagagatgttaaggatgaaaaaactgctcgaaggcattattacagccgtaatttttatgatactcgtagcctcagtggtggggttcatccttgacaggccgattctagtatcttatgcctattctgagagcatgacgcccacgatcaacaagggcgacctcttcttcataaaccccctttcaaggaatgctgaggttggggatattatagtcttccacagaagagatggctggacagtccatagggtttatgcaattgttgatggaaagtacataaccaaaggggaccacaacgttgctacagaccagcaggatggggcgtatcccgaggttgagcatgttgatattgctggaaaagtagtccagatttcaaaccatcccctggtgatcaggggcggtggggatttcatagtgaacctcaggaaaaggctgacgaacgtctatgccatagtgataatagtgatcctcggcggcctgctcactttctctggaagctcaaaggagagaagcagaagaaggtcaaaacgccggaggttcatcagaattcagggaaaaacactctacgggatagtctcagtcctcataatctcgggttttctggcggtcatcattgcatcatgggggacgctggcgtttacgtactcctcgaccctggccggaggacagactgatggttggcacttacccggaacaacctttgagaagaacctcagcgttgagaaccacgcggtttatccgttctactacttcttcaaggatgacagtggtagggtcgagctgaaaacaaccggcttccgtctcgggggcggagaggcccagaacctcagcctcaccgtgaccgttccggtggacacccggatttacagggaagaagtatctgtgtggtcatacccggctctgttgccttacagcctgataaactgggcgtactcaatcagcccgtacttcccgctggtgctgtacctgatcccactctcggtactgatgcttgcattttactggatctccgggatttcgggagagatgatctcaataagaaaggggaagattttatccaaactaacgggagatggtaggttatgaaagcaattatagttcttgttttcctgatgggggctttcctcatcgtgggctccagcgggaatttcagggaatattcatcgtccagagcggcgagcgtaatggtcgtctcccacgaggacgaatacgtgggctttaactgttcggacggcgagattgcgtcagttatagttctgaatggggaaggaaaggacttcgacgtaatgacgctggagaaccagctcataacaaacgagtacgtgagcattactctggaaccggcttattgctatgttccagctggaatgtatctggacgttgagagcggtacgggaacaccagttgacatagcacctggggactcacataccttcggtggacacgttgcggccagctcggccacacctggagagtactacgttccggtcacgatctacgccacctgggacggagggggcgcggtgattgagagttgccctgtaaagattaccgttctcgacgatccgagaataacgaagactctgctctcgggaaacacgagcgacatacctttgaagacttaccaggagtggacgttccagatagaagtctctaacccaactgacaacgacctgaacctaacggtcagggacaccataccagctgagttcaacgtcagcctctcggaagtctcggcgagctcgggaacgtacagcttctgggccgctaaccagggaaacggcaatggaaacggaaattcacagaacgggaactctcatcctgcaaccaagatgaagtggaaagtattagttccggctggaggaagcgagcacatcaacgtgacgatattcacaagggttaacaacggcaaccagcaggagttcacctcatgcggcacttactcactcaacgacggggcaactatagacggctacccgggaaggagcaacggaatagaggttagcgtcgcctgttcagacgacgattgaagatttggagttggtttagatgaaggtaaataaaaagaaggccctgattgcgggccttggaatttcactctcactggcggttctttttggtgtttactcggttatagcttacgcaacgccggtgtcaaccagggatgttagttacactaccgcctattctgaaggtggttcactgaggcactacgccctcttctcgaacgagaccgtttaccagaacggcacctcgctgaagtattatccctcggggataaccgacgtaataagaggagaatacaggtactcaacgtcacctggggcttcaggcagttataaaatagagatgcactcaaactactacgtctcggtgaacaggaagccagtttacctgctcaacaggacgactgagatagcatcggggaacttcgccggttcattctcggttccagtgaagtttaacatgacatcgcttggagaagagctcaaaaagatacgggaaggcactgacctgcacagggccgagaacgaagtttatctaactgttactgtcagtataaatggacgtgaaccattcacacagaagatccagctgaaaaaagacacttcaggaatgctgagccttgacggagcgaccaaggactaccagaaagttgagaggaatgtaagtataactgaaaacagcgttggcttcgttgggacgagcgttaaggactccactgcgagaaaggtgtttcccgccatggccctgctcttcgcggttccaccgctcggttttgtctactcaaagagagagaagaagcccaaagacgaacttgcttcactgaggaagtatgtagttgaaggcaaatcccctgaaggaacacgaaaagtcgaactcaaaactcccgaagaccttaagagggtctttgagcttgtggacaggccgatagtccacgacggcagtaatgagggcgacgtctattcgatagcggacggcgacacagtctacgaataccaacaactttaaaagcagaaccggaaagcaaagctaggagttctaagaaaaggttagaggtggttaggtatgaacccgttccacgagcttgagcccggaccggaggttccagaggtcgtttacgcccttatagagatcccgaaggggagcaggaacaagtacgagcttgacaagaagacaggtcttctgaagctcgacagggtcctctacagcccgttcttctacccggttgactacggtatcatcccgcagacctggtacgacgacggcgaccccttcgacatcatggtcatcatgcgcgagccggtatatccgctcaccatcgtcgaggcgaggccgataggcataatgaagatggaggacagcggcgacaaggactggaaggttctggccgttcccgttgaggacccgtacttcaaggactggaaggacatagatgacgttccaaaggccttcctcgacgagatagcccacttcttccagaggtacaaggagctgcaaggaaagaccaccaccgtcgagggctggggcaacgccgaggaggccaagaaagagatcctcagggccatcgaactctacaaggagaagttcggcaagaaggagtgattccttctccttttcccttctgaaggaggttgaggcatgtacaagctcctgaaagttaaggacgtcgtgaggattccacccaggatgttcacgatggacccaaaggaagccgcgaagatagtcctcagggagacctacgagggcatatacgacagagacgagggtgttgtactggcgatcctcgacgttgaggaaatcagcgagggggtcatcgttccgggcgacggtgctacatatcacgaggcaatattcaacgttctcgtctgggagccgaggaaccaggaggtcgtcgagggcgaagtcgttgagatgatgccctacggtgctttcataagaatcggcccgatggacggcctcgtccacatcagccagctcatggacgactacgtagtcttcgacgagaagaacaggcagttcattggcaaagaaaccaacagggttctcaagctcggtgactacgtgagggccaggataatcggcgtgagcgtcaagagcagggtaatcagggagaacaagataaacatgacgatgcgccagcctggccttggaaagttcgagtggattgagaaggagaagaaaaaagctaaggaagaatccaagggggagtgaatatggccaaggagagggcctgcaggcactgccactacataacgactgaagaccgctgtcccgtctgcggcagcagggacctcagcgatgactggttcgacctagtgatagtcctagatgtcgagtcaaggatagcgaagaagctcagggagagcataccagaggccgccaaggttcccggcaagtacgccatcagggtaaggtgaaaatgttcttcaggcttactagagaactgagggacgagctgaagaggcccctaggtgaactggttagggggccgattcctgaaccctaccttaaggttaggggtgagctcgagaaacaccccgttgtcactgttggggatgtcgtcacggagaacgtcctcaagatcggcgtcaaaccaataattgccctttacgatctcaagacgaagagaaaagaatactcccccgagattgaggacaccgccgtttttctgaccgtaacaaacccccctggaactataacgaaagctttattagacaccgtcaggaaggccttcgggctggctgaaagggggagaaacgtccacatcctggtcagcggggaggaggacttggcggcgatcccggccgtcttgtacgccccactcggaacgctcgtcctgtacggccagcccgatgaaggggtagtgcttataaaggtaacacccgaatgcaagcgcaggtgtgccaagatactcgcgagtatggaggtggttcgtgatggagattaaggttaccgagataagggagaacaagctcctgggaaggaaggagatatacttcgacgtccttcatgagggcgagcctaccccgagcagggaagcggtgaagggtaagctcgtcgcgatgctcgacctcgacccgaacactaccgttattcagtacatcaggagctacttcggaagcaacgtcagcaagggctacgccaaggcctacgagacgagggagaggatgctctacatcgagcccgagtacatcctcgttagggacggccttgtccagaagcaggaggagtgaggtggtgtagatggccaagggtaagaagaagaccagccagaagtggaagctctacgaagtcaagggtggtaaggtcgttaggaagaacaagttctgcccgcgctgcgggccgggagtctttatggccaaccacaaggaccgctggtcctgtggaagatgtggttataccgagtggaagaagtgagctctcttttcttcttgattcttaacttatatcagagattcttttgattcaagatttctaagaagtccatccctacgaagcacttaatcaatgacccttataacaacaaggaaagaagaacagaagaaaccagttcaggcctcttcgagggttatagcgccgaccgggcaggcctcggcggcctcctgggcgcagtcaaggtcggtggtctcaactaccgggtgggccttgccgtcgtcgcccatctcaaagacgtccgggcagaggctagcacagatggcatctccaatgcaggtgtcgacatcaacacttaccttccaagccatgggacatcaccgtggttaaatgaactggaggggatataaagttttcgtaggcggagagaaccgcggagactctcaaatgggtgtaaaacagaataaacggccctaaaaaagtctctcagtgaacaaaaaaagaccagatgggtcaaaagagacccagcttcttcttgtactcggggcttatcctgtcgggcgtccatggcggatcgaaggtgagctcgatttcagcgtccttaaccccaggaatctccagtatcttgtcctcaacggcgcgaaggagccacattgtaagtggacagcctggagtcgtcatcgtcattttgacgtaaaccgtgttgtcagggttgaccttaaggtcatagattagcccaaggttgacgacatcaagcccaatttcggggtcgattacttccttaagcttctcaaggaccatttcctcagtgagctgaacgttctcgtcggcttccttgatttctctctcgcggtttactgtgattaagccgactccttccagctttccaatttcggagtggagctttatcaggacgttgtcaatgtcgggagtgtccttcgccagtgtgactgtaacgttccccttctcatcgacatcgattgagcggatgaacttctcatcaactatggacttaacgaccttctcaacttcttctttcgtgaccattaacaccacctgaagagcctcagagaatacacatttaaaccttttgggacaggaatgtgtactcagcgggagaggatgtcgagtatcagttccctggccatcccgggcctcaaagcccttgccctcgtctccctcagaaccctctggatggaaagcctcttggttgaaggagcttttctaaacagctcccagagaaggggacagccgaatttgagatcgtagtccccaccaattatctcgataatttcagccttgtccagcgccagaaacgctggaaggttgagaattacaaggtcctctttttggtagatagagatcaagccggaactgagcatgtccccggaggcaacgatttttattccggattttctggcatatccctcaactgcactcattacaagagcgtgacatctgccgcagatcggggcacctttttcaatctggggccgtatgatatccaaatattccggaatttcgatgaaaacagccccatagttccgggctttttcgagggtcttttctcccatctgggggagtttaaccgttatggggatcgcatcaaaaccggcccagcgaagcaccttcagcgtggcagtgctgtcagatcctcctgagaacgctacggccacttttgctcccgtcggagagcggtcgaagtccttcccgctcaagcggtactctatcagggctctcaaacgagtatgggcaatctctccgatgtctcttctaacccttttaagcgcctcaaggttgtactctaggcggtaccttttcacgaagtcctctccaaccggcttcagcatggggttaaattcaggaatgagctttaaaatctgccggcgggaaaacccttaaaaggggcctccacaaggttcttttacgaaccaagaatccttctggaggtgtgagatatgagggagataattgagagggtcaaggagaagacgaccattcccgtttacgagaggacgatagagaatgttctgagcgccattcaggccagcggtgacgtctggaggatcgttgacctcagcgaggagccgcttccgctcgtcgttgctgtcgttactgccctctacgagctcggctacgtggcctttgagaacaaccaggtgatcctcacgaggaagggcaaggagctggtggagaagtatggaatcggccccagggctgactacacctgctcccactgccagggaaggacggttgagatagacgccttctccgagcttctcgagcagttcaaggagataaccagggacaggcccgagccggcccaccagttcgaccaggcctacgtcactccagagaccaccgtcgccagagttgcccttatgcacagcaggggcgaccttgagaacaaggaggtctttgtcctcggggacgatgacctcacgagcgtcgctttgatgctcagcggtctcccgaagaggatagccgtcctcgacatagacgagaggctcacgaagttcatcgagaaggccgccgacgagataggctacgagaacatcgagatattcaccttcgacctcaggaagccgctccccgactacgcgctccacaagttcgacacctttatcacggacccgcccgagacggttgaagccatcagggctttcgtgggaagaggcatagcgaccctcaaggggccaggttgcgccggctactttggaataactagaagagagagctccctcgacaagtggagggagatacagagggttctcctcaacgagttcggcgtcgtcattaccgacatcatcaggaacttcaatgagtacgtcaactggggctacgtcgaggagacgagggcttggaggctccttccgataaaggtaaagccgagctacaactggtacaagagctacatgttcaggatccagacccttgagggctcgaagggcttcgaggacgagataaccgtcggtcaggagctctacgacgacgaggagagctcgactacctgagcctttctgatttattttaaatttaaaaaagagaaagaatttcatctcttcttcctgttctcaaaccagactacgccgtacatagcaacgagaagcaccccgaccgcgacgattactagagcatgctgaagtccgcggttcttccacgggctctctgccctgaagccctccacggcaactgcctttatcatcagggggttctttggggggtaaatcgcaacgtacccgtcaagtccagttggattcactcttcccgtggtgttgccgacgtatttcccctcatctaccctaaggaaagtggtattggccatctccggctttacctctggaatttccgcgtagagcatatctctcaggaaagccacaccctttctgtaaatttcagtgtcagtcaatcccgccacctcaaggttccagacaactctggctgttgttgttatacccgtcaccgactggtgggtgtaagcaaaagctccgttgggatactgtctttccttcaggacttcgagagtcttgttcagctcatctttcattccaaactggctgaaaactatggctgcctgcgagaagtagtaagtcggtatcgagtagtaaacaggatctcctgtctttgaattcttttcgctcagcatccacgtgagattagccgaaaggtagtgaagagacttttcgtagtcgtaggaaacgttgaggctcttgagcacccagacgacgtaggcggtgttgtaaaagtccttccaggttccgttattcgggctggagagaaggtactcaactgcatcgtcgtagggctttccgaggagggcctttatcctcgcaacttccgctacctgccagggaaggagagagctgtagttctcagggagctccggctcttttgagcagaggacaaagtagtgggcataaaccgctttctgccactcttcagtggcggggattttttcgaggtatgggcaggcaatttctctgagctcttcaaagccgctgatctgggagacgtcgagcaggtcgaggacgcggtagtggagccttccccagaagccgaagtgttccatatcgaggagctcttccctgtacttttcatctcctgtcgcgtaaagcgccatcgcaacggccatcggcgatgagaagttcccttccagtgagaccttttctccgaggtaagcgagtgcaaaggctttgtaggccttcagctcaccctcaacattaagcttctcaaggtcatctttatcctccagcgcaatgtcacggaatattctctccacgtcgttttctggttcattaatctgaagccagccaagtgctctgttcaaaccttccctgagctggtcttcaagtcccgtcatgttctcttcaacgtatttgcttcccaggagctccttcagggctatggcagccatagcggcatcaaggtagtcgtcccaggagccgtcggccttctgcttgtatatgagccaatatgcagcactgttgataacatccttatacctgccgttggctatgctctctcctctgatgagtgccattattgccatagctgtgtatttggcctcgtgctcctcgctgtaagcgtagccccaggagtcaaagggcgtcctaatggccatgagccactcacagccttccagaactctgtcgtaatcgcctgtcttgtagagggcgagaacagcaaaggccgtgtccggaactgtaggctcgtaaacgtacggcctgatttcagccgagacaagaacgggtgaggagatgagagagagcataaagcccacaatgagtatagtagcgagaacccttctcattccaaccacctcaaggaagaaaagaagagagggttaaaagacttcacccgtagtaaaccttggcgtcgagttggtagtctgcgtagccataggtatcgtaggcgtagacgaggaagtaccaggttcctggagctgggttgttgtactcgacgtgctcgtagctgttggagctctcggagcggtcaacgaggttctggttcgggtcgtagaggtagaggtcgaggtcatggtagctggtgtcgaagtagaggtcgccggtgatcttggtggcgccgctgttgacggtcatggtgaatgtgtcgctcttatcatagtagtcgtggactgttccagtgaaggtcttctcgtcaacggtcggctctggtgaggggctcgggctcggctcgcttccgccaccgctgggctggccgaggctcccgtcgctgacgacgtcaacctggtagtttgccgaaccgctgtagctgacgacctttatcgtccaggttcctgctgtcgggttgtagtagccgaccttttcgaagccgtagtaggcggtgtaggagtagtcaacctggttgccgttcgggtcgtagaggtagaggtcgaggtcgcttccgctgttgtcccagtagagggttgccgtgacgaatccagcaccgcttatcgtgaactggtggctctggcttcccttgtttgagacgtatccagtgaaggtgagctttgcatagttgtcgtagtaggcagccttataggcgttgaccctacctgcaccgtaggcgatgtcggctatctcgtcgggctttactatgtcggcggtctcgatgagggccgtcttgaccttgtcgggagtccagctcgggtgggcctggaggagaagggcggctataccagcgacgtgtggagtggccatcgaggttcctggagcggcggtgtagtaatcgtttatcggctgtcccatgctggttccgctggcgcgggcagcgatgatccagttgcccggagcaacgacctctggcttgagcctgttgtcggctgttgggccgcggcttgagaagtcggttatgacgtcgtacttgtcaaccgcaccgacggtgatgaccttgctggccgctgccggtgagcccactgtgtacttgttcggcccactgtttccagcagccacaacgacgacaagtccggcgtcccaggcgttgttgacggcctggctgagggagtcggtaccgtcggagctctggcttgagccaagggagaggttaatgacctttattccgtacttgtccttgttctggacagcccagtcaacaccgttgatgatgtctgagatgcttccgcttccctgaccgttgagaaccttaatgccaacgagcttggcgcctggggccatacccttgtacttgccgttgcttgccgcaccggttccggcggctatcgaagcgacgtgggttccgtggccgttgtcgtcgtagggagttgtctttccgttgacgaagtcaacccatccgataaccttgccctggagatcggggtgggaggcgtcaataccggtgtcgatgataccgatggttattccggaaccgtcgtagccgaggttccacatgttggtggccataacctgggcagcggactcgtcgagaccctcggtctcaacggcgaccttgaccacgtagtcctcctggatgaactggacacctgagagctgtgcgtttccaaagtagccggtgtccataaggccggcgattataagaagatccttaacctttatcttgactgcgagggcggggataatgtggtagttgtatttgatcttggctccaaggaagtccagtatttcaacggccttctccttgtcggcctgattgtcgaacattattatcgtgctaacttcctgatcccagctcattctctggactttcttgaagagtccaggggtgagaagaccatagttcttctgctgggaaacattgcgaactgccggcttctggggggctgcaaggacactgccagccataagaccaacaaggaacagggccagcactaccgctccaaacttcttcattgtgacacctccatattctcggatgcccccatatgggcatccagggatgtattgggtcttcaattataagtcttgcgcaacattgtgtattaatcaaaattcaaaagagaacatccaaaattttgcatactccttaacataagttatgtgagatagcgttgttaataattttcaacggcgggaactgacttatttgttttaaaatacatgacatttagtaacagttattgccaatattgggaatctgaggcgaacaaatacaaaatggcataaagtaaagttaaattaaaatattcaaatcggaacaccaagttaaagaacataagagtgcatcaagtacggcggcaacctggggcacagagagccgaaaagtttataaaccctccctctgctctaatctcggacgcgccccggtggtgtagcccggtcaatcatgcgggactctcgatcccgcgacccgggttcaaatcccggccggggcaccaaaacctttctcgcgggcccgtggctcagcctggtcagagcgcccgcctgataagcgggaggtccggggttcgaagccccgcgggcccaccacagaaactttgctgggcaaagtttcatcaaaagtagaatgtccttttgagcttcctgttttccagtgattctcagtcatcaatcagcggttttcaaggggtttactcacgatataacgctcgaagagcgttaaaaagaagaaaacccgcatttatttggccacctactaagagaatagaatccgaatcaagccaattctcgaggacattcaaactttttggtgaagctttttctaaaagcttcagcgccgctttcactgtcgttcaagcgtccttgaaggatggcggaagagtagtatgcgtttttaatgagctggcttttgagtgggtttacttaccgagttgctagatttacaggatttcctcacagtatagcgctctttgagcgctaaaaagaaagttcgaaattacaattaacgagagattttgggagtaaacccaagcgaacttgctttctgagcaagcatatactcatcgaagagcaagttcgagaagaagggcgcacttttggtcaagcttttgtctaaaagcttcctgcgcgacgttgaagctctgcttcaacgcatgggacgacagtcccattgagtttgatcaaggctcgtggttcttcttagaattgcacttctacaggattttcgcgataaacaaactaaaaaataagtgaattcttcaaacatgctagctaaaaaggagtttctctcactttgacgcccgtagggcgtcaattaaaaagcaaactcacaaagagcgagcgaataagaatagaattcacaacccaagacagcattcaataaggaaaatcctatcaaaacagccctttagtcaagcatcacaaactttgatgaaactttgcccagcaaagtttctttggtcaagctttttctaaaaactttctcgcgaagtttaaaggtaagcccagatttgagattagttgcaggctaaacattaaattctgtgttggtattgcccaaaatggtttatctttccctcttgttgtatcaactgggcactaacctctttctgcaattgccgaaagacttataatattttagagttagcaacgattatgctggagaaagaaaaggaagcccttgccaagaggatcgcgggagagataacactttcttctgaccccggtaagaccatgagaaagtggcgcgagatatttgggataagccagaccgagcttgcggattaccttggagtctcatcctccgtcatcagcgattatgagggtgggaggagaaaaagtcccggtgcttcaacgataagaaagttcgttgaggccctcattgaaattgatgagaaaaggggcgggaacgtcataagagccttcagcaagaccatcgagggcgaacttccgacggatgctattctcgatattcgcgagtttgcggtccccgttccgataagagccgttgttgaggccgtcaagggcgaggttgcggcaaaccatgaccttctcgacagaaagatttacggttacacggtggttgacagcatacgggcgatccttgagatgagcagcgaggaatttcttaagctctacggatggactactgagagggcactggtgtttacaaaggtgaccacgggcagaagccccatgatagcagtccgcgttcaggggcttaagccagctgtgatagtgctgcacggcgtcaagaggttagacgagctagcggtcaagcttgctgaacgtgaaaggatacccctcgtcgtctccaaggcctcaaacgagaatgaactaatcaacggcctcagaaagctcgttgaaaaaactgaaaaggagttttgacagcttttttaaatttagcaaccaccctaacgttgagagggcatacccccgcttctatatttcaatgggcggtttatccacatccatatgaatgtccacggcttactcattattgtgtaatatggtcgaaaacaaaacatttataatgcaagtattttaaacaggttcggtggttccagatgaacgtctttaacagcccaatagaactcttcgagaagtacaaaccgacccccctgctcaggctttccctttcggacgagaggggggatgtcttttgccaagctggaattctttaaccccttcagcaggagcataaaggacagggctgtttttaacctcgttatgaaggctctgaagcgcggggacattaacggcaccaggcggcttttcgaggcaacttctggaaacgttggaatagcaatggcagcgatatcgaacatttttaacgttgaattcagggcctatctgccgaagccgactccagacgcgacagtaacccttctgaaagtcctcggggcagaggtcgtgaagacggacttcgaggtaattgacagggaaatgattgaattcgtcagggatgaggcggagaaagctggggcagtgaacctgaaccagttcgagaacgacgacaactttgaggcccactacaggtacaccgcgagggagatagacgaacagctcaggagcataggagtaagccctgacgtaatagtcgctggagtcggaacatctggacacatagcgggtattgcaaagtacttcaaggagcgctacgacacgaaagtcattggggtggttccagctaagaacgagaagattccgggcataaaacggctcgaaacaaggcctaagtggttttttgacgctggcattgatgaggtcgtcgaggtaacacagagggaagcgattgagggctccatccaggtggctaggagggaaggcatcttaataggcctcagctctggtgccgtagtcagtgcccttgagaaggtcagggacaggtatcccggaacggcgatcctgatacttccagatgacgcgtttaagtacgttgaggtgtttgagaaatacctacgtgaatgccagtgaatcttttttaatcttcccttatcccttcttgaggggttctctttgtttttaaggctgacaacaaaaaggtaacaaaaggaaaggcttcactcaagctcctttctcctccatatcccctcctcagccagcctcgttagcctgtcccttatgtggagcagcacgtcgctgagggttttgccgttgtcgtattccccgacaatcttgaggagttcttccctgctgtagtccttcatctccctcgcgagctctaccattcttggataagcccttacaatgttgtctactatcgttatgtcggccatcctggcgctccgcgagagagggttcaggtcaacggtaacgacgaacttgcccatcctcacaagcgcttccgtcctgtcgccgtcttcgagcgggacaagaacaacgtcggctttccagatgccgttttcatcgaccttcccgcgctcgtgctcaaggccggggattctcttcgtcgggttgatgccgagtatctctatctccgggtcgtacttcctaagctcctctgctatggtcctaaccctctcctccgtgcggtagaagaggtttatctcaagcttcgcgttgagggcctttgccagctctatcgtttcctttggaacgagggcagcaacgtttccgttcactgagattactggatgctcagccagaaggaacttcgcaacggcagctctcatggccctctcagctggttctatcgtcctctcaccgatcaggtagtcgaaggcctctccacgtccgtgggctattagtccagctttggcagtcattcccttctccattccttcgattatcttttcgcggtagtagaggctccagtagcgtgggtgactcttcgggatgttcaccatactatcacctgctcacagtttgctgaactaactaaaaagtattgcctgtcgaaatagagctttctcctttctttgaagaaggttcttcagggcttttctggtgaaaattggggttctaaacctttggttcaaaaaaagcgtataaaccttgagttcaaaactaaaggtgaacatatctgatcacgtgttcgaggtggtgcactgtgggatataagataacggccaaggagaacctttcagtgatagacttcttcatggaggttgaagcgccgcacgtggcccgctcttggaagccgggacagtttatagtcctcatcgtggacgagaagggcgaaagggtgccgatgtcggtttactatgcggataaggacactggaagggtgggcatgttcataaggcgccacggcgtcacgaccttcaagctctggtacgagaagcaggttggagacgagcttctgagcgttgccgggccgcttgggaagccaattgaagtcaaacactacggcaacgttgtttttgcagccgatgccgtctgtgcccaagctgagtgctatgccacactcaaggcgatgaaggaggcgggcaactacaccatagcgattcacagcttcgagaccaaagaccacgtctatcctgaaaagttcctctcgaagccggttgccgatgaattctacataacgaccgaggacgggagcgttggaaggaagggccactatcttgacgtcttaaaggagctgatcgagcaggacaaggttgacatcgttttcgcgggtggaaagttgggaagcctcaagaagctcgccgaactcaccaggccctacggcatccccacgataacgacggtgaggcagataatggtggatggaaccgggatgtgcggttcgtgcaggattctctacgacggcgaggtaaagttcgcctgtagggacgggccaatgttcgatgcccacaaggttgactgggacgacgtgataaggagagactcccgctttgccgagcagcaggccctcgcgagggaaagatacctcgccaagctccgcgagaagggggtgatctgaatggccgttagaaggaagctcatcaaggagagggtcccaacccctgaagttccggttgaagagaggataaagagcttcgtggaggtcaacctcggctacgacttcgcatcggcagttaaagaggcggaaaggtgcctccagtgtccggtggagtacgctccgtgcatcaagggctgtccggttcacatcaacattccaggattcataagcaagctcgttgagtatcgcgacaaccctgacaaggccgttagggaagctctgaggataatctggaacgacaataccctacccgctgtaaccggaagggtctgcccccaggaagaccagtgtgagggcgtctgtgtgatgggcaaggtcggagacccgattaacatcggcaagctcgagaggtttgtcgcggattatgcgaggaagcatggaatagaagaagagcttctctgcgagttcgaggagagatgcacgggagaacttggaaaggtggccgtcgttggtgctggccccgctggcctcaccgccgctggagagctcgcgaagatgggatacaaggttacaatcttcgaggcactccataagcccggaggagtcctcgcctatggcattcctgagttccgccttccgaaggagatacttgatcaagagctggccaagctcaagcgtcttggtgtcgagataaggacggaccacgttgttgggaggactgttaccattgaggaactccttcaggagtacgacgccgtcttcatcgggactggagcgggaacgcctaagcttctcaacgttccagggatactgctcgacaggatttactcggccaacgagttcctcacgagggtcaacctcatgaaggcctacgagttcccagaatacgacacgccgatagcaattggaaagaagacgatagttataggcgccggaaacaccgcaatggacgcggcccgttcggccctcaggctgggaagcgaggttaccatagcctaccgccgcggaagggaggacatgacggctcgtatagaggagatcaagcacgccgaggaggagggcgttaagttcgagttcttcctccagccggttgagttcataggcgacgagaacggaagagtcaaggctgtgaagttcgagaagatgagacccctcgatgagagggacgccaggggcaagagaaagatagtcggtaccggcgagtatgtaaccctcgaagcggacactgtcatcatagcaatcggcctcgagccgaacaggatcatcaccgagacccccggcctcaagacgaacaccaacggaacgctcgttgtggatgagaacctcatgaccagcataccgggtgtcttcgcaggtggcgatgcgataaggggcgaggcgaccgtcatcttggctatgggcgatggaaagaaggctgcgaaggcaatccacgaatacatacaggcgaagagaaaagcaaacgcctgagccttttctttaccattctctttttcttgagccaaaaacgaggccatgtttgagaatatccatgaactcgctgttcaggaagcttttggtgaactccatggtctcttcaggtgaaagccactcgacgtcctctggaacaccttcaacccacaggtaaacaagctcgtccccttcccgtgcaatcaggagggtgtaaactttgacgccgttctcaagggctatcctgacttcccttccgactagagaagtgaacttcccgaggggagctatcgctacgaagtagctcgccttggggatgtatttgctggtgtctctcattccgtactttgagggaacgagtatattatcggtgttgagcttctcacggattatcccaactatggccttctccgttttggtgttgtaaagcagggtaggctcgctcagataaacgaacggccccgttttttccttctttttcctgaacagcccgagcatgggaacacctcaggtggggataatgtcatcatctcgacatcaggagggatgacactcctcatcggtcggaattacctaatggttaccgcttaaatgctttaccacggggtctccttctatggccaggagatcatccagagagacgtacctcaagttggggaactcgtagatatagcctatatttccttctccctcatgggcataaaaatcttggagatcataatatttcccaaaccttctaatttttactacgcatttatcttgttgatatagatacgggcaatgtccattaagctctatgtagcttgaagagttctcactataaagctgacctatcggagggaaccaatcgtatatctcccacatgccttcgtccggataataaaccgtcagaaacgcgtggtccatagtcattgtgaggaaataccttgcgtttatatcgtgcttttcatttatccgggagattattgcgtaggctattacatgccagtcatcgcagtctccacagtgagagacaacatagcggggatctttcgttggtccacctgcgcagtactttgctcgctctaccattgcctcatatgcagtgcctctaaggtaaaggaggtaatcttctcttgggacatttgcttcctcgacccttttctcagcatccgcaatgacggaagttacaaagttttgaacgacttctgactgaagtatctcgggtagttcttcacgggggaagccagtgcaactccagtatggatacgcacatgtaccgttaagcttctgggatagataatcatccccccgatagtagccaataacggggacatgatccgaaatgctcttatctaaagctccaacaacaccgaggtaaattccgagggcatcgtagatactgtctatcattttggtagttaactggtcccaggggggtccaataacaggaatatcgctaagtcggccagtattgtggccgagtagtccagttatgaagaataatattaccacaggaaccacagccgctttatacacacccatgacatccgcatgatatacatggatgttatttaaatttatgccttgtacacccgaaagttagtagtcaggattattaatcagctcatcaacatggctaatgggtgataaaatgagggtcatcccactcgcatctgaaagccttggggttaggagcctggcgaccttcgttgaagctggggggctgaggatactgattgatccgggtgtagcactcggcccgaagcgctacggcctccctcctgcggaagtcgagcttaaaactctccagcagatgaggaagaaactgcaaggctacgcgaggaaggccgacatcgtgactatctcccactaccactacgaccatcatacccccttctttgaaggcctctacgagagctccagcgaggattacgcgagggaaatctatgcgggaaagattctcttcatcaaacaccctaccgaaaacatcaacttcagccagagaaagagggcatgggcattcctcaagaacgcagaggcgatagcgaagaagatcgagtacgcggacgggagaagcttcgaccttggcggcgttacaatcgagttttcaccggcagtaccgcatggaagcgagggaagtaagctcggcttcgtcgtgatggttctcatcgacgatggctccaaaagggtaatccacgccagtgatattcaactgctgaacaggagatctgtcaagtggataatcgaaaagaaccccgacctgctcataaccggcggacccccaacttatctcggcccgagagcaacgggatcgtgggaaaccggcgttaagaacctcaacgagataatcctggagacgaacgcggaggtaatcctcgaccaccacatagttcgcgacaagcgctatcctgagttcttcgacgagctggaaaaaaggccgaagaccttcgccggctaccttaaggttgaagataggccgcttgaagcatacaggcgggagctccacaagatagagaaaggagaaggggctgaggttcctttcagactgtaatcaacgctttcccccttattctgttgtgtcttgatacatagcattggagtttattattgaaacatggattttatcacattatttaaatgctaaatccaaaaaatttataagtatctaaggtaaaaactaagtggagtggtatcatgacgacgtatgtgctgtggtatttcaagccgcagtacgggagctacgcggtctttgataccaacatgccgacctctaagctgagggatctcgggtttgactacatgatagtcctccatgcccctggtagggatggagagtatgggcagatgccgatgagcggttaccactccgctttggggtggttaggacgttgacaagcgtccttcaaaaaactgccctttgagacagtcaaaaaccaaggggtttggcctctaaatcataaccccaaaccgctttgcggtaggggtaatgggcacaagaccgtgccctcgggctgaaccgaaaccggtaacgggagtaggtaatgtgcccgtaaaccttcccgcctttagcgaggggttaattcgttggaaccctcgccattcacggcggggaggaggtcagtcctacgataatggctacaacgacggcaagcagctggcacaatggctggaacaagaggtaaaccctgaactcccctatctcgtcgagattcctgtactcgtcagggatgataaagagcagtgggagctctttaataactcaaattacacaataaaaccccggatcagaggtttggactattggaggggatggcttgatggggtgtatatccatacaagcgaactatggcccaatagagcttactactatggtaccaacctgaggaatgttaacctggtgagggagaaatgccccgattggtgacctgcgctgccctcgcttttgtctttatttttctgatcgtgagccccgctccggcactgggcattgaaagtagcttaaaaatcgtgaacgcctaccctgcaggcgataaaattgcgttcctgctcctcaacgaaacctcaaacgggttctacggcgtggtttacgacggccgctccttcgaggccgagaagctccccttcggcagggagtacatcgtgaggcactggaatggaaaatactggctccttcagaagggggacaccgtaacagtgaagctctatctctaccgccacggcaagtttgagctcgtacacaccttccgtgggggaagtgcgtgcaccgacaacgaccttgatatcacctggaacggcagggagtactacattaccttcctgggggctggaccaaacgacgacctcgcgcacggggagtgttcttacgagttcagggactacctcctgaaggatggaaccctcatacccctcaacgtcacggggcttgagagatgggtgccccagctcaacgcctggttggtcctcgctgattcctggatctatctggttgatgagaatggcaatgttctcacgaagcgcaaaattagcgaaacaggctggtactcaactgaaatagccgtcgatggtaacagaaccttcctggtagtctcggctgacggtggatgggttagaatgttcaccatagagaattcgtcgctggtgttgacttacaataggaggctagaaaacaggactccagaaaacgcgggaatttatctacccgatttctggatcgggagcccgatactctttagagaatctcaaaacgattcctctgtgacagtctgggtgttcaacggcacggacttcgccaaaattcgcacttttgaagacgaaaacgactacactgaactccacgcgttagtgacctccaataagggctacatcctatcgaccaccccgattttcgggaattccgagggggccagcctaaggcttgagctgttcgagctcaggaacctctcgctcgatccggtaaactcccttagcgtcaacgattcgtttgtcaggatagcttacgtgagggattacggcagtttcggagcgacctggccctggtggactctatcaggattgaaagtcgaacctggattccctcttgtggtctccggcggaagttcggttctcttttttaatctaacccacgtctttaacctcacatcggggaagggcgttgagctgccgggttctctcaaagggcgtgagtataaagtggcgttttgctgtggagagtggttagtgttcggcgatgatagcgtgtacgcctttaagaacggtcagttcagcgacttaactcgggagatgcttttggcgctgtataaaaaaccaaggagtggcattccgctgggggcagttatcaagagcggtcttgctgctattgccgcgttggtggcggtcgccatccttagacggagaaacgatgggaagcgatgacactgagttgtggtgtgtcataattggctgtgtgctctctatgtggacagaaagcccccgtccaccggaactatagccccgttcacgtagcttgctaaatcgctagcgaggaagaggattacccttgcaacctcgtcgggttctccgaagcggcccatcggaaggcgtgcgttaaagtggaaggatatgccaatcttttcggtgtcgaacttcattatcgcctcctttttgagtctctttacaccctccgtctctataccccctgggacgacgacgttggcccttattttctttccgtactccctggctatggccctcgtgagggcgacgaccccgagcttcgcaacgtcgtagtggacgagacccctcgcgaagggcaggaatgcctcgattgaactcacgttgacgataacgccgccttcatctttccttgccctcacgaagtgctggcacgtccagaagacggagtggaggttgatgttcatcaccctctcatagaagtcctcattaacttcggtaaagtccttgaaccagtagacgcccgcgttgttgacgaggatgttgggttctctcccctcaagggccttccagagggcatcgatctcgaccttacgcgagatgtcaacgcggtgggtattcacctcgacgccgaactcttcggcctccttcttgacgcctttgaggcccagctcgtctatgtcaaccagctcaagtgcagcccctgcctcggcgaagcggagtgctgttgccttccctatcccagaggccgctcccgtgataagggccctctttccagtgagggatacgagtttggagataggatctctcataggaatccccacgggttattacgaactcgtccctcataaggtctgtggagaccaaaaacccttatattgaggggcttaactattttccaaggtgagaaccatgcgcgacttctacattgcccatgaggatgatataaaggcgggcaaaacgaccgacgtctacttcatccgcacccaaaaaatcctccgtgagaaagggataaagaagagggtcttcgcagacgtgggcaccacaagccttcctcacggctggaagtggggtgttttagcggggatagaagaggttgcgaagctcctcgaggggctccctgtgaacgtctatgcgatgcctgaaggaacgatattccacccctacgaaccggttctgcagatagagggctactacgacgagtttggcatctacgagacggctttgctcggcatgctcagtcaagcgagcggcatagccaccgccgccctcaggatcaagatagctgccaagtttaagcccgtctactccttcgggataaggcacatgcacccggcgatagctccaatgatagaccgctccgcattcattggtggctgtgatggcgtctcaggtgtcctaggagctgagatgataggcgaaaagcccgttggcacgatgccccatgcgctgatcttaacaatcggcgaccaggtgaaggcctggaagtactacgacgaggttatgccccccgaagtcccgaggacggcacttgtggataccctatgcgacgagaagtttgaggccttaatggcggcagaggcccttggagataggctcaacgcagtaagacttgacacacccagctctagacgcggcaacttcagaaagatcgtcgaggaggttcgctgggagctagatttaagggggtacaaccacgtcaaaatattcctcagcggaggactgaacgaggaaagcctgaaggagctggcggatgtggccgatgcctttggtgtgggcagtgcaatagcgagcgctaagccggttgacttctcccttgatatcgtggaagtcgaaggaaagccgataacgaagcgcggcaagctcagcggcaggaagcagatctaccgctgcgagaacggccactaccaccgcgttcccgtggagaagaagcttgagaaatgtcccgtctgcggtgcaaaggtcgagccgctcctcaagccgctcatagagaacggcaagatagtggcggagcttccaaaggcgaaggagataagagagtacgtgctggagcaggcgaagaagctcaacttgagcattgattgagcgtcttctttcttgttttctttatctctttttggaaggaaagtaaatggagaaaagggtaaaaagtgttttaaatcagcccagggcggcctggacggcaagggcagccctcacaacaccgtaaccgtagtcggcgtcccatcctgtcggaccaaggtcatcagcggttatgtggagaattcccctcacggtgttcttgcttatgtcgtcaaaggttccaacaggtagaatctttccgtacttctggtagtatgccgcctgaatgagtgcaaccacaccgctcacgtgcggagtggccatgctggttcccatgagggtctcgtagctgtcgtccgggtaggtgctgagtatgtcaacgcccggagcgcttacctctggctggcggttgctaaagctcgcgatgttgtcgttgctgtcaatcgcgccaaccgcaataacctccggataggcagccgggtagcttgggcttggggcaccctcgttaccgctggcagcaacgatgactatgccagcgttgtaggcctggattatcatatcgtagaggtagctgtcgtcggcagggcctccaagggacatgcttatgacctcggctgcatcgtcgtccgggtcgccggcgattattccatctccgtccttgtcggcaaccccgtccggaccgaggatggcctgctcaattccaatggctatgtcgctgtaggagccgcttcccctcgcatcgagaacccttaccgagtagatctggactccaggggcgacgccaacaacacctatgtcgttgttgagggccgcgattgttccgataacgtgggttccatggccgttctggtccgcacagtccctgagcttcgttgagaccttaccgcgaagcgtgctgacgcaccaggctatgttggcagccaggtcggggtggtcgtagtcgacgccagtgtcaagaacggcaacctggatgacgctaacggagccgtcggttatgctccacacgctcggggccttaacgcgctcgattccccaggggatggtctgtgctggctgggtgcttccgcctcctagccatgacggcttcccaaggagaaccgcctggtggtcgaactcgaccttctcaacaccgggcatcttcttgagctttccgacggcgttcgccggcacgtcaacgacgaccgctggaatcagcttgaactggtagactatgtgcccccctatcccgagaacttcgtgcgggttgaacttggccttgtcgacgctgactataacccttattgtattctgctctccggcacttgcagggactgcaaagagcgccgccagcaacactatagacagcaccagggcaattgatttcttcatctatagacacctccgttctaaagtgtgcaacaaaatacatttaagaacatctaataagctttttgtttttcttttgggactattgtcaatatcaatccagaaaattcattattctgacctgaactttggcaaaaattgttcataatttcaaattacttccgaataattttgactgcatgtgtgagattaagttttaagtttgaggcaggagtataacagatatgaactaaaggaggtgcattccaatgtaccgtctgctctaccccatgcgcacctaccttgtgatctctggaaaggacgaggaagccaacgttatggcggcggactgggttacggtgctctctcaccggcccttcatggtgggcgttgctgtgtccccaagaaggtacactcacgggcttatcaaaaagtacggggagttcgtgatcagcgtgccgaccctgaagatgctcgatgacgtgtggatcgcgggaactaaaagcggcccctcaaagctgaaggaaatgagtatcacactggttccatcaaaaaaggtctctgttccaagcataaaggaagccgctgccaaccttgagtgcagggtcgttgatgcgagggactacggtgaccacactttcttcgtcggtgaagttgtggactacacctacgatgagaacgtcttcagcccgaggagcgtcaaccttgaggcgggccttctcgcccacgtttcctgggcagatttcgtcacctttgagaagcgcatttacaagccggcggaaaggctttaacttctcccttctttttttcactatgttcctagaatatcaaggcctcaggataaagcttcatccccaggtgtacgagcccgctgaggacaccttcctgctcgctgaaaacctcgccgtcaaagtaggggacatagcccttgatatgggcacgggaacgggaataatcgccctcctcctggcgaggaaagcccgctgggtccttggggttgatattaatcccctagctgttgaactggccagagaaaacgcgaggataaacggtataatcaacgttgaattccgactcagcgacctatttgagaacgtttcgggtgagttcgacgttataacgttcaacgccccctatctgcccggcgaacctgaagaaccgatagaccttgccctggttggtggagaaactggcagagaagtcctcgacaggttcatagatgaggttccctgttacctaaagccgggtggagtggttcagatagtccagagttcaataacgggggtggaagagactcttaaaaggctggaaaaagcgggactaaccgctgaggttgttgctaagaggcacatcttctttgaggacatcgtgctgataaacgcttatgccaaggagtagcgctttatctcgtgaaggagttttaccttcggcctttcggcgtcgctggcatcgtcctcgaaaaactcaattttaatctcccttgctttcagctctccagttggctttattctctcgaacatgggggaagaaggaagggactgcttttaaacctttcgcaaattgacgaagtatttttcgacgataaaatattgggcaaaaattaatctctcaattggccacctctgacccatcacatttttaaaaacctcccctgagttgaacctagagagaggaattaggtgaggctaatggcgataactttcgtatcaacccccaacatgcccgaggagatagccgagctgttcaaaaaacagcactacgcgatagtgggccaccacagcggcgtcaagctctgccactggctcaaggagagccttacaaagggccgcttctgctacaagcagaagttctacggtatagcgagccaccgctgcctccagatgacgcccgttttggcctggtgcacccacaactgcatcttttgctggcgcccgatggaaggcttcctgggaaccgagcttccccagccctgggatgatccggctttcatagttgaggagagcataaaggctcagaggaagctcctcgtgggttacaagggcaaccctaacgtcccaaaggagaagttcgaggaggcctggaatccgaagcacgcggccataagcctctctggcgagccgatgctttacccctatatgggtgatctcgtcgaggagttccacaagaggggcttcacaacattcatagtcaccaacggaaccctccccgagaggcttgaggaaatgaagagagaagataagctcccgacccagctctacgtctcgcttaccgccccagaccttgagacctacaaccgcgtcaacgtccccatgatccccgacggctgggagaggataaaggagttcctcaggcttatgagcgacgcccagacgaggactgtgataaggctgaccctcgtcaagggggagaacatgcacaatccagaaggctacgccaagctcataaggctcgccaacccgatgttcgtcgaggccaaggcctacatgttcgtgggcttctcaaggaacaggctcacgataaacaacatgccgaggcacgaggagataagggccttcgccgaggagctggtaaagcacctccctggctaccacattgaggacgagtacgagccgagcagggtcgtcctcataatgagggacgacgttgatccgcagggacgaggtctgaacggaaggttcattaaagattgagtgattgagttttgatttctccttttgatttcccattgttaatctggaattctatgggaaacttttatttattctcatgacaacgtttcccttaggtggtgaaggtatgtgtgcaaattcgagggtgctgcttgtaatccttactgtgatgattattactgcccccgttgcaagcgcctcaatgttggacgagtcggtgctctacctttctagtgcccagggttacgtcaataacgttagggactcgtctctgctcttgatggccatggcttcgctctatggaaaagttgagaatcagtccacggttgaaagctctattctggagcttgttgattaccttaaaaacgctcaaaactccgatggtgggtggggttattacccgaatgaaatcagtaaccccctcgacacgggatacgcactggcggccctgggggctgtgaaagatctcccccttaagaccattgacgtttccggtgaaattaaatctggtgtcagataccttttagactccttcaatggtcagggatggggatacggttcgaaaacccctgcggagccttacttaacggttgtcgcgctatgggggttgggtgcaaacggatacaccattgaggattcgactgtatccaaggccgtctcttatctggagtccattaatgagacatcccccaagatggtcgctcttaagcttattgcgtaccactatatcggctacgccaacgtttctgctcttattgaaactgcctacgccatgctttcaggagagctaaaacccactgaaagggccatgctcacgtacgctctcacgctgtatactgaaaacatgacctcagaacttccacgttctctggtgatactggagagcctcggctcccataacgagaccttcgtcctcaccgagccaatttggcctctccctgagctggattccgtcactcctacctcctttgcggtcatggcctttgcttctctctcagacgtcatctccagtgaggaatatccgacagtttcccagatgtgtgatgaaattctctcgctacaaaaccctgatggtggctggggttacacccccggagaagattcccgggccaagccaacctattatgccctcgaatttttgagcctttgcactcccaagcctcaggttgcaattgacaaggcaacggcatgggcagaaaatcatctgaagtccgctatggaagaggttgagacagagggtatgctcacccaggacttttactatactgccttaatcctcgccaggtattccgatatgcctcccgaggagaggcaatccgtcattgatttcataaacgaatacaggtactcagagttcgcttggagggggttcttctcaataccacagcccctccagacggcgatgggaataaacttactcaaggcattcaacattactggggttaatgctcccgctagctggctgctctcccttactgacggcggctggggactgctcataaactatccgttcactccgttcaccatcatgagtacccctgacgtaccgactaccctgctagtccttgaggctctttcagacacggtggacgaggccaaacttaagccccacctcgactggctcctcgctcagaggcttgaggatggcttttggggtcactataagaagagcgtaaacatcctcggccaggtttcaacggcttctccgtcgattgagtacactgttagagcgctcgaactgctcatagagcatggatatgacctgaactactttgatatggcgagtacgttgctccaggggataaagaacagcaacaggatagtagaaaaggctttggcattcaagtttgccatggagtcgggcttcctgccgcctgtccttatctcgtccgtggttagcaagctgggcagcggaacttggtacattcattacagcccggattatgcctccgcggcggagaaactcagcggaataattgagtcctttggcggcgtaccgctcctcaaagagggcgacatgggcagagaactcacgggcaatcacatctttgttggtccattcggtagctttgacacaagcgtctacaacccctatgtcaatatctctgttgcgggcaactacgtcgagataaatggtcaaaagtactcaaaggagaatctagtagccataatccctggaagaacccaggacggttatgttctagtgctcttggccgagaaggaagttctcccggcaattgacctgatcgttaacccaacgatgatcaagtatctgcacggtgcctacgtggtgttcagcgttaaggatctcaatggagacggcgcaataactcctgatgaagtcaaaatacttttcgaggggtgataacgtcttgagggccttgataataggagttggacagtgcgggacgaagatagctgatctgtttgcgctggttgactttgatacaatcgcgctgaacacatccaggggagacctggaatacctcaagcacattccccacgacaggaggatactcataggggagagcataactgggggcaagggagttaatgccaaccctctgcttggaagagaggccatgaagcgcgacctgccgctggtgatgaggaagataggttccatcgttggctacgaagacgtggacatctttttccttaccttcggcttcggcggcgggactggtgcagggggaactccggttttggcagaggccctcaaggaggaatacccggactctctcgtcgttgccatcggggcgctcccactaaaggaggaagggataaggccaacaataaacgcggctataacgatagacaagctctccaaggtagcggactcaatcatagccattgacaacaacaagctcaaggagagcggggacgatataagcagtgcctacgagaagataaactacaccattgtcgagagaatagcctccctgcttgctctcgtggacgtgcccggtgagcagaccctcgacgcgagcgacctgaagttcgttctgaaggcatttggtagctttgcaaccgtaggttatgccaaagcagacgcttccaaggtaaagaacctctccaggctcatcatcaagtcctttgaaagcgaggggctctacctggatgcgaacattgaatctgccctctacggtcttgtcgccatccacggaccgccagaggttttgaaggccagcgatatctttgaggcactggattatctcacatcgaaaataaggggcaagcagatattcagggggttctacccggatcctcgggaaagggacgtcgaggtcgtcacgctcttgagtggaatatacgagagcaagagcattgagaacatcgtcaggacggctaaggaatacgcaaggtctttcatgcaggcaaagagcgaggccgaaacaaagaagaaggaactgctcactggccttcccgactttgatgatgtatacccaagtttggaggcaacaggctcagacgatcctgagggatttgcagagtatcgggaggtatcccgatgagcatagtaaaggactctgttgaagctgccctcgacctcgatgagaagtccgtctattcccacatagcccacgagagtgcggaggatatcatcaggataatctcctccatagatgccgagcgggccaggcttcgtggggaagtcatatactacacggatgactgggatgatctaatcaggcagagaatagcgaaagggaagagacacacggcctttgacttctacaatcctgcccttcttgacatctgggaggctaaagtgaagaaggtaaagactttgaagaaggccgaaaaaactgcctatgccctatatggtgctgtcattgcggtctcaacaggccttttggtgttatccgggtctctcgtcatactcccagttctgtcaattgctccgctggttcttttccttagatggtggattagggatagaatggatctcagctactacgaactgactcagctcttcatagatgagatggccgaactcgtgagaaggcatgggctaaggcctgagaactatcgctttaagctctttggaaacgattattttggcgtcaaaacgtttaaccagcgctctggtacttttgttgtagaagtggagggcaatgattaaatagagggtgccgtattgggtagtgaacggaggggaacatctgtgagaaggggtcagatatcgcttgagttcataataatcttcgggctgtttacgatactactcctgtactccatacggaacacgtcgtttagcgagggtactccatcggtcgaaactctcaaaatccagacggcccttgaggagaaaaaccttgcaaatacgatctcgaacacgatcagccaggtctatgcccagggcccgggatccaaggctacatcctacgtcaagctggtttatcttaggaacccctcctatcttgagagagcgtggagcgttactgatcctggaatattcatcacctatgggccctatggaagtgactatggggtttatattacgatcataaacagaacgggaacaacaaacgctgctctgagtggcgacaataagagcgtattctggagcagatccttatacgccgtcaacctcctcgggaactctaccgtttggaactccacctttgggaacagcactcaaattaagcttgatgggtcgagcacctccacaactgtctatggtcttgtaattccccccgagacgttgccttcctacctgaagatagttgtggagtggactccggggtggaatccgcatcaagacgagatgtggacctataacgagaccgctggggagatacacatctacatcaacccaggtgagtcgtgatgggacgcggacagctgagcattgacgtcatctttgccttcaccctgattaccctcaccgtgctcagcctagtttcccttgcgtcccgccaggtcgagagtgcggagctcacggacaagacgtcaaagctcaaggtctttgcgattgatctcagggacacagtgactaaagtttactcttccgggcctggcttttccgttaaaaaaactgtgccgatgaaccttagggctggcgataaaataaccgtcgtgctcaactccacatctggacgcctagatgtctcggcggtaatagggggtgaacactacagggtctatcagaacctccccgttcccctcgtggcgactaccaatgttacgctgaactcgacgtccccagatctctgggtttacgccacctacaaccaaacggcgggtgccattgatgtccgcgttaagaagtaggggccagacggcccttgaaatgctgttcataatggccgttatcttcatgggggtagtcgttattctcccttcctatatgcagaacaactccgaagtttctgtcctggcgggaattaggtcggtcgcctcggacgtcgcatcgtacgtcagcgttggagtgatagccgagaacaggactgagtttgactgccttaatgataatatcaccgcctactatgattacctatctggaaggtttgtgttcgagggtctgaaagtccagaatgaaacggaagacagtatgacagtcttggttaagtttaaaaccctcggcgagagtaactcaacggtagataaagaactcgtgggcgccgtcggcgaggccatggttgagtccctgaaggaaatcaggggcttcggcgagagggacggtaagctgtactacggcggtattgaagttgtgctgaacgtgagcgtgaacgacgagtggggggagttcccgtgaggaggggacagattttttccctggatgcgatgctgtcactcgtcataataataatggtggttgggactgtttcagcgacctctgagaaccttaagaacgagataacttccctcgttggctggtacgagagggcgaacatagccgagaacatgctggatgttttaacgagaagtcctggggaacctgaagactgggagaagaacatagcttcggtaattgttcctggtttaaggtcgcttaggggtaacaatttggattactcaaaagtaatggcccttgttgagggggtgaaagctggaaatccctctcttcagagcgctctgtgggatctctccaacggatataattttaagttgatggtatccatgccaaatcaatctgtccaactagtttataactatacaatatcccctgtttcaggtgctgaactactgacggcatgtagcgtgggtgagcttggaaaccactcggacacacctgtcctgataaacgcttcccagtgttcacaaggggagtttgattttactcataggggagtttcgtttggtagttattacaatccatattacgtgtgtgtatatggaaatactaagattggggacaactttaaggttaatataagccaatatttggctgttaatggcagtctcgatgttggttcggctggatggctatcgacttctgctatctacgttacgggagatgcccatataggaagcagtggttatgctaccaatataaaagatgactcctatattggcggagctcttgatattagatcaaatggacatgcaacttttggtaaaaacctttatgtgtatggtgatacgactgttcgatcaagcggatacttaacggttaatgagagtctttactctctcggtagtctggatgttcagagcaacggcaacgtcaacgtttctaatgacctctatgtcggtggcgatgccactgttggaaacagtgggaagctgtgggttgggggaaacctttttgtaaatggaaactttaatggacagtcaagtcttagagtctacgtgggaggaacggcctttgtcaatggctcattgagtttgccatctgggaacttaaaggttgaagacgagctctacgttaatggggacttttcccagaatcctagtactactgttgatgtatacggggacgcgtttatcaatggggatatgaaggtagcgggaactaatatattccacagagatcttcacgttaatggcgacttgacaattgattcgggcagaagattggttgtttatggtaacttatatgttgatggagatcttaccatagattggaacagtaaacttatcgtttatggcaacctatatgtttcgggcaaactcactgtaagggggactttgatagttaagggaaatgtttacgagtactacgatactcagcctcctatcgggcttgagtctgggaatcccttttacgtaaatggatggctctatgccaaaggcgacacatggtacgcaatgaatgggactgggacaagccagagtagctattcttttgatggatacaggtacaacttaatgacaggaagatggaagcacagagacgtattgatttataacaacgagattctccttgggtattattactgggatgatttttgggaaggatggttttatcaaatagaatttgaaatgatgtccgttaactggaactttgacatccagattaacggcacaggctcgttatctcttccccctgataaggacgaggcatttgacttcgatctcccctccctgcttatgccccccgctccggaattccagtatcccgaatgtagagcctctggggagggtagctccgttagtattaacgttactagcgttaacgtaacttatgagttttctccagaaaaatctgcttgggttaatatctctatggtgggcggattttttgtgagcaatgaaaacttaattgaacaatctatggaaaactcaacgtggatccagcattcggagaggactgttcgggtgtcatataggacgtacaaccagagctataccgttgcgggcaataaaaaagttttgctttatgagggaatgttttcatggatgcctctcggggcactcaatgtgactgttccggattccgacggtaatttcacccttatctcctcgttcagtaccggggaatacgttgggtatactgtgatggtcgttgttagaaataactctaaattgtactatggactcttgacccttatcccgaagttcaactatactgaagcccctcaagactgtgtagtgcagaggacaggaaatagccttatcgttcccatgaagtgctttgtaccatcctcatctaagatgggtgagggtataacgttctcactgtgggtgtatcataacacgttcccacaggtcaagattgaggacgttggtaatattggtgccgttatgcagccgatttatcgtgtggccattttaaaactctgggtatggggtgagtgatatgagaaggggttttgtgttcactcttgacgctattctttcccttgtactggtttctctcgttttggttagcgtagttgcagtaacggagaactcttctagtatttacgctactcagttgcgtgccgaaaacaaacagcttgcagaaggaatcctccaaacattgaggactgttcccctagaccagctcgtctctccctcgcttatcaatacgtggatttccaatggaaccctaaatctaacgtacgttgatccaaagatgcctcccctccagatagcggccacatattgggcactttcagtcaagcatcctgagtttaaaggatacgcaagtttaatactcggtgaaatattgagggatctagctgggggctacaaatatcagctcataatcaacaactacacggatcccttcctcacgtttgacaactcctatgagaatgccagtgacgtcggaacggctacgatgatggtcagtggttatctcttcaaccagagccctaggggttatgttgcgaaggcttatctgacgaaggtcctgacagagcagagaaagctcgtcggaatccagagggttcttgctggaggagggtattgcaccaatccccggccgggtggacatgattacaatttttataccctatccgttaattctttatccattcagtaccagacgccttcaggcaaaccaactcaagtttcttctggaagattccgggttatgggaaggtacagtggtggtactgtggacttaaacgtcgatttaggtgggtggagtgtatcatacaaagggggtgttactctatctaaagatgggtatagtttaaagctatatctttcatacttgagtagtgttggcaatacgaggaaatataaagtgactaagattttgtttgaataccccagtggggaccagctgggtatcgttcttaactcgggagtctatgtggaaataactcggaaatggaagcggagttggttaggggggcactgggttatctcgtcttctaaggcatataccagaacagcgagaatcataaggggtgtttatgctgaaattataccaggctactcctgtagagatgaggattattacaataacaataacattgatattaaatttgatatagaccttccctccgatactaggccaaggtatggagtactcagcgtgtacactagacaagacgggaacgtttttgatgtaatcaaattcaacaacaagacttggaagaactccgaaggtaaccttacgatacccctatcctcaatatggccagaaactaatacagtgtatttgaaagtctcgcgttatgacgactctcgtgaagttggcctgggaagcggtagctgggttgatctgggttacgtaacctcaacgccgcacgccgatgaccctgggttaataaaactctacgatgtaactagcaaaggtactggtatctactatcttaactccatcttcgtcccgggtaatgtaacggggattgagatgaaccttacctttagtggggtacatgaagttagggtttactactccaacggcactgtccttaatttaatctatgaaaacacgagcatcataggaaacaacctttatattagcaattcaaccataatgaggggactgctaaggtacactaccctggaaagcctctccagaaagaatttcaacctcgttatcatgctcgatgccgaatacggccttgattcagttttatatgcagggcaagattatcatcgtgaatggaacaacaaaaggatactctatgggtacccctactcgtggataagaatatcatacaatcccacggttactgggagcagattttacattccaattgaggagactcacgacttggaatccttagatgacaccgagatgcacttcagctactacctccccggaaaggccatcccctggtacgttgatgtatggacaggaataatctatactcctggtttgattgacacatctaataatataaccctaagcgaaggaccagatcaaacggagtttctcagttttcccctagatgtatacctgatccgcgttgcatacacgaaaatctcaaaggatataatggttaatggttcaattaataagtttaaaatcgagagtacagacgactattatactttcaggcccgcggtaagtcgcgcaatcgtccactatttcctcaacggctacgccccctatggaaaagttttcacctactacgcccaagacaatgcctgtgggtataacttaacatactggtacgacctaactggaaacggtgatggcactagagacagcgtcatagtcgggaactgcaagccctcggatacccccctcaaaaaatctgttgaggatttggatccctcaaaatatgccttggacgatgcaattgtgcgcctcttcctgcagctgggggcggacgagaggctgtggaaggagcatctcggggacagtagatacattccgggtggaagtaagaaccccataaggatccggctggttgggattgaggggaaggccattggcatcaggaacgttccaacgtccattgagcccattacagttaccctgaggatatggaggggaggctgatgcgcagggggtacctaataaacatgaccgtgctgctcctcctgataccactccttctccttgccgcaacttacgagagcatttccagcgccgtcgttgtgaatcaagctgagaggggtctgatggagaggcagtatttcagcactgtcaccctaagggacgaccttcagaatgccgttgatttgagcttcaagagggcatacatcgccctcactgagtacgttatcaaccacagctttgtctcaaatgcatctgaagccctagaagagcttatgaagtatggaacaataggtgggaatatcagtcctactatggggggtgtcactctggagtcctggtattctaattttgttaattatctctcctcaatggggatgagtattgagccatctaccccggaggaactttttaattctcacatggagatgcttatcgggcctgttgactcgttccacgttgctgttagagtgaagttaaggaatataacaataactgatagctcaggtagagtacggtactcgggcgattttcccgccaacggttacgtgtactcgatagtaagtgttgagggttttgaagatccgttcattgttagaatgctgaacggtctatacacaagaataatagaaccatgtagaattccgtatcctggagaagaatatggttactataatgtcaacaaatctgaggatataaacgaacttgtcctgaactggtgctatgtaggactctatgacaatgcctctgcaggagtatactatccgactgtgcttgagagatttgaaggaactgtgaacacgaatccaaatggccaccacagctattatcttcatcttgctgagacttttcaaaatgcccttgggatgaagcccactcctgtgggccttacaacgtttattgttcctaaccgaactattgataaagcgcttctaggtgctattcagagcattgggggctcaatcccagataactatgacagtgttgactactacttcctcaaatgcgtagttcccccgtatagctgtaatgttaccggaacgcctgttagtcctgaacagcgacggttccaactcgataattatactaaaaaggccctatttgataatgcatccgggtgaatgaaattggacgtgggagatatcctttatagtattggggagagagtagagaaagttgctaaaagaactgctggagtcatgaaaatgatgctcaagccaatcccctcagctcgtccacccaagtcgtggccaatacaaaaacagtggatgactccccatgaggtcactagtttgctgctccagttgatattcttaggatacctagtaaccggcgtggttgtagcttatctcggttactttctagccctaataattctcagcgctttctatttcctagttttgagatttattctcgtgcggtactctgattacattttggattttgaggcttatcgggtgttctatcttgtggttagcaccatagcttttgtttcgtatgtgggatacgtacttttgaggaggctatctctggatgcctactggtactacgcataccttggcgttattggacttgtagttatccttttccgtcactactttaagtctcgctacggcagggactacacctacggcgtcgtcgaggaagtcaagaacgacctggttaaggtctttgtccacgacgacatggcagccaacgttaaacccggctattactgggtgcccgcggttcctgatgccgagcctggggttgttgttaagctactcgtggaagagcgggtgttcaggagctccagacccattaggatacttgaagtttaccttgacactcaatcctcccaaacggagaccgagccaaaggacgaaaccgagtgaagtatcagcaggtatatcgagtgctctggctcgattaggttggtcttagcgaagccatccccctcttttttgattctgaggggttcgacgcccctcttctggggaaatattatgagagttcctttctcttcttttaactgataaccaacgccagaacatactctcctcatgaatttcttgaatccgcaccatttttgtatcgaagtattataataaatcgtgtgtcccataatacatcaataaaaagtaacttttgcccttaaaaaagtttttgttgtaactgctcaattgggcgggacatttttaaccgctttaacatatcggtgttggtggtggcatgttagaagtggtggagtttctcaagtatctgatacttctctacggaggcttgtttgcgataacgaaccccgtgggtgcagtccccgtctttttgagcgttacccacgacctgtcctggagggagcggagggagatcgcatctaagacagccatatcggtagttgcaacccttgtggtcttcgccctgctcgggcagtggatattcaagttcttcgggtcgagcacagatgcgtttgccatagcaggtgggatactgttattcaggatggccctcgatatgctctccggaaagctgtcatcggtaaagatcagcaacgaagaaaccgaggagttcagcgaggaagttgtaactcttgaggaagttgcaataattccgctggcgataccacttatctccggcccgggtgcgataacgacggttatgctctacatggccaaaagcacgaccaaccttcagaggttcgcggtaattctgacgataatcctgattgggattaccgtctggttcgttctctgctccgccaacaggataaaggcccggcttgggcgggtcgggatcaaggtgatgacgaggatgatgggtctgatactgacatcaatggcagttcagatgataatcaacggcataaagggcgcgtttggactttagaatgtcaacgtttataactcccgccctctatcagtactggaggtacaaacatgaaggttaccctggaagttacgtttcggatgggcggtgtcgattttaggggacaccgctgggacggagataccctggtctttgagttcgagcgccgcggagatgcctacattcaggttctcagcgacagaaaggttgaagtcgaagttgagaagaggcccaaaaaagtggtcgttgagctgcacacaaaggaaggcacgaaaacctacgaggcctttgagcgggacggcgtttacatggccgccgagctttgagttatgtagcctctcaaactttttaagcacgtgaacgttaggttttccggtggtgcccatgttcatggcagagttcaagctccgctttggagacaggaagtggtatgtgaggaggatcattgaggctgagagccttgaagaggcagaagagaaggccagacgctacgccgagctgatgaacaaaggcgaggtaacctgggagctcagctatgtcattgagtcaaagagaccccttatcgtgggagatgatgagctgaaaaagcttgcttaactcccagtgatttcgcccgcgatgtttcgttccataatttttctgatttcttcaagatctctggtgtgtcccagcgcccacatgagctttgtcaaagtcgcttcctttgtcatgtcgcccgctgggatcacgccggcttcaagggcccttctcccaacttcatagcgcgtcagatcaactcccccgtagagagcctgcgtcgtcatgacaaccggtttttctctcgctgtctcagagactacctccaggagatttctgcccctgtatgggataccacctgctccgtaaccctcgaggacgattccatctgtggccctggcgactgccctaagaacctccggtgaaagccctggagtaagtctgatatggacaacgttagggtcaagctctggatcaaacaatggttcaccattcccaattctgggcttatgtctaacgaggacttcgtcacccttcacgtaggctatgtctgggtaattgatactctgaaaggcgttgaggccgagggagtgaaccttagaaacgcgcgtcccgagcattatcttgtccatgaaagccacgtatatcccgggaaatcctttccttgcaaaggtgagtgccgttctaaggtttctgggtgcgtcgctgtttggctcggttatcgggagcattgaaccggtcagaacaacgggtatcggcggattccttatcatgaagctaagggcggaagaagtgtaggcgagtgtgtctgttccgtgtgttattactataccgtcgtattcatcaaaagcctcaaaaaccgcccgtccgatagtcacccaatcctctggctgtatgagagtgctgtcaaggttcaggatgtcccgggtttctatcttggcaccgtcttctcgcctaatgcccgccagctgaaggatatcatctgcactgagcgctgccttgtatcccatctccgtctttgcactcgctatggtgccccccgtgccgagaaccagaagtttcatgtccccacccgcatcttctacgtccttccctttttagtctttttgacaaaaaatatgggaatgttggaaaaaagtttgtcaaaatgacatcagcgttcggggacgagcaacataaggacgagtgccagcaggttcatcgccgcggaaaaaaggaagctgtatgtcagggaatacgtcttccacaggtagccagctatcaccgaagccggaagcacgaagagaccgaaaactgtatggtaggcacctattatagtacccttttcgtagtccttggctagatctgccatgtaagccctcggaacggtgtcctcaatcgctatgtagaggccgtagagggcgaacgcaccaaccagagttgccaggtctctggcgtaggcaaaggctagggaagccaaggctgcaacggcaaagccagccgttatcatcctcttcttcccgagcctgtcagagtagatgcctattgggtatgccgagagcgcgtagattgtgttgaagagggcgtagaatgccattccttgaacgaccgtgtagccgagctcctccgccttccagagggtaaaggcgtagctgtaccttccgagagctccaagggcaacgaccgcgaggaagagctgcaggtttctgtccctgagcgttgagattccggttatcttctttttgacctcagcccctctgtccttaacgaagagcagaataactaagagtgagatcagccccggaactgctgacagcaggaagacgtagcggtaggccttttcaaccggcaggccttcgaggagcttgaggatgcctatggcgacgagcgggccagctactgctcctagcgtgtccatcatcctgtgaaagccgaaggacttgccgctcttacctttctcgcttgactcggctattagagcgtccctcggcgccgtccttattcccttacctatcctgtcaagtgccctcagcgtcagaaagtcccaccaagagcgggtgaaagccagggcccccttggcgagggttgagagtgcgtagccgatgaatacgaaagccttccttttcttaaagcggtcgcttacgtagccgaacgccaccttgaagagggagctcatgctctctatggcacccataatcgaaccgctgataagcttgccttccccgagaacgtcggtaaggtagctcggcactattgggcttatcatctcgctgctcatatcgttcaggaagctgactattccgagcaggaagacgttccagcttattccaaagatttttcgctcatttgtacccttttctccgtttcccatggctcactcctccaagagttctgagcatagctcacggactttttcctttgcccgtttgagaagctcctccccctcgggtgtcgtcctgtaaagtcggacgcgctttccgtttttgactccccactggctctccagcaggcccaactcctccatcctgtgaaggagcggatagatcgtgccagggctcacgctgtacccgtgtctcttcagctcttccatcatgaacgagcccgtcacctctcctttgctcgcgtggtggagtatatggatgcccatgaagccgaggagaaccctctttatcatatcgaacaccgatatcggatttcgatagaaatgtataaaagagtttctgtctaattaccactgatgaagggcaagaggttcagagcactccccgtacttttcgcaaccatcggagttctgatgctggtggccgagatactgatggttctccacgctagattttcactcccccaacttccagctgagaacgagggtaggtatgtgtcctttggtctgatgatcgttatattcttcctctaccttccagtacctctgtcgtttttcctgctcgctggcctgctttatcccgagaagatcaagcatctaggggccatcgctccctttctaactgcggtcggcgttctgagtctgactctctcattgctaatggcgtttcgcatggatgcagtaggctttctgtcctttttgaccttcgatgttctgtcgatattactggccagaaaagaagaattccgtaaaagtgagaagttcaaccccttagtctggactcttactgctctctgcgttctccaggcggctttgtttggagcggttgttttgctttcttaacccttctccagcacgtgcttctccaggacgtagcagtggaacgtcccctcgaacactttttctcctttttcgttgaagacttcacccttcaccactttcttcctttggggggacgttccgtcccccacaccccctcctgagttctctaaaattcttgtcctcgccagaagcctctccccgactttcacaggcttgaggaacctcacttctgcttttccgagaacgaccgtcggctcgttcacggccagcatcgctgcgtagtcggccagcccgaacgtgaagccgccgtgaacgagtccgtattcgtcaacggccatctcctcagtagtttccagaatgacttcagcttcgggcggtccaactttcacgggctttccaagaagcctctccgaggcgagcttatgcgtccttatctccattccaaccaccaggtttattaaatctggggaggtaataagtttgatggatatgcacccgcttgaggaggccatcgagattaaaggctcccctgagttcacgaggagcgagttagttggtattctcagcttcaggctcagaaggatgtcgcccactgaggccaaaaaggccatcgaggaatggatcgaagaaggtcttctggaggagagtgaagggaaactccttgtcgttattgaaaagttggaagaagagaaagaggctggttccctgctcggtgagatggtctcttatattgcccgctcccttggatggggcgaacttgaggttctggaaggcgttaagaagatgcgcgaacgctacggagacctcgacgaggccatcttagcgtacctgttcggcatggagaaaggagtggatatgtcgaagttcagggacaggcttccagagttctgagttccgtttaagccttttaagtctcaacttccatatataatcgggtgaggttctatgccgaaggaggccctcatagttgttgatatgcagcgcgacttcatgcccgggggggcgctcccagtaccggagggcgacaccatcattcccaaatgcaacgagtacatcaaaaagttcaaggagaagggtgctctcatagtggccacgagggactggcatcccccgaaccacatcagctttaaggagaggggcgggccgtggccgccacactgcgttcagaacactcctggagcggagttcgttgtggacctgccagaggacgccataataatctcaaaggcgaccgaacctgataaggaggcctactcgggctttgaaggtacgaacctcgcggagattctcagggagaacggcgttgagaaggtttacatctgcggtgttgccactgagtactgtgtgaaggcgacagccctcgacgcggtcaggcacggctttgagacctacctcctgagcgatgcagttaagggcatcaaccccgaggacgagaagaaggcccttgaggagatgaagagagctggtgtgaagattctgtgagctttttccactcttttatgaggactaacaatacgttcagcacgattgggccgattattatgcccttaagccccatggcccatgttccgcctaccattccaatgaagaccagggtctcgtccagttctgtgtctctggcgacgagcatgggccttatggtgtaatccggcatcggcgagaccagaaaggcgccatagactgagatgccgatggcgtggaggtacatcccgttgagggcgaagtatatggccgccgccagccatatcatccagccttcgaagagcggcacgaaggagaacgcgaaagtcaggaaaccagctatgactgcggtgtaaacgtcagaaacgccaaagactatgtatccaagtgtcatcaggatgcccttcgcaacgttcaggaggagccatgccctcacgagggcagagagagttttgtggacgctggtgagtatttcctcacccaattcccggttttcttccggcagaagttctctgatagttcgtgctatctgctctgaatatgcgagcccgtaataaaaggcaagaaagaacacggtgagttgaattacgtacagcggtatcgaaaacgccctgcttgagacgtactcagctattcttgttgttgcttcagccttgatgttgaggatgaaagtcctagcgtcttctggaagggggagagttagaatccagttaatgacatcccttatgctcccagcaaacgatgatgccaacttcagggacatcattgccagttcaaacgttaaggttcctccgagaacgaggaaggtaaagctgatgaaggccgctgactcacggtttccaacgaattttctcaaccttcggtggataggatagaaagcgtaggctagaataagcccgaagaaaagcggctcaagaaagggaagaataaccctccatgatacgtacaagataactgcaatgacagccgcccaaactgcagtttcagccctcatgttttcccggaggatttatttagtcaggattataaaaacctcccggtggttgggatgaaagagctgctctcgaagtttgaaaagctaattgctgaaggcgataggatgttctcccgcggagactacagcggtgcctacgagtcgtatctaaacgccctttactccctggcagcgattgtggtgtatcggagcactggcatgctggttccacccgagcggcttccaggatttcttggcgggttcccagagcttgaggatgcgatacggaggtactcggggagtgctcttggcgaagaaaaggtaaggtctttaagggaagagctcgagaggcttcggggaatgatgagtttgccgagttccgagcggtgacgaggactaacctctgacccacatcactgttccaattccctcgatacaaaacgatgacactctccgtagggctctccctatttctcttccacccatcagctctaccaggacttctccttctcgtatagggaactgcagagtgaccactgaccccttctgaggaagtgcgggagtacctctgatcgaaagccctccaaggtggtcttcactccatatggcatcgacctctaaggtttgggagtacatgaaaactgtaaatttgacaggtttttccgcgggtgttatcagctccccattcagaagcgctctcccgtacgcgatgcagactggagtagcttttgcgaggccatcaacgtaccttcccaaaacttcataaatcgtggcgtctcccatattgataccccatattagttttggatgtgaaagtatattggtattcggtggttaccatgaggatagtcgctgctgacacgggtggtgcacttcttgatgatgcatataaccccctagggctgatagcgaccgtcgccgtgctcgttgaaaagccctacaggacggcttcgctgagcagggtcaagtacgctgaccccttcaactacgacatgagcggcaggcaggccatcagggacgaggcctatctggccgttgaacttgccagggaagttaagcccgacgtcgtgcaccttgactctacaattgggggaatagaagtcaggaagctcgatgaaccaacgatagaggcgcttggcataaccgatagaggtaaggaagtctggaaagacctctccagagacctccagccgctggcaaagaagctttgggaagaaactggcattgagataattgccataggaaagtggagcgttcccgtcaggatagcggagatatactccggaatatacactgccaagtgggcaatagaatacgccaggaagaacggaaaggtcttagtcgggctgcctaggtacatgagagtcgatataaaacccggggagatatacggagagagcctcgacccgagagagggcggactcttcggaaaaattgagaccaatactgacggaataaactgggaactctatcccaatccgcttgtgagaagatacatggtgcttgaggtgtggaaagaataggggcttaagcccccttcttcagctcgcggggaaaaattggtggtctgcagtgcttattttagaggacaaaacttaaaggtctccccgagttaatgttcctaggtgagggagtgtgcctaccgtaacggttaagataaccgttcctgctgacgttgatcccgaggaaattaggagactcgttgagctcgaggtcgtcaaactccagctcatgagaaaaaatctagagagaaagacctctgaggatttcagaaaattgaggggtatcctgggtaaggccgaaatggaagaactcaaagcctacgagctggaggctgagttcggtgatctatattgacaccaacgtgctctattcgtacctctttgagacgcccataagcgagaacgctgagagaattcttgaactgcctgagaaggtaacgtccaaagtcgcaataaacgaggctgtgtacgttgtcttcagaagactggcccgcgataaggggataacgaacgtttatgaagcaaagaagttcgcgaagctaaaagaagggcagtatctgcttgagcaggcttactccacggttatggaacttgtgcagctttctggaataacagttgtggaagaggaagacgattttgagattttaaaagatatctccagggagtacggacttcttccaaacgacgctataatcgttgcaacgtgcgttaagcacggaataacgaaaatagcaacctttgacagcgactttgacaacgttcccttcttaaaaattgtaaggggctaggcccccttcttcagctcgctcgggaacttgatggcgtcgaacgggcacgtctggttgcagactccacagccagtacagaggagctcgtctatcctgaccttctttgtttcagggtcgtagacgagcgctggacagcccgtaaggagtatgcaggccttacagccggtacatttgtcctcgatgaccactgggagttctccgatctcgccgcgccttatcacaggaatgacgcactcgcgcttcgctattataaccgcaggcccctcgatctgcatcgcctcttttatagcctccctcgtcgccttgaggtcgtaggggtcaacggtcttgacgtacttgactcccagagccttcacaagggcctctatgtctatctcgttgaacttccttcctgtctcgcttccgccggttcccgggtgcggctggtggcctgtcatagcagtggttctgttgtcgagtatcatcacgagaacatttaggttcttgtagacggcatctatgagcggctggattccgttgtggaagaacgttgagtcgccaatggtggctatgatcttcttgtccataacaacgctttgaccgttggcgaggcttatgctagcacccattacgtattcggtccagatggcctcaagcggcgggaggagggatagggcgtagcagcctatgtcgccgtgtattggaaccttgtagcggccgagcttgaggtctctgagggcatcgagtactgccctgtatgagccgcggtgaggacagccgggacacattactggcggcctcttcggagctaagttctcggcgtaggcaacctcttcgggctttacgtattcctcactttcttcgccgatgaccttcagcagggcgtttctaacgagcgaaggcgtaagctcgccctcaagcggaagatgtcccgtcctcttgccgtagattggaacgttcaggccagcctcgtaggcggctatcttgacctcctcctcaaggaacggggcgccgtcctcaattactatagcctcttcaacggtcttcaggaactccacaacgagcttcttcgggagcggatggggagttgagagcttgagaaccttgaattcggcgtttattttcgggagaacctccttcacgtagttgtagggtgcaccctcaacgattattcccagcttggcgtcttctttcccttcgacccagttgaagggcatctcgttgaactcctcttcgatcttcctcagcgtctcgttgagccacttgtgcctctttctgttgccttccatgctggccctcacgtatctctcaatgtccttcttgaagacgggtttcctgttaagctcgacgaactcgccgacctcgacgtcggccgttgtgtggttcaccctcgtcgttgtcctgaagattatcgggactttgtatctctcgctcagctcgtaagcgtactttatgaggtcgtgggcctcttgaggatcagccggctcaagaacgggaaggagagaaatcttgccgtagtacctgtcgtcctgctcggtctggctcgtatgcggcccggggtcgtccgcgacaagtattacaagtccaccctcaacgccggagtaggcgaggctcatgagcgggtcggcggcaacgtttaggccgacgcacttcattgtaacgagggcccttagcccagtataagccactccagcggcctcttctaaggctaccttctcgttcggcgcccactcggcaaagacctccggcttcagcctcgctattgtctcgatgacttcggttgagggggttcctggataaccggtagcaaagacaacaccgctttcaagtgcgccgtaggcaatcgcctcgtttcccatgaggagctttctctcttttttagccgatactccaagtgaagcgttagaaggagcgttctttagagcctccacgatgaccaccgtaggctttccgtgaataaggttaaaactctatgctcaggaaaacacccaaaaaagccgaaaaatattcgacttattaaggtctctttccctgcttcgggtcgtagaagtacttgcccattgcgtcaccgtaagactgcaagtatttccttctaactgtgaatgcgtaaatcgctgtgactataagtatcattcccccaacgtatagaccgtatgacttcaaggtcacaaacaccgcaccaacgaatattccgatgatcccaaacacgatggagagcatgatcacgaggagaatcttgtacccatacctttccatgaaaagcgcgaagtccattcgtggacacctgttattgtatctgcgttgaaccttataaagtattctcgcaggctttaaatacctagagcacgaattcctttgtgaggtctatgaaaataaaagaattggtggaaatccttgacgaggccatagcgagtctcaagatcgccatagttgccaaccagcagagggctatggagacaccctacacgagcctggagttcacccagcgggccattgagcttcaggaggatctggacgacctcttaaaggccagggaatttcttctatccctcgatcccgagacggatgccgaagagcacttctcaagggaggagctggagaggttcctcaaacttcttgagctcctcaggaatagcgaggctcacttctactgaggtgatgggtatggacttccgtgagcttgaaagaatagtcgttgaattcagggacgctagaagctggaaaaagtaccacacaccaaagaatctggccatctccgctgtggttgagctgggagagcttttcgagcactttcagtggctcagcgatgaggaaatcctcgaagctgtaaagaatcctcagaaaaaggaggaggtcgcggatgagatagcggacgtcataatttacctcgtactcctggcgcatgagcttggaatagacctggatgaggccgttggcaggaaaatcagaaagaacgaggctaagtaccctctcccaggagactgagaaaggctttccttaaggattctacttcttctctccctagcctgtttttctcccagcgctctttcatagtcaagttttcgtcctcgatatccagtactgcctttctcactccgcctctcggcctgttgcagtctcccttccatctcggaatgacgtggatatggatgtgggaaactgtctggccggctgcttctccgaggttgatgccgacgttgaagccgtcgggatttagggtctgtttcagggccttcatggagaggtcaacgccctgcattagggcgattttttctttctcgtccagctcttcccacgcttcgatgtgtctccttgggacgacgagcacatgccccctgttcgctgggtattcatcgaggattacccttatcagctcatcttcgtacagcaggttttccctttttggactgcagaacggacacttcatagaaccaccaaagacttaaaaccacccatcttaaaaagtcccccggtgggagcatgagtgaagaacttaaaaaactcgaaattgcttaccgaaagcttctcctcgcgggcctgctgttgcttctggtagggtttgggctcattatctttaagcccctgggatggaccgcatccctgatactgggagcggtcatctttgcagtgtctttcatcccgctggagcttgcgaggagaaccgccaggaggatggcggtcatcgcttttaggggagaatagaaaagcttaatagatggcccgtagagtaagctaaaggagtaaagggaatagaggtgatgtgaaatggcgtttgtaccaccgcaggccggttacgaccgggcgattacggtattcagccctgacggaaggctcttccaggtcaactatgccagggaggcagtgaagaggggagcaaccgctgtcggtgttaagtggaaggacggtgttgtcctcgccgttgagaagaggatcaccagcaagctcatcgaaccgagcagttacgagaagatattcctcattgacgaccacatagcggccgctccgagcggcattattgccgatgccagggttttggttgacagggccaggcttgaggcccagatttaccgcctcacctacggcgaacccgtcccgctcaccgttctggtgaagaagatatgcgaccttaagcaggcccacacccagtacggcggtgtgaggcccttcggcgccgccctgcttatggcgggcgtaaacgagaagcccgagctttttgagaccgatccgagcggcgcctacttcgagtggaaagcagttgccataggaagcggcaggaacaccgccatggccattttcgaggagcactacagggacgacatcggaaaagacgatgccataaagctcgcaatccttgcccttgcgaagaccctcgaagagccaactgctgagggtatagaggttgcctacataaccatggacgagaagcgctggaagaagctcccgagggaggagcttgagaagtacatcaacgagatcctccaggaagttaaggaggaagaggttgaggagaaacaggaagactactccgaactcgatcagaactactgaggtgacgggcgatgccgataagtgttgataaggccgtcatcgcccgtctgaagacccatggtgagactttcgagatactggtcgatccttacctggctagggacttcaaggagggcaaggacgttccgatagaggagatcctcgccactccctacgtttttaaggacgcccacaagggtgacaaggcgagcgagcacgagatggagaagatattcggcaccagcgacccgtacgaagtcgccaagataatcctccgaaagggtgaggttcagctgacggctgagcagaggaggcagatgctcgaggacaaaaagcgctacatagccacggtgatccacaggcacgcggttgacccgaggactggttatccgcacccggttgacagaattctcagggctatggaagaggcaggagtgcacatcgacatattcaaagatgccgaggctcaggttccccaggtcatcaaggctataaggccgatactcccgctaaagcttgaggtcaaggtcatagcggtcaaaatacctggagactacgttgggagggcctatggagaggtcaggaagttcggcaacatcaagagggaagagtggggaagcgacggctcctggatgttcgtgattgagatacccggtggagttgaggaggagttttatgaaaagctcaacgcccttacaaagggcgaagcgataactaaactgttagagaggaagggcctatgaagaagatttttgtaaaacccagagaactcgttgtccctgggactttactcgcccaggggccttttaagaacggaagagggactttcagggaaggcaacgcaatctattccaccgtcatcggcctcgttgagatcaggggaaacgtgataagggtcataccactcgaaggcccctatatcccagaggttggggacaacgtcctggggaagatcgttgacgtcaagttctccagctggactgtggacatcggagcaccctaccaggcgagcctcagggttcaggatgccgttgaagagaggatagacctgctcaagaccgacctgaggaagatattcgacatcggggacataatctacgccaaagttaaggctttcaacgaggtaaaccagattgatctgacgaccaaggggatgcccttcaagggcggaccgctcaggggcggccagcttgtcacaataacaccgtccaaagtccccaggctcataggcaagggcggttcgatgatcaacatgataaagaccctaactggaacgaggataatcgtggggcagaatggatgggtatgggtcagcggaaagaacgacgagcttgagcggctcgcaatcgaggcaatactcaaggttgacagggagagccacacccagggccttaccgaccgcgttaaggagttcctccttagcaggctcagggagcttaaggagcagggagtaatagaggaaatccccgaggttaacggagaagagggtggagaagatgatgggcaggcctgaaggattaaagctcatcgatgagaacggtaagaggattgatggtagaaagaagtacgagcttaggcctatcaagatggaagttggcgtcctcaagaacgccgacggttcggcgtacgttgagtggggcaagaacaaggttctagctgccgtctacggcccgagggagatacaccccaagcatctccagaggccggacagggctatactcagggtaaggtacaacatggcgcccttcagcgttgaggagaggaagaagcccgggccggacagaaggagcgttgagataagcaaggtcataaggggtgcgcttgagccggcgttgctccttcacatgttcccgaggactgccatagacgtcttcatcgaaatactccaggcggatgccggtacgagggttgctggaataacggccgcttcgctagctctggctgatgcaggtattccaatgaaagacctggttgccgcgtgcgccgctggaaagatagacggtgagatagttctcgacctcaacaaggaggaggacaactacggtgaagctgacgtaccggttgccataatgccgctcaagaacgacataactctcctccagatggacggctacctgacgaaggatgagttccttgaggcagtgagacttgctataaagggcgccaaggccgtttaccagaagcagagggaggccctcaaggaaaagtacctcaaaatagcccaggaggttgagggaaatgagtgagatggaagtcatggccagcataatgcgcgatcacatcatcgaactgctccgcgagggcaagagaatagacggccgctcctttgaggactaccgcgaccttgagattaaggtcaacgttatcgagaaggccgagggctccgcctgggtcaggctgggtgacacccaagttctagtgggcattaaggctgaacttggcgaacccttccctgacctgcccgacaggggcgtcataacgacaaacgttgagctcgtcccgctcgcctcaccgacatttgaacccggcccgccagacgagaacgcaatcgaactggcgcgcgtcgttgacaggggcatcagggagagtcaggctgttgacctggagaagctcgttatagttcccggcaagctcgtcagggttatattcatagacgtccacgttctcgaccacggcggcaacctcctcgacgccagcggaatcggtgcaatagcggctctcctcagcacgaagctgccaaaggtcaactacaacgaagaaactggcgaggttgagatactcgacgagtacgagcctctcccagttaaccacgtcccaatccctgtaaccttcgccaagatcggtaactccatagtcgttgacccgagcctcgacgaggagcgcgtcatggacggcaggcttactataacgaccgacgagacgggacacatctcagcggcccagaagggcgaggcaggagcatttaagatggaggaagtcatgtacgccctcgaagttgccctgaagaagggcaacgagattagggagaaggttctgaaggccgtcggaagggcctgatgtctcttcttttctgttttgggtggtcgctatggacgtcattatggcactggcggcggtagttttcattgggttcgcggtaaggacgctctatctcctcctccgcgaggagcgcaagaaggatcttcttctgaccactgccatgtggggcttggcgctcgttgtctggggactgtatctcattaccgttagggggaagaccccggttcgctttgtggtggttgtgtttggtttgaccgcgtttgtgctttcgttcataggtttgttcaggcttcttgaggaaagtccatcggagtttgggaaagagctataaaggaaaacatcaaaaagtaagacagttcacggtcaatcggggggaatagttatgggactgtttgacagcttaaaaaagaaggatataaagccaactgtaaagcctcccagcataaagaaggaggttaaaggtgaaagggctcccgctcccacgaggacggaggttgaggtcatccctgttgaggaggatgttcttgctaaggagctcgttaaacctcagcttaggtatctgcacaagataactgtcaccagctactcagacctcgaaaaggtgtccagggagctccagaacggcaacatcgtgctcgttgacctgactccccttgagaagaggcccgatgtactcgagaaggtcgtccagcagctcaagggtatggtcagtgccctcgacggacaggccgccaaggtctgcaaacatgagataaagctcatcctcctgccaaacgatataagaatcgccaagtgaggttatcttttatctcgcccttcttcaaccctaccatgaatttataaacggttctcggtactttagcttcggtgatgctcatgggtgaaaacggcgagaagagacagaaagttgaagttcgcgaggatctcggtgaggttcaggttatatccctcggtgactgcccaatctgcggtggaaagggtacactcaaggccattcagcacatccatgagataccctacttcggcaaggtcatggagagcacgataatctgcgagaaatgcggctaccgcaacgccgacgtcatgatcctcgaagacaggccgccaaagctctacactgtcaaagtggagggggagaaggatctcttcactcgtgttgtcaggagcaagagcgggacgatagaacttgacgaaatcggcgtcaagatcgagcccggcccagcttcggagggctttatcaccaacgttgaaggagtccttgaaagggtcagggagaccctcctaatggccagggagttcaggaggcaggagggcgacgaggaggccgttaagaaggccgacgagatactccagtacatcgaggacgttaaggaaggcaagaagccgataacggtgcggataatggatccgctcggcaacagcgcccttataggtgagaaggtgaagagcaggctcttgaccgaggaggaaataaataagctgagccttggcccgtacgttctcgtcccggaagtcgaggaagaggacgctcttgaggaagagaagaaggacactggtgaaggaaactctgatgggagttagaggtaaacgacgtccctcgcgagaaggtcttcaatgagggccctcacccacggctttctcgtttttcttgagaggtggattatgccctccacgtggattccatagcgctccttcatttcttccctgctcatcggctccttgaagaggaacggcctctcgatcgtgaaggcgtagccgtactcccttatgtaattgccgagccacttcctaccgttctccccgtgaaccaacgttagcccgctggcctcctttgtcatctcccagagggtctctaagtcggccttgatgacctcgcctacctcaaagccgccagctatcgtccccctctgcgttagagtctgctcctcgtggaggccaagcctcctcagggtatccctgagctcgtaggggtttccccttgctacatagaggaagactatgtccccctcaccgaaggccctgctcttcctgagctccaccgtcttaagtcctctgaatatcagctccgcgtagacctgatgcagggctatgacgtgctccatgcttccaccgttcgaaaggtatatgaaccattaaaaagagtttgggtcgatgcggaagatccgccttgttgatgaaaggcgacgcaggtttcttgtgcgctccgcgttattgaactttgtcattgccatagtgagctatctcatctctggtccaggccttttcctgatgtttctggccattggactcttcttcattctcctcgacagactcggcatccctgccgttgaactcgatgtcgggggctcggtctatcggatatacccaagctggaacttctctgaggttgtggttgaaggtgaagaaaggaaaacttttccccttcttccaggaaaaaacacaatcgaggttcgtggggaggtaattgcggtttatctggtgccgagacgcttctttccctccgttttgatcgagttcgagggagagaagctcaaactagtctgagcgccgccttaatcacgtcacttatgacaccactggcggtctccttgagccccgctcccgctccttttatgaggagctccccgaggaggtcggtctttatgactgccgcgttctcgtggctttccaccgcgagcgggctttcctttggtatctcggcgggttctacggcaacgtttcccttttctatcctcgcaaccagccggattgtctttcccttcgcctttgccctttcaatatctccctccgtgacttctgctattcccctgacttctatctcattgtacgttatcggatggaatgcaaggcagtgcagtatagttgccttatagccggcgtctatgccgagtatgtcgccactcgggtctctctctgctattccaagtctctgggccttcgcaagtgcctcctcaaagctcagacccatctccatctgggtcaggataaaagtcgttgtcgcgttgagtacagcctcaattctctggacgtcatcacccagcaggttctcccgaagaaggcccactatcggcgtcccggccatcactgtcgcctcaaacaggtatggaagttccctcttttcagcctcgttgagaatctctcggtagtggtatgccagggggggcttgttgctcgttacgatgccctttccttccttcaaagccctgagatgccacgtccaggcctccttgtcgttggtgacgtccacgactatctccgagtcaacctccccgactatctcctcgggagttagctcgtagacctcgtagtcgttggtccacgcggagagcctgccgaagttctccttaacgagaagggcctccctaaggtctatcccctcgggaagccagactgtcccgctggtgtctgaaatgctgacgacgcttatccttactccgtaacgttcctcaaaaagcctgctcttttcgagaagaacccctgccgtggcccttccaacgtttccaaaaccgataagagaaaccctgatctccctcaagaacaccaccaaagtaaagaagggaggaaagcttaaagccttttacttgttcaggattacctttattatgtccatgtcccttacgatgcctacgagctcgtcctgtccccttatgacgggaagctgttctatctcgtacttgaccatcttctgggcaacgtcgtagacgctcatgtggggtgtcgccacaacgacattggggttcattatctcctcgactggcttctttggaagctgaagttccgccttctcaaagagcagtgttgggtggctttcgagtatccagtcctcctcgctggaagctgccagctcggtgctcttcattaccctaacgacctcgctgtccctgaggaggtcagtctcgtccaccatgcctatgaggtttccgtcgtcgtctattaccggtatggccattgcattacacaggaggagggccttgagggccgcttttagcggtgtcccgcgccacacgacgctgacgtttctctggtagtagggttctatcgttacttccttgagcttttcgttctttgataggtacctcctcacgatgtcgccaacggtcagaatgccaacgggtctgttctcatcgtcaaccacaacgacgcgcctgtagtccatttcaagcattttcttaacggctttcttcaggtcatcgtttgccttgacggttgggacttccctcttaacgagcatggccagctgatcctcatcagggtggaggaggacgcgcttgatgctgactataccaactagctttccgtcctttccaacgacggggaatgagcgtaccttgtgctttctgaacagctcgatggcgtattccctcgttgcaggtagctgaattacaaccggatccttcgtcattagggtctttactctcattttcaccaccgctctatctaaagcgccctctttgtattttaatgttttggaagatgggagaagggaaaaggctcagcccagaagggcgaggaaaacacctgcaacgactgccgttcctataactccagcgacgtttggccccatggcgtgcatgaggatgaagttgcctggatcttcctccctcgcgatcctctggacgacccttgcactcatcggaactgccgaaactccggcggcgcctatcatcgggtttatccttccgccgctgagcttcatcatgatcttgccgaagaaaactcctccagcggttgcactggcgaaggcgacgacaccgagtccgagtatcattaaggtctgggctgtcaggaagctctcagcgcgcattgttgagccgacaccgagtccgaggaagatcgtgacgatgttcatcagctcctcctgtgccgctttactcagcctttccacgacaccgctctccctgaagaggttgcctatcatgagcatccctatcagcggcgcggcgctcgggacgagaagcccaatgacgatcatggagattattgggaagagtatcttctccctctttgacacgggcctcaactgctccatgcgtatcttcctttcctcggggcttgtgagggccttgatgattggcggttgaatgagggggacgaggctcatgtaggagtaggccgcaaccgccgttgccgcgagtatctccggggcgagcttggtggttaagtagatagtcgtcggcccgtcggcaccgccgatgatgcctatgcttgccgcctggtggaggttgaagccgagagccaaagcggttagcatggccacgaagacacctatctgcgccgccgctccgaggagggccgtctttggatccgctatcatcggtccgaagtcggtcattgctccgaggccgaagaatatgagtagtggaactacctcagtcttgatgaggaggtagtagatgaggtcgaagagtcccggctcaccgtagtgctcgctcatgtaggctatcgtcttgaagatgctgtcgctgacgttctcgggcaggttcacggccaccggccagttggctacatgggagagcggcaagttgacgagcaccgccgttatgcctatcgggaggagcaggagaggctccatctcgtacctgatagccagatagacgagcgtcaggcccactaggatcattacgacgttccctaccgtgaggtggaggaggccgagggtgttgatgaagtcaacgaacgttgccatagtccttcaccctatctctattaaaggatctccggtgtttacggtgtcgccttctttgactaggattttctttacgacaccgtcttttggtgctggaatctcgttctccatcttcattgcctcaagaatgaggagtccctgtccggtcttgacctgctcgccttccttcacgagtatcttgaggatttttccaggcattggggctgtaacaacaccctcaccagcggcggctggagccggtgatggagttgccggcgctggtgcgagagctggaaccggagacggtgcagagggggtacttggagcaggggccggagcagagacctgggcacttgctaaagcgctcatgtctattccaagtcccttggcctcgacctcgtaggtcttgtcctcaaagctcaccctgaactttcctccgggcagttcctcaacctcgacctcgtattcaacaccctcaacgatgaccttaaccttcgccattctcaccacttccctatctcgtagttgaagtcttcaacatcttccatctgggtctggaggccgtagaggcgccaggaatctgagaccttcctcctgaatggcaggggcctgagctggctggccttttcggccgtgtaagcgagtatagccgctgtgataacggccaggtctctcggcggtatcttcggcttctcctcttgcctggcctccacaggggcaggagtgggggctggtgtgggtgcggtagcgggcttttccctctccaccaaccttctctcgagccagcccacgaagtagaggacgagggccagtattcccagtatggtaaagaccactacaacacctatgacagttatgttaaggccctccatgacggctttgacgtccatccttcacacctcacagcggtatgttgccgtgcttcttcggcgggagctttaccctcttgctctccatagcctcgagggccaggattatcttcgccctggtctcggccgggtctatgacgtcgtcaatgtagccgcgtgcagcagcaacgtacgggttggcgaacttctcgcggtactcctgtatcttctgctgtcttacctcctccgggttctcggcggcggctatctccttcctgaagatgatgttggccgctccctcgggacccatgactgctatctccgcagttggccatgcgaagacgaagtcggcaccgaggtgcttgcttcccatagcgaggtaagccccaccgtaggccttcctcaggatgacagtgaccattggaacagttgcctcggcgtaggcgtagaggactttagctccgtgcctgatgattccgcggtactcctggtctgttccaggcaggtagcccggaacgtcaacgagggtaactatcgggatgttgaaggcgtcgcaggttctaacgaagcgagctatcttgtccgagctgtctatgtcgagaacaccggcgaaatagatcgggttgttggcgactatcccaacagtctgcccgttcatccttccaaagccgacaacagcgttcggggcgaagtacgggagtatttcaaggaagtccgggtttccgttctcgtcgcggtcaactatctcgtagataacctgcctgacgtcgtagcccttgttcgggtcatctggaacgatgttgtacaggttctcggtcttcctgaagggcaggtcgttcgtcttaacgcgcggcggcttctccatgttgtttgacggcaggtagctcaggagcctccttatgagggcgagaacttcctcgtcgctcttccctatgaggtgggcctgaccgctcttctgggcgtgtatcatagcaccaccgagctggacgggggtcacctcaacgcccgtaacggccttgacgacctgcggcccagtgatgaacatgaagctggaatcgctgtccaccatcaggatgaagtctccaatagccggactgtaaaccgctccgccagcacagggacccataattgccgttatctgtgggactacaccgctgagaagggtgttcatcttgaatatctcgccgtagcccttgagcgagtcaacgccctcctgaatcctcgctccgccggagtcgttgaggcctatgaccggagctccggcttcgagggccagctccataatgcgctttatcttcgccgcgtgcatctcgccgagggaaccgcccataaccgtgaagtcctgggcgtagacgaagactagccttccgtcgatggttccgtagccggttatgacgccgtcggcgggcagttccttcttgtcgaggccgaactcagttcctcggtgctttacgaacattcctatctcgacgaagcttcccgggtcaaggagcttttcaatcctctccctggccgttagtttgccctttgcgtgctgtttttcgatggccttctcgccacccatctccagaatcttctttttcctctcatacagctcgttgagcttctcctccatgctcatgagaactccccctgtttttgctgacctttgttatttgtaaagtttaaaagcgtttttcacaactctcttttcaccgagagtgatacaaaaagtggagaaaaggcacttcagaggtgctggatcggtgtttcagcaccacaggcttcgcacttgaggaagtggaagcggcccttcttgataatcttcgtatctgggcttccacagacgggacagataacgaactccttgaggtacttcttcatcttgtttgctatgaggtacggcgtaaagcgtccctggagaattgccctcctgccctcgagggttccagcggtagcgacctccctcaggatgaacttgaggagatggttcgggtcgcggttcatggcctcggctatgtccacgaagttctctatgatcgtcctgtttccggctatcgtgacctgtgccggcggcacctcgaaacgtgagtggtggtgcttgacgttctccgggagttcttcataagccttatcgaggagcttctcaaagtcgtaaaagtctaccttctcgctcattttctcacctcctacttacctcttcacttcgctttataacctttgtcagatgacgcggtagaatccagctctcggttcatagaccctgccgtcgctcttcagctcgttgaggagcttctcgatgtccgccttggttcctatccctgcctgcttggcggcctctataactttctcctccggcgctccgaactctccctcgctctcaagggattttatgatgtcaacaagcttctcgatcttgtttatcttctttgaactcttgccgacttcgaggattgagacgtcaaggttgccctcttcgtcaacggctatcgtcttcatcattgcctcgattatctctatcgccgccctcgcgtcctctctcgtcaccgtttcgctcaatctcatcctcgcgtgggcctcgctgagcctgatgagggcctcaagctgtctagcggtaatcggtattggctggacgccgtcttcatctcctctccgcaggccctttctcattttgacgtagtagcgttttatttcctccattgcctctctgctcagaacagggtgaacgttctttctggcgtatgctatgtacttcttgagcagatcgtagggtatcttaggcgtcaccgcctcagcttcgccccttctgaccttgaggatgtgctcggctatgctggcgtctactttctcgtcgggctcgtcgaggagcaggaatatcaggtcgaaacggctgagaagggtcggcgggaggtcgagctgctccgggaggctcttgtgtctgttgaaccttccgaactttggattggccgccgctatgacggtcgttcttgagttcagagttgcggtaattccggccttggagatgctgattgtgttgtggaggactaatccatgggaaacgaatagatgatgcggctcaaccgtaacatcgtagacccactcccagcggtcgtttttgatctcctcgacgcacttcaccttcaggaagttcacgttggcgttccaccacttgaagaactcttccagctccctcttagcgagggagattctctccgcaaccgcactctgtattatgccctctgcccaggaatttctggcttctgcgagctttttgagttttccgtacgttatcccgtacttatagtaaagctgggtctttggcaggagttcaagggctttcgcggggtcttctctggagagcctctcaagctcatccatcctttctataatcctctgaagataaccttcgatgatgttttccctcacgagcttttgattgaagctggcgcgctcttttggtgtctgtgttactcggagtatcttgcctgcattgatcagcggttttacaagctcccttggaagggctctcctggccttttcaacagtgaagtatatgccagttctcttgatcttcgagaccactcctcgagagtagagataatcctggtaatcttcggcttctctcatgtctctgtagcgttctttaaattttccatccacttgaatgggatacctgagaacgccaagagcaatgtccccgggtgtgatcttctcggcgggcttctcggttatctccccgttctcccacaccataactgggtgctcgggcgttacagtaatctccctgccgttcgagaagcggagttttatgaacctctctggggccttgtgcctgctaaccctgtctgctttgacctttactatctccctcttctcgagatcgtaagccagaagctcgatgtcctcaacgggaagtatctccgtgtccttgccgagtatcaccctatcgcggttcttctcgatgagcttatcaacgagctctcctatctttaccttcctgccgtcagctaagaggagctcaaagtcgtggtggtagctctgctgctccagcgcttcgtgtatcgcgctcctgtcgcggtcgctcatcttgtcgaactcgtcaattagggcgaatccgccatcggcgagaaccaaaacacccgcttccagcacccaggagcccgtgaactcatcgcggacggctgctgcagtgttgtggacgacgaaaccgtttgctatgaagctgtgagaaccttcaacggtgaggtcgtagacgtaatcgtggggagattcaatttcctgtttggagaccttgactgggccattttcagtgacgacttctccatcgacgtttctggcctctacccatccgttgggagtcaggagcttggtctcgggtgtcactgtaatactcaatccgtctccttctattcttatcagcttctctggggctctgagcttccacagtctaaggactctcatatcaccatccagtgttttaatgtagagtccgagcttttcggcattaacgctcttgtagtcctgaactttttctggtatggccttttcaaccagctctcctattttgaactgtccaagattcgttttgattattgaatccggtgcaacacataggcccgccgccgatgaactcttcccgctcgtgtaaatagcccttggagccagattggcgacgtaacggaggagctggctcttggctactccaggatctccaaccaaaagaacgtggctttctcccctcagcttcgttccgtctgggagagtcctctggacgccaccgaagagtgccagagctatccccttcttgactatcctgtgtccccagatggcgggggctatcgaatcaacgatggcatcaacgatgtccttcctctttgccagttcccttatcttctgctcgtcttccggtgagatttccagctcctctatctccttgctgagctgttcaatgtggtttacctcaagaatcttcttgaatatgggcctcttctccctctgttccaggatgaccctcagaacgcccgtaacgagaaccctgtcaccgggaagggcggcatccacgaggtcatcaaggagtattgcatcaacgaagcgcggcatctggccgcccttgaggctctctggcctgtcctgaaggcggaagctctggaagttgaggaagcggctcttgtcaacgtcaagctctatgtttctgcttccgcaggcgtcgcacttggccggcttaacgaggttctcgtagggtctctgaagtctcaccatctcgttgccgcagtcacggcacacgaaaacggccttctcaacgaagggcttgacctcgctcacacgcgtgattattccctctacctggatgagcttgtttatgtgctcgcttccgagctccttgacgaggagggtcttcggaaggttgtagaagcgggcgtggactttaaactccctctccacgaggagaggcggctcccttaggactatctggatggcatcctcggcactcgctatggcctcttccgggttgtttaagagttcgtcggcaagctcgggatcgaaggagttaaggtgtgcccagtcgattgccagcgagcgctttggtgtgaccgtgaggaggtctttgaggcggtttatgtaaacctcgttgccctcatcgtcaacgtactcccgcagaaacttggcaaagcgtgctatcatctcttccctgtccatcaggcatcaccgagccactcgtttcttatcttcgacatctggaggtatattctcctctcctcgggagcgagcctcgagagaagttccaggctgtttggcctcagcatcacggctttcagaatcttgttgaaccttatgagctttagatccctcagcttcttcctcaggttcgcaagtttggtgagcttgacgtttatagtatcgacgctctcccttgggttcagcctcacgtagttctcgaggtaataggcgtagaactcggccctctcgtagagtccctccggaaggagagtcaggggctcgctctccctttcctccgctatgaccttatcgatctcgccgattatcttgtccgtctcgtcaactatctcaactacccccgcttcccagagctctctcgccttccagtcttccacgaggacgatatctccgctcttccagtctccgaatggcttcatgaccttgacggctatgagggctttacccgtgaacatgatttgcacctttccaaggattgtcacgtcgtctaataaatcttcccgaatacatttgggcctgaatgaaccgagattggctggccatttttgatcattctgtcagggcagttcacgataaccctataagccttctccctaaattactccaggtgagtcagagatgttgatcgggattatgagcgacacacacgacaacctgccggccataaggaaggcggttgagttcttcaacgagaggaacgttgacctggttatacacgcgggcgactacgttgcgcccttcgttgccagggagcttaagaaacttaaagcacctctcaagggcgtctttggcaacaacgacggcgagagaaagggtctctacgaggccttgggaatttacgacgagctgatagagcttgaggccgatgggatgaagatcgccgtaacgcacggtacgaacgaggttttggtcaaggccctcgcccacagcaggctctacgatgttgtcgttgtcggtcacacccaccgctacgagatacaggaagttggtagaaccgtcctcgtaaatcctggagaggtctgcggctatgtaactggagtgaagagcgttgctctcctcgataccagaaagagggaagtgcagataataaacatcgacaacggggagcttctcggcgccatgagcctttaatcttccaattttcccgaaggcggtgaaaatggaggacatactccttccaaaggagcggcgggatgccgtcgtcctcataggggtggacgagagggacagcgttgagttcgtccgaatctatgccgtcagtgaggagagggctaagcgggtccttgaggagttcttcaacgcgaagggcctcttccctaccgactaccggctggtaagcaggggaactgaaccagttggcgacagaaaagctataacaacgagaagcgagacggcccttagctcggcacttgccaggcttggtcttaggctactctccaacggcatcctctacctggacggcgttgaaacgctgtatcagataaccctcgtcagtgagagcctgtactcttcaatcgctggaaaagaggttgagaaaccgccgcaaaaagaggaaaccgggagtcttcccgagcccgaggaggttctctccctgggggtcgacaccctcgtggagaacctttctggcagggacatttcggagttccttcctgaaaacgctctccttctcagagagccacccgttgagaaagtcgccgaacttctcgccgaggagagggattacccagttgtggtcgagaccaaagacgcgaggagatactccttcctcgactttgcggttgtcgtgagattgccgccgctcactgttgaggagttctcggcggaactctcttcaaggctcggaattgacgttgatccttcgtttttctcctcatatccccctgaaaagctcaatatgcagaacgttagagcactcgttcgccttgttgaggcgatcgtggagaagtggaaagtggagagggaagaagcccttaagctggcagttagactcaacctcgaagggctttgaagtacatcttcgccatttcccggtagtcatggttgtgctttccgagtgcagagtttatcagctcgcgttccttctcgctttccgctagatatcccaaaagaagtccttcatcaacggtcagttctctcacgaacgaagtcctttcgaggtactccttcctgctcctgctttcccgaattagctctctcagtcgcttgaggtgcggttcgactttctccttcctcttctgaaactcaagccagtcaaaggagagcctttcaaacggggaaataaagaggcccgggtttgtgagatatggctttaggctttccccgagctttgaggcgaggagcttctttttaaaggcctccaacccatcgtagtcctcagccagcctcttcttatcaaccaattccagtgaatcgaatagggccaggcctgttaagtagcagagtgcagcaaacgggacttttgggagggtaatggccttgcttgagactctcacgacatctccagctttgcgctccttcccttcgaggagcatgccgagggggtagcttatgctcttcaggcagaactcaagctcgtccattcttccaccagtgaaaggtcggacttttcactgaaaacactttcgtcaggtttttaggactggctatcaacatcaatcgggtgagagtatggagtgggttgaaatagatggctcctacggtgagggcggcggtcagatactcaggacgagtgttgcactctcggtgatcacgggcaagccggtcaggatttacaacatccgcgcaaacaggccgaaccccgggctgaggccccagcacctccatggtattctcgctctaaaagaactcagcaacgcaaagatcaagggggcaagcgtcggctcgaccgagctggagttcattcccgggaaggcagagccaaagcacgtacgggttcccataaaaaccgctgggagcattacgctcgtccttcaagcccttcttccagctatggcgttcatcggtggcagcttcgagataacgggagggacggacgtcccctggagcccgccggtcgattatctcaagcacgttactctctacgctctcgaaaagatgggcataaaggtcgagcttgagataaagaggcgcggccactaccccaggggtggcgggctggtagtgggtaggattgagccttgggaagaaaagaagcctttgaaagccctgaagtgggaaaggatagagtggtttgccgggataagccacgcgacgaaccttccagcccacgtcgcggagaggcaggcaaaggcagctagggagaggctgagtgaggtttacagtgcgccggttgagatagagaccgaggtttctcgctctctcggcccggggagcgggatagtggtctgggctgagacggataagctcaggcttggtggggatgcactggggaagagggggaagccggctgaggtcgtaggcagagaagccgccgatgaactcatcgaggcgttgaagacgggaatggcagcggacagattcctcggcgaccagctcataccgttcctggccttcgcgggcggcgaggttggagtcagcgagataacgaaccatctcgtcacgaacgtctgggtggttgagaagttcttcgggaatgtcttcgaggttgaaggagaggtcggaaagccaggaaccttgagagtggtaaaatcagttttgtagtctgctctatttttcttgtctgtggggatttgaacttagtgttctaaactttttgttaaaaacttgtactttagtgcacttttataaacatcaccgctcagatttctctaacatgtgattaatgggtgagaaaaatgggggctggcttagattacatccgctcttatccacccgagccgagctcgcttattcccctcctccagaggacgcaggagcgcttcggctatctcccgcgggaagttcttgaggagattgcgaactaccttggaattccgctcagcagggtctacggcgttgccaccttctacgcgcagttccgctttgagccgctcgggaagtacgtggtgaaggtgtgccacgggacagcgtgccacgtcaacggtgccgtcaacatagcccaggccctaaaggaggagctcggcatagaggaaggacagacgacagaggacgggcttgtaacgcttgagcgcgtcgcctgcctcggctgttgcagcctcgcgccggtaataatgatcaacgagaaggtcttcggcaagctcacgcccgacaaggtgaggaagctggtcaagcaactcaaggaggggaagctcgatgtctgagatcaaggccatagcggtcggcatgaactcctgtggtatagcggccggtgccagggagacctacgaggcaattaaggcggagctggagaagaggaacctcaacatcaagctcaagatagtcggctgcgtcggtatgtgctaccgcgagcccctcgtggacataatcactgaggacgaaatcataacctacggccacgttgacccaaagaaggttccgaggatcatagaggagcacgtcatcaacgggaggcccataaaggagtggatagtcaagcgcgactggtgggagaacggcgagaggaagacgtgggacgtggatggttacttcgccaagcagaagaagatagtcctcgagaactctggctacatcgaccccgagaacatagacgagtacatccaggcaggcggctacgaggcgcttaaaaaggcccttaagatggatccggaggagataattgaaataatcaccaagtctggcctgaggggtaggggaggcgcgggcttccccaccggcctgaagtggaagttcactcgccaagccccgggagacgagaagtacgttatctgcaacgccgacgaaggcgatcctggggcatttatggacaggaacgtccttgaaggggatccacaccgcgtgatcgagggaatgataatcggcgcctacgcgatcggggcaacgaagggcttcatatacgtccgtgccgagtacccgctggcgataagaaggctaaagatagccctgaaacaggctagggagaggggcttcctcggcgagaacatcctcgggagcggtttctccttcgacatcgtcatcaaagagggcgccggtgccttcgtttgcggtgaggagactgccctgattgcctccatagagggcaagcgcggaatgccgaggccgaggccgccttatcctgcccagaagggcctgtggggcaaaccaaccaacataaacaacgtggagacttgggcgaacgtgccctggataataaggcatggctgggaggcctacgcctcacttgggacggagaagagcaagggcaccaaggtcttcgcgctgtcgggcaagataaagcacggcggcaacgttgaggttccgatgggaatcacgcttagggagatactctacgagataggcggcgggacgaagacgggtaagaggattaaagctgttcagctcggcgggccttccggcggctgcataccagaggagctcttcgacactcccgttgactacgagagcgtgaatgcaacgggagcgataatgggaagcggcggaatggtggttatggacgaggacacctgtatggttgacgtcgccaagttcttcctcgacttcacggtcaaggagtcctgcggtaagtgcaccttctgccgcataggcaccaagaggatgtgggaaatccttgacaggttcactaggggagaggcgaccgaggaggaccttgaaaagcttgagcggctcgcctatcaggttaaggccggctcgctctgcggtctcgggcagaccgccccgaacccggttctaacgacgctccgctacttcagggaagaatacatagagcacataaacggccgctgtccggcgaaggtctgcaagccgctcataaggtacgtcataataacggataagtgtacgggctgcaccgcctgcgccatcttctgcccggccaatgccatcagcggcgagaggctcaagccccacttcattgaccaagaggcgtgcatcaagtgcggtacctgctacgaagtgtgccgcttcaacgccattgaaatcctcaccgggagggaggagtgatggtcaagattattctcaacggtaaggaaaccgaggttcctgatggaaagcccctcatagagtttctaagggagattacccacgtccctggcttctgctatacggaagagctcgacccctacggctcctgccgcctctgcctcgttagcactccgaggggcgttacaacctcctgcaccctaaagcctatggaaggtctcagcgttgaaacgctcacggacgaagttgtctcgatgaggaagaccgccctggagttgattctctcagaccactacggcgactgtatagggccgtgccaggacggctgtccggcccacagcgacgttcaggggtatttagctctcatagcgatgggcaagtaccacgaggccgtgaagctgatgaaggagaagtacattcttcctgccgtcctcggaagggtctgccctgccttctgtgaggaggcctgcaggaggaatctcgttgacgagcccttggcgataaggcagctcaagcgctttgccgctgattacgaccttgagcacggcccgtggatacccgagattccgccttcgacggggaagcgcatcgccgtcgttggaggcggcccagctggcctcgcctgcgcctactacctgcgcacgatgggccacgaggtcaccatctttgaggccatgcccgagctaggcggaatgatgcgctatggaatcccaccctacaggctcccaagggatgtccttgacaaggacatcgcgaccgtcatcgagacgggcattgaagtgaagacaaatactgccctcgggagggacgtaacccttgatgagttaatggagaagtacgatgccgtctttctcggcgttggtgcttggaagagcaggaggatgggcatcccgggagaggagcttgagggagtgatgcacggcatagagttcctgcggatggtcaacactggcgaagaagtgaagctcggcgagcgcgtcatcgtcgtcggcggtgggaacactgccatggacgtggcaaggacggctctgaggctcggggctaaggttacagtcgtttatcgccgctccaaggcggagatgccggccaacgagcgcgaggtcgaggaggccattgaggagggcatcgagttcctgttcctcacgaacccggttaggatactcggagacggcaaagttgaggaggtcgagctgataaagatgcgcctcggcgagcctgacgcgagcggcaggaggaggccgataccaatagagggttccgagttccgcgttaaggccgacaacgtcatcctggcgataggccagtactgcgatgaggagttcctaaggagtctcggcatcgaggccaagcgcgggaaggccattgtggacgatgtaacccttcagacaaaccttccgggagttttcgcaggtggagacctcgtcctcggtccctcgaccgtcatagagagcatcgccaccggaagaagggcggcgataatgatagacctctacctcaagggcaagcttgagaaggcgagggaagttctgcttgaacccgagaagcacatcgaagaagttctgaacgatgaagacctttacagggttctcttcgacctcaggccatacaaccactggaagaaggccacggagaaggactacgagcacgtggagagaaggccgagggcgaaggtggagctccttgatccagaggtcaggaagcagaacttcgaggaggttgagcctcccctaacggaggagcaggttcttgaggaggcaaagcgctgtatgagctgcggctgtatggaggtcttccgctgtaagctgagagaatatgccacgctctacaacgcgaggcaggacgccttcgagggggaggggaacaggttcgagctcgacgagagccacccgttcgtcaccctcgacaacaacaagtgcgtcctctgcggccagtgcgtccgcttcacccacgaggttgcgggagagggcgtcgttgactacatgttcaggggcttcaagacgatgatctctccgcccttgggcgacactctcggggacgctgaagggctcttcataggcgagatgacagacctctgtcctgttggagcgataaccgagaagcttcccttcctcaagcccgggccttggaagacaacccccgttaaaacggtctgcaacgggtgttcctttgcgtgcgagatgaacatagaggtctacgacggcatgctcgttagggcttcgagggttgaggagggctggaacggacacctctgcgacgtctgccgcttcatgagaccctgggccgaggacttagctggaccactcctaaacggagagcccgtgagctgggaggaggctaggaggttcatagccgagagggactacgcgctcatactcactccggagctcaccaacgaggagatagccttctttaaggagttcgccgagaagcgcggcattcccataggctcaacggtcgagggagggctttcaaccgcgactttcgaagacattagaaaggcaaagcgcgttctcctgaaggccgaccccgagaagtacccgctcctaaagctcctgctgaaggacaaggatgtggtcgaggaagactacgaggttgctatactcgaggggccagcggagcctctcgaagccccgacgctcatcctccacgagggagttaacgccgccggactcataagggctggaatagtcggaatcccggagagcaaggcctacgtagtgattggaagggccgagagggagctcgatggggacgtgttggttcttcccgcgggcctctgggcggccaaggaaggaaccattacaaacgccttcgggatggagctggaagtgaagaaggttgtggagggttactctccgctggagcttttctcctgagttcacccctctatttccactccatacacctttttcgggttctcgacgtgaatcttgtagacgtcttcctcagtgaatatgccctgctggaggaaggccttcgtcctcttggggacggtctttggcccgagaacggctccgggtcttcttttgtcgtctatgtagtcggtctccatcatgaagcggtttccctgctttattgcctcttcgatgttctttctgctcgctatgacgctcgggaagaccccaacttcttctgccactttcacaagaggtggggagaagtgcttgacgaccttgtggggctttatcccgacttccttcacgtactccccaagctccctgaacttctcctcgttgaagctctccgtatggagctggacggcgcagtcagcttccttcgctaggctcatcccgtacttcatcagttctatgctcgcttcccagatctccgctggaacctcgtagtggggtcttcctatctctcctatgcctatcgcttttccctcgaggcagagcttctgggcgtactccagggctttcataacttcgtttttggcgtactcaagccccttctgcctcgccaggtagtcgaactcagccgggtggactccaacgacggcgtaggccttaaccggcgtctcccggtttatcttttcgacgagttcaacgtggaagtccatcgccttcatgaagtcctcagccctaagtcctggaaatccgtagtcgtgggctgttttgtaaacaacgacgagatgtgttccccctgccctgtggaactgcttcaccgcttccagaaagagaccgtggtacgggtcaacgtggaagtggtcgtcccagattatcatcttaaccacctcacgactggtaaacctcaagaatctggccttcctcggcttttgttgggctttccatcataatggcaactttgtctccagcaacggcaaagtcaacttttctgtgctctcgttcaatagccctgatgaccccaacgctcgaccccttgagcttgtagccgggatatataatcccttcgaggacttcccccaccaaaacctctctgaacgcgacttttaggactttctcgaccctgaactttccaacggggtaccttgacgctattatttcccctttatgtcgtttcctcccgagtatccttaccattccctcagcacctcaacgatgtcgcccaggctgactttgaacctctcagcattgacggtaaatagtgagagggcctttttgggacgtactatcagtgcctcattttccatgtagagctctataactgaagaggcgactgattcgagcattggcagtgggtttggcttaatgctattcaggacgggcgtttctatgatgcttatcgtggccctgttcggggagtttaggttttccctgaagtacctcactattggatacaggtcacgcagattgcgctggaacattaacaaccgttccaggccgagaatgaggaggatgtggggagtattatctccgacaatctttgaaactgctctctccttcttcgggatgtagaagtttggatcggcctcaaaagatagcttttccacgacgttcccaacgctatctatcccggccactttaatgacgttaatgctttccgatgggacatggaaacccatcagctcaatgtgttttacgtaaatcgggagggtgtcgaatatgtcttccacgatcaggggaatccctttttccttggatacctttagaagtgcatagaagctcagtttcgcacctggggaggagatgttttcaataagaacaagactacctggtttaaggttcttgccttggaaaaatgggattcttgaataatcatgggttctggtttcgttctccactaacgatccctcccacgtctattccaacagtggtgcctatcacggcaggattaatactctttttaaacgtcagaatcgcaccagtggggtaggagttcgtttcgatgacggtagtcgctatcctctcaagctctgggaggaagaagccgggcatcatgctctcgactatgttcctgtttatcaggtagagtgcaattctatttttgttcccaacgtatctctggaggcttagcagaagtcggtagaagtccctggaatcgcgcatgatcataaggatgttttctaacccaagaaccagatttatcgcaggtgtttttccctcaaccaaaatctcagaacttgcgttggtgtagtttctaaggaacaccctcgggtcgggatggaactctatccgcttgacttttcctccgatattgtgagttcccccagtttttatgacgtatgcatggtcaaggtcgacttccacgcccatgagcctgaggtggaggattagagtgtacagcgtgtcaaaattgtcgtctattacgagaggtactccattctccttggtgtaatctgcgaccagttttaacgtgaattctgggacgtatgatgtcctgtgctctatcagtaccgtctcacctggctgtattgtctcgactagatgtgagaagtccacgaattcaacattggggattgcctgatccaatgtgatcaccacttttgagttagtaacgtgtgattggtgtccatactttcgtgttcggtgtttatatcctttctcccgcttaaccctccagcagttcttttagtacgtccctggcggtctgcagtattactctcggctctgcatcaactttccctctggccaggttgtcggttcctccgccctttcctcccagctgcgaagccactcgctcaaagagctccctcattgaaacgtttacatcctcgtttctggcaaatagtacatagttctctcctaccacgagcagtaccgttctggggttcttctcaacgaatttcaccgcaaagccctggacttctttcataggcttgccttcaatcagggttaccactctgatgtcccctatcttctcggacttctctaggaggtacttgcccttccattcccagagctcctccttgagttcatctttctctgcctccagcttgtccattgtctctttaagctcctgaatcctttcaactagaggcgggtttttgtttggcatctcgtctagtgcgttccagtaatccgacaggataccgttaagcgtccttaaagccctgttccccgcgacgaactctatcctccagagcttcctgctcttcctgtagaacctgagtatcttgaggaagccaatctcgcgggtgctcttcacgtgggttcctccgcatggtgttgcatcaacggttccgattttgatgatccttatcctgtcgtggactttgctgacatgctttctgaggattttcacaacgtcctccgggaggtactggtactcctccacttccaccggaagatcgccccagatgacttcgttggtctttctctctatctcctgtatcatctcccacgtaagttctccaggatagtcaatctcgatcttgttgtagttctcaaaaatctggaagcccgttgtctctgccccgtagagccctttgattatcgccgaaagaacgtgctggccagtgtggttcttcatgttctcgtatctccactcccagtcgagaacgagcctaacttcttccctagcctctggcagcctcccttctaactttccttcatgccatatctcttcttttccgctgactttctcgactagaaccctgaaaccgtctccctcgataatccccctgtccgagggctggccacccccttctgggtagaatattgttctgtcgagaagaacccttatcttcccgtcttctacggcttcaattttttcaatctttgccctagcttcacgaaggtagggatccttataaaacagcttttcagtcatttgcaccactctccttcgagtattcgctaaccatattcctaagcagggacgctagttctttattgtatctgtcctgcatttccgagaactttttgagggcgaccgctattccgttgagccttttgatatcgttaacgatttcctcctgctccttggagatctcactgaggacggagcttatctcaactattgtgcttatatctttgccaaggatttctgttccctcctttattctgtccataaccgccagtgcatccctcagagtttcaagctggttcattaccttggagttgaagtcctttatctccttggccagctccatcgtctggactgccatctttcttatctcctcagccacaacggcgaaaccccttccagcgtcgcccgcccttgccgcttcaatagaggcgtttaaggcaacgaggtttgtctgctttgcaacggttgctattgagtcgcttatccttgaaacgtactccaggttttccacgagggtgttaaactccttggcgaaggtctcaaaacgctgaaagaaaggaagaaagtcccgctgaaacgtttcaagctgctccataacctcggaaagcttggcgatgttctctattatggtcgtgttgttatccatgaactgcccactgatttcctccgccagctcactgattatcctgctggactctttgctcgaggtttttattctaaccgattgtgcaagtgcgctcgatgccttttctatgttcctgatatccatgctaccacctcagcggagcagatcgaccccgcacttgaggttctcaaggaagtcgtagaatcttggaatgtgtctctttggaattatagcgccgtgctgtggcagtatagcctctacatcgaggtgtctcaccctgttgagccaggcctttatggccctgttgctcgccatgagcctctcgtgtatgggcctcatagcttgtatgtgtctttccatgttttcaacgactatgtagggatcgtctaggagggctattcctatgtccccagtaaacagaaacttgctcctgcggtcgtacaccgtgaagtgccccggactgtggaggaaatgtgcaggtatgaactcaagcgtagtggcgccaaagttcagggtttcgccctcatcgggaagctcgtgggttacactcttggagtcctcaaagccgaagtgcggcagaaacctcgtccagagccagtgggtaactattttggcgttgcttatctccctccacagggggaggcttccggcaacgtcgggatcctggtggcagatgtagatgtactctatgttccttggatcgacgtacttggaggcgtttgcgagaacttttgagaatatcttgtaccctcctggatccaggaggaaacctctccctctgctgactatcagatagctgttgacgtcaacgtcctcaccaccttcctgggtgcctaggtaaacgaccgtatgctcctcatccctgtagagaacgtggtcttttcgagggtcgagtccaggttctatgaagtattctcccatagccaccactctccagaaaagtttaacaaaggaaatatttaagcagtttgcctacataagaacctacataaaccggaacaaaaaagaaaaacacttaagagccacttctggcctcaatgagggccttgaccctcttcagcctgaagaagttctcgcgctccatctcatccaagcgctgcttgatgaacttgacggttgcctccatgcgcggaattatgatgtactcgagagcgttgacgcgcctcttagtgacctcgatctccttggcgagccttttgagggtctcttctacctcggcaaggcggacggcaaggtcgagaacttcttcaaacttttctgcggccagatccacccttgccgagcttgagacgaaggcgtatcccctttctccggcgctcctcttgaaggactcggcctcgatgagcgggactggaacgcccatcacgttcctggtctttacctcaacctccctgtttggcttgactgagaggcttatctccttcatgcggagtgtaccgacgtcaatttccgctctctggagggctttaaaggcctccatcatcttctcgttcagctcttccctcaggcggagcgcctcgtcgtagatcgtgaagaactccatgacgagggcgtcctgcttgtccttgaggagcttgtggcccttcttggctaaagtaatgcgcctcttgaggttgaggagctccatcctggtgggcttcacgttgagcagctctgccatctcgaccacctaaaaattttgaaggggctcactcgcccctcttcctgtacttcgggtggtacttgaggatgtactccttcctgacacgcttgagctcgctttccgggagctcagcgagaagctcccagccaaggtcgagggtttcgaagatgctcctgtcttcgtcatacctctgggcgacgaactccctctcgaacctgtccgcgaacttgaggtacttcctgtcggtctcgctcagagcttcctcaccgacgactgcgacgaggtctctgagagacctaccttcggcgtaggccgcgtagagctgctggctgagctgcgggtggtcttcccttgtccttcccttaccgataccgtccttcatcagacggctgagggacggaagaacgtcaattggtgggtagataccctttctgtggagctccctgctgagaacgatctgcccctcggtgatgtaaccggtcaaatctggaatcgggtgggtgatgtcgtcgtcaggcattgtgaggatgggcatctgggttatgcttcccttcttgcccctcacacgaccagcacgctcgtagatagttgccaggtcagtgtacatgtaacccggatagccacgccttccgggaacctcctctctggcagctgaaatctcacgaagggcttcggcgtagttggtcatatccgtaaggataacgagaacctgcatgtcgtagtcgaaggcgaggtattctgcaactgtgagggccatacgcggggtgatgatacgctcgatggccgggtcgtctgccaagttaaggaacaggaccgccctctctattgcgccggtctcctcgaagctcttcttgaagaagtttgcctcctcgtaggtgatacccatggccgcgaaaactaccgcgaactgctcctcctcaccgaggacctttgcctgcctcgctatctgagccgcgagcatgttgtgcggcagacctgaaccgctgaatatcgggagcttctggccgcggacgagcgtgttcataccgtctatggccgagataccggtctggatgaagtccctcgggtaggcacgagcgaccgggttgagcggcgcaccgtgaacatcgcgcctgtcctccgggatgatctccgggccgccgtcgatcggcttaccgataccgttgaatatccttccgagcatgtccattgaaaccggaaccttgagggtctcgccggtgaagcggactctggtggtcttgatgtcgaggtctctggttccctcgaagacctggacgatggccatgtcctcccttgcctcaaggacctgtcccttcctcttctcgccgctctcggtctctatctcaacgacctcaccgtaagcaacgcctttgacgccctggactatcatcagcggcccgtaaatcttgctaacggttgagtactccatacccggcatgatcatcacgccccgtacttcttgaagagctcttcaaactgctggttcgtctcatcgatgagcgccctaaccttctccacatctggctcgaacttcatacggcctatcttctccctgaccgggagcttggctatctcgtcaacaggaacccccctgtcaactgcctgcatggtcttctcgtagaagttgaggatgacgcgcatcatcgttacctgcttcttcggcgggcagtaggtgtcgacctcgtcgaatgcatcctgctggaggtagtcctcacggagcatcctggtgacgatgagtatcgccttctccctgtctggcagggcatccggaccgacgatacggacgatttcctggagttccgcctccttctggaggagcgccattgccgtatcgcgcatcttcctccactctgggtcgacgttcttgtgccaccagtcctggatggcgtcgatgtagagcgagtagctcctaagccagttgatagctgggaagtgccttctcctcgcgaggtcagcgtcgagggcccagaagaccttgacgacacggagggtgttctggacgaccggctcgctgaagtcaccgccgggcggtgaaacggcacctatgaccgaaacactgcctaccctctcgtcgcttccgagggtgatgacacgaccagctctctcatagaactcggctatcttggaggctagataggctggataaccctcctcaccgggcatctcctcgagacggcctgaaatctcacggagggcctctgcccatcttgaagtcgaatctgccatcagagcgacgtcgtagccctggtcgcggaagtactcggcgatggtgattcctgtgtagattgaagcctcccacgggcagcgacgggcatgtttcagggagggcctctgcccatcttgtgtcgaactccatgagcgacgtcgtagccctggtcgcggaagtactcggcgatggtgattcctgtgtagattgaagcctcacgggcagcgacgggcatgtttgaggtgttggctatgagaacggttctctccatgagcggctttccggtcttcgggtccttgagcttcgggaactcctcaagaacgtcggtcatctcgttaccgcgctcaccgcaaccgatgtagacgacgacctgagcgtcactccacttcgcgagctggtgctgggtgacggtcttacccgaaccgaacgggccagggattgcggccgttccacccttggcctggctgaagaaggtgtcaatggttctctgaccggtgatgagcggaacctccggcgggagcttctgcttgtagggcctcttgacacggacgggccagcggtggtacatcttgagctcctcgatggttccgtcgggcttcttgaccttggctatgacttcctcgacggtgtagtcgccctcctcggcgatctcaactatctcaccttcgacccatggcgggacgagtatcttgtgctcaatgatgctggtctcgggaactacaccgaggacgtctccaccgacgaccttgtcgccgaccttgacctttggagtgaagtgccacttcttgtccctcgggagagcgggagcggtgagacccctcgctatgaaatctccactgagctgcctgagaacctcgagcggcctctgaataccgtcgtacattgctgtcaaaagcccgggaccgagctcaacgctcagggatgaacccgttccctcgacgggctcacccggtcttataccagcggtctcctcgtagacctgtatgacggccttgtcaccctcaaggcggatgatttctcctatgagtccaatctctccgacgcggacgacctcgtacatcttggcccctttcatgccgtccgcaacgacgagtggtcctgtaacgcgtattatccttcccattttccttcacctcttcaactcgacaccaatggccctccttactatctccctgagggccttttcacccagtttagagccggacttgtccggcacctgaaggatgatagggagcttaacatcgggaatttcgaccttctctgccagtctctcggttatcaggattatcccaacatcctctctctcaataagttcgttgagtttattcttgagcctttcaatgtccagtggagtttcctcgaaggcataagcctcgtggacacctgcaaggcggaaaccgagtacggtgtcgctgtccccgagcacggctatcttcatgcgacctcacccacaaactccttgatcacttcaggttcgaggccatcacctatgagctttaccatggccctgagcttcctgacttccctctccttcttgagcacgtaggcgaggggagcagctatgctgagcggatggaacctgtcgaactccgtgacctttttgatcaggtgctcgtcaaaggccctctcgatgacgctgatgtccttctcggcctcctcacggactttccttatgaactcaccgtactccgttgagtccagctgggcaagcgtcatttcgatggaatctatgtgcaagaggggctcaacgtccagtgaaccaccggggatgagcattgagcgtatttccttggctgaaagccctgccagtttccccctgagtgtggtcattaagttgagtttgtctatcttgagcttaatgaactccgtgagaagagttttttcatcgtccttccttgagcgggcatagttgagaagcttcttatagtacatcctgtagagttcggtttcaaacgtgctgacgtcgatgtttccagcgattagctcctgatatgggccctcgtagggagtgccctcaaggattacgagtatctcctctagggtcttggcttccgccattgccttgaccttcggaagcatcgggccgagttcgataatgtagtccgaggcgggctcgtttgccagcttcgccttcacgacgttggctatgttcctgacgtcccactcctccatcatgagcctgaagaagtcccttgaacgcttgggaagtatcttgaacatgagctcgtaggtcttcgcgagggaagcatcgagcgccctctctatctcctccaccgaatagcttgagacgttcgagagggtctccttgtagtcggtgtcctcaaggctggcaacgaagttctgaagggttctgctctcggcgagctcgttaaagcgctgttccgtcaggagttttgcctccattgccctaacccttgcgttcgggtaggagtagggtgtgtacttccagagtatcttgtatgtcttccacccgacccaggtgaagacaacgccgagcgtcgtgttgaggattccctcgattacgttcatcatcctcacccaaagagagccttggcgatcctggccctcagatccgcttcgagcctctcaatcctggcttcaaaggtgttgtcaaccctgacgcttccgtcggagctctcaaccaggacgccgccgattgtgcttatcggttctccaaccgttatctcgacctctttcccgagcttctctgaaacgctcttcttgaactctgggagcttttcaacgatgagcttgagggtctcctcgttggagcggacgacggcggagtcgatgttgagctcctcaagggcttcggtagtgagcgtgacgagggtctggaagtactcatcagcgggaagtgaagcgagcctctcccttaaggccgagagaactgcccttatcatctcttcttggacttcgagcctcttcttccttacctccagcctggcgctggctatcgctctctgtttctccatctcagcctgggtcttggccttcctgagtatccactgggccctgtcctcggccctcttcctagcctcttccttgatcttctcagcctctttctgggcctcgctgaggatgtactgtatcttctgctccgcttccctgtttatttcctgaattatcagttctgcgccttccattattcagtccccctcaaagattataaaaaggagagggcttcagaagccaactccagtggcgatcatgataagcgcaccgacgagaccgaagatcgccgtggtctcggccatagccgcgaatatgacgccctgagtgaaggtcttcgggttcttggcagcggcgcctattcctgcgctggcgatgataccctgaggtatagctgagagaccggtgaggccaacggtaagaccggcgccgaatagtatggcgctcttcacaaggttctctgtggtcgcttcggcaaacttgaatccgccgccgatgatcccagcgctgagcataatgaggaacagggtgatgagaccgtagatgctctgggtcatcggcagaccctcaaggatgagggcgttcttgaagttcttctcgtcctccgcaaccgctcctgccgctgcagctccagcgattcctataccgaaagctgaggctatacccgctattcccgccgcgagtgcggcgcccaacacgacgtaaactatcggatccatctctttgcacctcctaactagacctcaagttcaagctttgagacttccctcttggatttaaagggctcgaaccttttaccctcacctgagtaaaacgttccgaagaactcaacataatgcagacgtagggcatgaacaaatgctccgagtgcgtttatggccgttgaaaacagctggccgccgaagaatattatcaggcctattatcggccctatgtagaggaactttatggcccagaccattccaacgagaacgtttatgaccatcgctattccgcccgttgccagcgccagcgccatcagtcttgcgtagctgagccagttgccgacgaagccgaagaagtctgagattatcatcagtgctgctagtccaccgttgattaccagctcgcccaccgcaaacagggctatgccagtaccgaggatggcctttgctgctgcatcgagaccttccctctggctagcgaggagagcaacacctatgatgatgatcatccacggaagctgctcaaacactgcgccctttctgtctccattcttccacttgatgacgaaacctagcgtgtacccaaggaataggtgtgccaagcctatggcaagcgcggctagaagcataggcataggttctctgagcggatcgaggaggcgccacgcgtgggcgttctgatcaccggttatgtattggagcattatgtctgcagcgtttccaaagtagcttccgaagagtgctccgagaagcatcgtgaagaacgcgctccagagtaggatgtatgcaaacttgtaggttccgtcgttgaacttcttgtggcccttaactaggagagccgccactatgccgactatcagaccgtagaggaagtcggtgagcatgaatccgaagaagaacgagtatgtaaaggctattatcggcgttgggtctatctcgtcgtgcctaggaacaccgtacatctcggtgagcatctcgaagggtctggcccatcccggattcttgagctttacgggcatttcttcgagttcttctttccttggttcacggacgtttatgtaggcctttccttccgttatcctcttgatgccctcgagtatcttctggacgtccggcctcggcacccagcctgtaagagcgaacgtcatgttggttctcgcgagcattggcagtaccgttgacttgtcgcgctcgttgtccaccagttccttgtagaataagacgtcgtcgtagtacttttcggcgagctttgaggcttctttcttggcctcctcaagttccttctctttttctgcgagcttctttgagtactccttcatgagctccttcggagtgccctcgccttctggaatctcgagtttctcaacggagaacttggctaggagggtgttcaccttgtcatggtctctagccaggttgacaatgactacaagtgctttgtcgctggcttctttggtgataatggcaacgtggttctcggtttctttctttagggcgtctgctaactccttcactcttgtcctgtctacgagaccaacggttacctccacgacaccacaatgtcttagataacttacgtctatattgaggggtgtgaggatgtccaaaatgccaatttgctcttttattctttcgatttctgtgctcaaagagttcattctaccttcaatggcctttatctctggctctactttccccaagaactcttccacgtcttttatgagcttttcaagtctttcgtatctatatgttctcttcggcttttccttcgggaagaagaactctttgatgccccctccagcggccttcctgtatgtcccaaggaactcgacgagcctggacatgcttatgctgtaggacgcggcttttctgtggtactcgtttggagtgtctttctgggcgagctcgactttaacctctcttacttcgaccgctccagcctcgtggaggtacgttagaagggtgtccttatacctgttaagtgtaattacctcgagttttaccatctcttcgggccggaacacatcaggcccccctgacgagttctatggcttcctggatagctgtctcaaagtttgactccgccctctcgcggagtgcagaaatctctttctccccctcctcgaggattttcttggcttcggtttcaccctcaaggcgggccttctctatgaggttctgtgactcctcctcggcctttttgatggtctcttcctcaattttcttagcttcttcctttgctttccttattatctcctttgcctcatgctctgccttttcaatgcgggtctctgcctctttttctgcttcaacaatccgcttgatgacgtcttccatgagccgtccctccgatgacagtgaaaacaggttcctctgacagctttggctagcctaatcgctttaaatagtttatggtcggtctagaaagtttgagaaaaaagaggtaaaattggaatttattcggattcctcttttctatcctcaaacagctctttgacctctttgagggcagagttctttgcgaatattattatctggcccttctctggcagtttggtgtctccagatggtattatcaggttgcccttgccgtcgtagatggccactatcagagcatccctcggaaggttgaggtctttcacgagctttcctgcaaccttgctgttctcgtctatggtgaacctaactatctcggcaccctccttcgggaacaggactctgtcaaagccaggagtaacgatgttcctgcttatgtactccgccgctatctcctcgggggatatgacgaagtcaaagtactttttcaggtctttgacctcttcgaatatcctcctgttcttggggttgctgaccctcagggatgtcttgatgttcgggttgaggctcttcgccagtatgcaggctaggaggtttgcgtcgtcccttcccgttaaagccgcgaaggcatctgcctgctttatgttggcctcctccagcgtcttcgtgtcggtcgcatctccctcgattaccaggccgtttatcattagggagagctccttcgccctgtcccggtccatttctattatcgttacgtcgtggccgtcctcttcaagcatctttgccacgaggtatcccactcttccagcgcccattattatgacgtacatcactcctcaccgatgaggtacttggcaacctctgcataggcgggtctcgtcacgaatattccgatgaggacgccgattatcgtcgtcaccgcgaagcccttgagcgttccgacgaagtacacgaggaggaagctcattgccgctatggtggttgccgccgaggcgaatatgataaagaacgcccttccgattctcttgagagctccggcacgtctggttatccttgtgctcctctctccgccgaggagctcgtcggttatgactacctgctggtcaacgcccgtacctattgccgcgattataccggctatgctcggcagatcgaggttccacttgataagggcagctattccgaggatgattatgacctcaaagaggctggtgctcgcgacgggtattgctatcttccagttcctgtagtggaagtaaacgatgaggaggaccgccaccagtgcggcgaggcccgcataaagggcctgcttcttaaagtcctgcccgagctttggagatatgaactccatgctgatgaccttgagcttgaccgggagggaaccgctcttgagcacggtgtacacagttttagcttccctttccgcttcaaccctgttggatgcgcgtccggttatctgaacgtcggtctgaggaacaccgttggcaagtccttcaccgagcgaatacgggccgtagagtccgagtatttccttgacgaaggatgtagtgtcagcacttggctcactcgggatgtacttaacgctcacgttcatatccttcagcccgtcgtagagctccctgggaactcctgcgaggacgattgccctgccgtttgccatttccttgagttcggtggcgctctggttggtgtacattatggtcgttatgttaagggccttctctatcctggcggccagtggtggtgcatcgggggcgcccgcgttaaaggccgttccgttcattgtcatgaagacatcctgaggaacaacaaggagggaattaatcggtggatcgaggaacatatcaactggccatcccgcctttcccttggccagctccgcaaacttctcggcggcgctcttcgatatcctgaacggaaccgcccagctgttgtcggattttatctcataggggccgacgtaggtgatgtcctttccggttccaaagacaacaccgttgaactccatgaagaagacaccctggctctcaataacctgtttgagctggtttgcctcttctgttgagctcacgtttgcaaccttaaccacgactatgctgttgccctgaccttcaactgagatgtcccttagaccgaaggtgttgagcctcttctggagggaatccacgacgagctccattgtctttgagtcaacgggctcttccgtctgcgcgataagcgcgacaccgccggagatgtctattccgaaggtgagtccccttgtgtagagagaacctattgagcctatgaggaatataatgagcaggagaaccttccagttcaggaggattttcttgagctttctgttcatagttcaacccccctcgagaggtaccaccgcagaacacctgcgttgaaaatccatgtgttcataaaatcggccagcagaccgaatatcaggacagccgctatgttgtccaggacgggtgaggttgatattatccacagcatcaggagggcaccgagtgttgttgtgctcatcgtgaagccggttgaaacagcgcttagataggcctcttcgatggtgtactcctttctcttagtcagttttgttgtgaggaggatgttgctgtccacggtgtaacctatgagcatcaagagagcagctatcgtggcggttgtgagctgaattccgaatattcccataacggcaacggctatgatcatgtcggagagcgccgagaagattatcgccagagatgacactgggttcctgaagaacaggaacacaacaatcgccattgcgatgaatgcgaagatgatcgccctagtgccctgtttctttgccatctctccgaaggtcggctgaacatcgctgtgggtgaagtctgcgttggggtacttttccttgaggatgtctattattttttgaggatcggttccagcgggagcatagacccttattccctttgatccactaacgctggtgaagctctcaacgtgggcttcgatgccaagccagccgctcagttccttctccagctggtcagggtttgcgctgattccctctccagttaccacaacaccgcccttgaggtctattccgaggggcgggaagtgcactgccagcaggaggagtgccactatgaaaacaacaagcgggtaggttatcattttcttgggctccatttcagcaagaaacctcagcttttccctgctttttgcccgaacttcggcggtttgtccgggcttttgagttttacccttggccatacgttcacccctgaaagttttgattcggtaacttgttggttaataaaaaccccgacggttttaaaattagtggtggatttcatggattcactcttcggtgtttgttttttgggttcgggccgttgtggtagactttatgcccaattgggataaaaattgcagttataatcaaaaacacccagaaaaagtcggtttaaatcgatagaaaacggtaaatgtccgctcagtccagaatcggcccgttacttgcccttctattttgggattaactttaaaaagggtgtcaacaaccaaaggttcaggtgagagccatgaccgagatagagacgataggttttcactacgttgttgaggctgccggttgcgatcctgaggttctcggtaacgctgacaggataaggcagatattcctcgaagcggccaaagtgggcaacatggaggtcaaggcaagctacttcttcaagttctccccgacaggggtcagcggcgtcgtcatagtcgctgagagccacatctcagtccacacctggccggagaagggttacgccgcactcgacgtctacacctgcggcaccaaggccaaccccgagaaggccgttgactacatcctcgagcagtttaaggccaagtacgctcacgtctcagagataaagcgtggcatcgaagaggacgacgagaccttcacccacatgataatgacctgggaagaagcattaagaaagaacggaaacggaagcggctaagaagttcagagcagcttttctatttccttcactctctccagggcgtcgtttaggacttttctaacgttttcaagctttgccttgagctggtggttctcctcctcgagggtcttgaccctctcctcaagctccctgacttttgcttcgagctcctccttctccttcttgagcttctcgtactcctccatcgcaacgagctggccgcccttggctagaacctcaacgttctttacgagctcgtcgagcttgccctgcttgatgagctcgtaggtctccctgacgagctgtcctgcttttgtctcgcccttgaggtgcttccttattgtctgctccgtcctgccgagctcttcggctatctcgctgacggtcatgccagccttctccctggctattgcaccggcagccactgccaggctgtcaacccaggtaagcctctccgccgggtccttgatgagctctatgacctcgggcctgaagagcgtcgcaaacaggagtatgctctcaagcctgtggatttcctcccttccaatcgggttcagtggaacctccaccatttccatcacctcccttcggttttcactcaagctcgatgacggccttcctcttgaggaccttgtcgggatagacgattattcccttgtcggtgatatcaaacgggtgccttctcatactgtggctcgttccgcgcatcttccagactatcagagagcgcttcagctcgccgtcaatctcgtcgaggtcgaggcgaattatgccatcaacgccatgctcgacaccgggaccaccgaaaccgcgctcaccaacgcttatctggctgacgaagatgctcgtgaccccgaggccggccagaacgcgcttgagctgcatcacaatgcttctcgccatagctggtttgttgatgtagagcgtcgtaactgaatcaacgaccagcctcttggctccaatgtccttgacggccgtcctgaggacgtctatgaactccctgatgtccgtcaaatcgtggacgatgtacttctcgtactccttgctcttgccgattccagcggtgaaggcatctaccatcgcgaataatccttcttcctcgtacttcctgacatcccagccgaactgagccatgttttgtctcacctgaaccgggtgctcttccagagccacgtagattcctggctcacccatctggaggccgttccagaggaactgctgtgagaagattgactttccggttccgggcccgccgctgagaagaacgacgttcctctcgggtattcccccatggagtatctcgtccatgcccgggatgccggtctttaccctcttgatcatcgtgaccacccccttaaatttacttttagttaccattatgttcctgtgtggaagggcttaaaaagattacgttgggtaagaaaagtcagcgcttcctcctgaggacaagggcgataatgaggagcagtaccagcgcggccggaaggagccatttattgtttatctccttgtatccttggtcggggtttttgttggatgttgggctagtttttatgggagttcgagtgaaaattttatcagaagtttttctgagtgtgatgttgatgtgggtcacctctcctgccctgagagtgattatcatgaatgcttcctcgtagccccctttctcgaccttgaggctgtggttgcccggcattatggagaggttgcagggcgtaatgcattcccctccgccaacttcaacggtggctccagctggagaggtcgcaactacgaggaccggcatcttaaccaggttcagcgagacgtttctgaaagtgccaggggacaggtggatcagggtggagttcggaaggtagcccctaaggaaggccgaaacgttgtaaacaccggcagtcaggtttagggagcagggggaggtacacgttctgttcccgaccttcaccttcgcccccggaggaaccgtgacaacgttgagctcagccggcagggagctgagagtcatgttcaacgagacacttccgttggccggaaccgtcacgttcttcacgacgcctccgtatcctgccagataggcgctgatggtataggtacccgcagggagggacagcctaagtgggcttcttccggagaataccttctgatttccagcaaaaattgcaatacttgcgttcgggggcgtcgttgagactcttagtgttccttcctttggatgaatcgaaaccgacctagacagcgctagaaggtctacctggagagtgaggttcctcccggcggaaaccacgacgccagagacaaatgggtagccgttggtgccgagcgagacgttgtacgagctcagccgggaggtaaaggggaggtagagcctcatcggggtaaaccactcaccgaaaagatgaaagccgttgacgtaaacggtggcgttggcaggttttgaagttatgcctactggaaccgggatagtagcgttgctaatcggctggcgggagcagctgccgtaggcactccagctgttcttatctcctgatatatcgattagacagtatttcttaacacccgcatactcggcagccacaggaaggccgccgggaaggaggagatattctcttgtagagtgtgaaagaatgacagtccccatagggactggctttgatggtcctatcattaagcttgcaccctcaccggtggtccagtccggcgatgacgctgagggcatttcctccgattcaagcgctgggactcttttcccatcagagaaaacgattgcccttgagaacccttttagggaatcgtccaaaagtgagccgttgatctccacaaccaggggtacactcccaacgctcatgttgaagataacggtgatgtctccaatagacgcctcaacctgccactccccgacacttaggttgagcaggacaggggcggttgcgctcaggttccccacgctgatctgtccctggaactgaaagaggaccggcactgaggacaccggcgtcatcaggacgctaaacaagattgagagcagaaacaacctcctcaatttccccatggaacttcaccctccccccagccataacaaccgccctgtcggcgaacccgacgaagggcttccatacgtgggagactataaccatcgagataccctcggaggcaaaacgtctcaacaggctcgctatttcgggtatcgcgtcaaagtcaaggttggcgaggggctcatccagcagaatcagctcaggagtacccacaaaggcggatgctatgctcaggcgctttgccatccctgccgagtaagttgaaatcctcctgttgagaaagcccattagggagaaagcctcgacgatatccgacagtgggctcccccggattccagccaggaactcaagccactcacggcccgttctgtgctttggcagggcgggagggtcaaaggatacgccgagcttcaccctaaccttttcattggcccaggggtcaccgccgaacacccttatggtcccggccgtcggtcgataagttcctgcgcagaggttcaggaacgtgctctttcccccaccgttgggtcccataatgagggtaactccctcctcaatttcaaggtccaaggagtcgagcgcgattacgtggccaaaatgcttcgttagatgctctgcccgaatgatcatctcctcacccccagaagggtgaagagaagggcagaggtacctcctgtgatgtactcgattgagagggcttttgaagacgggtaactctcccggccggagatcgccacggaagtgggtgcttcagctgagactacgacgcagtaggggccggaatggttgaactcgacaactgttctcccactatcttggacggtggatttgacgaccctatcctcaacggggtcgtagaatgtcaccgagtagtggccctcactgttcacgttgaggacgagaaccctcgcggagggaacgacggtgcacgatgccccaactgcaaagtccgaatacggcttcgagagctcgacgtgctgaaccgtgagcgccaccagtgtgaaggccgtgataaggaagaggatgagcctggggaacctcatctaacgtccctcctttccgcgacgtacagtgtcagtctgatgaggaaaaggggaaggagaacgcaggagatgaaagcggacgaggccaactcggagacccagcctgaagtggaagtacctgaagtgtaagcgtgaaatatcgccaagttaaggactgtggggggcagaaaggatatccccagggagaacgggacgtggagaagggcaagccctgccattattgagacgaaggtgttgggagaggccaacgccaccagggaagaaaccgcgaccgcgtagagaacggctagggcccaatagaacagatacaggggaagtaggcccttcgagagtagggcggtgagtatgaagtcaccggtatcgccgaagatgtaggtgaccgtcagaatgaacgggaggaaggatgccgtaaagagcattatgaaaacggtcagaatctttgtgagaacaagtttctttctccctacgggtaaggagtagagcgagagagcaaagcgtgtgtcctgtcgttccgcaggacgagcgatgataggagaaccgcagttagcatgaaggtggtgtaaacctcatcggacaggaggggaacggtgatgcccatggctctccaggaagaagccctgatgatgtcctcgctcggtggggaggctatgaaatgggtcgagaccctgattccccggatgaagagggaagttccgatgagcaggaagccgaaggcaaaagccgttaggttgagcgggtcttcgagctcccagcagaggattttcatcgaacccacctccagaagtccctgataccgactgcgagggctataatggccagaagaacgaggtagtatacgaagggactgttgggtctctcgaagggatgttcatcctgaaactccacgttggtcgcgtagaggttccagccctggagccatcgtttgtttgagccttcggcaagaaacctgcggagggcccgcgaggcgttcacgtcctccatcgtggaactgatcacgcccattagaactagctcaggaggagttgagaacatgtcggacgctatcatcaggccgttggggggtcgtagagggcagagaagcccgtaccccccgagaagctgtagtccgggccgtggagtgttgaacctcaccacgtcggattcgaggtagataaaggggggattaaacgtgcgcaggtgcgtcaaaacctcaacgtcccggtagcgggagtaacttaggtttttgattctcattacccagactcccccttccgggacggtgacgttcaacaggagtgcgcctggtttgggtggattggatgggtctatgaaaaagctcggcctggcaacgggtgtgccgttttgcatgtacatcccgtttttcaggtcgagagtgagaacctctgagagcacgagcttgctagcgttcgcgaggtcgggcctttcaacaacgacatcgtggagttcaagtgtgacgaggattttggcggtgtcgttgttcacggagaggatctcgaaggtcaggtaagaagttcccatcggccagagtgcggtgacgtagttctcatcccttgagacgttcctctccatcgtccaggtgaggtaaggataaagcgcctcgaaggagcgtccgttgagcatgttgagcttgatcataacgctgtttgtcccgaacctcgcgtccttcggaacgataactgcataggtcacgtaggttccggatttaagccaggccggggcggcggacacagtggccgtctccgcgagaatcaaaaacaaaagaacgaaaatgattttagcccgcacgcggcgtcacctgggttcaacgtttataaaagtggggaatcagtgcaagtgccccaccggtttcgccgttgtgcctctcgtagggtattctggtaaaggatattttcgctcccgtgtactcctggacgcgggatctgtcaacggtgacgctggaccagtacgcgacgtgtttcacggttggggtgtctacggttatcctcccgttgcatatgatcagccatccggagacacctgcccagacccactcatcttggccccactggggggtatctgtgtcgtggtcatacattctttggcattctgacgatagaacggtgggctttgagacccaagcggacgcgccggccgctgaaatcaaactcactaggaggaggaccaaacttaatcttatgggttttttcacatgtatcacctttcttgaggttttgacactttttaatagtatctaaattttataaaaatttttagtaaacagtgatgttttatcgggagaacagattctaaaaatgagggtgataagttacctctttctcctcaaaaactccccgatgtcggtgacgttgagaatgaacttatttctgctccctggatttattctgcctattccaaggattatcccgttttcgtcgtaaatcacgagctttttggtgccctgccagtcatacttccttacacctctcttaggcacgtcctttccggtcgtgaagagaaagcccgcctttgggcttagaactgcgtagttcttctgcacatctacgaagtagaagaactctatgtttggatagaacttctcgacgaggtttttatcgacctttatcgtgccgacgaaagttccgtaggcgtagggcttgagatccaggctctctatctctctccacaccctctcattcacagcataaacgtcacggaacttgccctcaactactgcaaagaagtgatgtctaagctcgccatacttttccgcctcacggaggatgaggtcgtactcccatgatgaggcacgccggtagcggagttcttcctgggtcatcggggaaatttaggcggggtacttaaaaacgtgagcgttcacagcctctcaagaagttcggctaaaccgtccatatcagtctcttccagctccttttcgaactctagcccgagctccgctatctcctccggcgttatcgtggtttctggctcttctgcgtttactcccggacagctctcgtcgtagtatagccagagcctttctcccctgtattcaaaggacttctccccttcaacgccgagcggctttttcgacaccatgaatggataaatcctgcagataaggggtctggccttatgaatagtacactttccggtttcggggtcgtggaagacgcagcctaagtcccactccctaacggagagcacgaagcggattttttcgccttcaatggagaaagtcacgaagtcctgtgggtctttcccagtcctggcgatcctttcgatgtcctttagcgtcaggtagacgtgcctccccctgcagcagtcgaggcagtagagacagcggaagccaaccggttctgtaaatggcttgggtttaaagcgcatggctccccattcatggatgtgccttaaaaacttgtccttacctattggatttaatattcatcaatatcaactaatacgtgtctatttcagtcaaaaaatttataactgtaagttgttactgattgatggtggatagtatgaacatgattgaggcaaggggtttgacgaaggtttatggagacaccgtcgccgttgatgggctgaacctcgcggtcaaaaaaggaacgatcttcggcttccttgggcccaacggcgccggaaagacgacgaccatactgatgttcctgggactaattcagcctacaaagggggaggcgtacgtcaacggcataaatgttcaggagaaccctgtggaagttaagaggataagcggttacatgcctggtgagggtagcttgtaccccaacatgagcgcccttgataatctgctttatttcgccaagttctacaggatgcccaaatccgaggcagagaagcgtgccagggagcttctggagctcgttggacttaaggatgtcgcggacaaaaaggttggaagcttttcaacaggaatgaagcagagactccttctcgctcaggccctcataaatgatccactggtcctgttccttgacgaaccgaccaacggactcgatcctaggggcgtagttgagctcagagacgttctcagggatctgaagaaagatgggaagacgatcctgttttcaagtcacatcctctctgaagtagagatcataagcgatgagataggcataatctccaaggggaagctcctgatcagcggcagtcaggacgagataaagcgcaagttcattgagggaaggtacatgatagtcgccgagacagtggagccgattgacgttggctcgcttgatctcgacgcagcggaccttaggctcgagggtcagaaccgccttgtggtttattctgagagggacatcagggttgagctcctcaggatgttggagagcgccgggtacacggttctcgacgttcacctccaggaacccaccctggaggatgtgttcatggagcttgtttatggggggaagaatctatgatcggtgctattgctgaaaaagagtttagagataatctaacgagtaaaaggttctttgtagtgttcggtttccttcttgcagtagtcgtactgtccctgatcctggttaaactggacctgtacggaatgtacatgccgggcggggatgatgaagctcccaaggtgtaccacgtcctctggggcgtcaactaccttatcggctccgttggagggatctttgccctagccctcggcttcgacgccgtgacgaaggagaaggagaacagaaccatgaacgttctgatggggcatcccgtcttcagagaccaggtgatactggggaagatacttgggggggctataacgctggcggtctccgtcctcataactgccctcataatgaccgggcttctcctgtggataggcgttactatcgacagctacgctaggatggtgatgtacttcctcgtaatgtacctctacttcatggtctttttcacaatgggggtggcgttttcggcccactccagctcaagtggcagcgccctcatgtacgccttagtggcctttttaattctcaccactttaaccctccccgtggcggagctcgttgcctacggcgtcgccggtccaaggccgcaggagcctgaggagctgagggcttactacgaggaaatggagcgcatattcagcagtgaaaatgtgacccccgaagacatggcaaagatggaggatattcagaaaaagatggaggtactgcaggaggagtacagccaaaaaattgaggagtggagcaaaaagtactggaaaactatagagtacgttcagataatatcgcctgaatatgacttcgaccaggtgtctgagtacgttctcaacccagagaagggctctgaggattggttcgtttattacgatagagactttgatgaagaggagcccccgagctacagcctctcagagagcctgtccttcgtcaagaaggagctcggaatgatggtggcatacctcgtgctctggacggttattgcatacctgggcttcgtgagggctgagatcaggtgatcgccatgaggcgcatctttatcgtcttttttgcagtgttgcttgccacttcggctctggcctcggcagagacctttaccattgtcctgcatactggccagagtatatccgtgaacggggttacggttcggttcctagacttttcagaggacgggcgggtggcagtacaggtcaaggggactactcacgtgctttcctatggagacaccatcgaggtagtgaaggggataaacctgacagtgggtagcttgagcttttctgagagttcagtgctgcttgtcctctatggggaaaacatcagcatgggggagcaaccatccaacatccagcttgagagcaggtttcccagcaagattactcagccaggggaggatgtcgtgtttaccgttcgggtacggaacctcggccaggaagggttcgttccggtggtcgtaacagctccgagggggtgggatgcgaaagttctggccggcaactcggaagttgatggggtgtacctcaagagcggcgagaccgctgaggtctcggttgttttgaggcctccctcccgtcctgggaagtaccctgttgtcctccaagcgggggactccgagctgactctgtgggttactgtagttggtgggggtgttgagataacctgtctttaccccgttaaggaagttgaagcgggcaggaacgtctcgttttcgctcgttctttcttcgaaggtacccgtcacggtgcccctcaacgttaccctcccttctggatgggaggggaagttcctggccgggggtgacttcgttaggggagtttacctctctggagaaagcaccgttgagctcctcgtcagcgtgcctagcaacgcttcggttggctggtatcccattgaggtaggcgccggagacgcgcggactaccctatcagtctacgtatcaaaaagccatgctggggagaatggaacagtgaccgttaaggtactcgatcccgagtcgggaaactacatcccgggggcctctgttcagctccttcgtgatggcgaaaccgttgtctctgccagaacgctctccgatggaaccgccgttattgaagcccccgaaggggaatacactctgatcgtcacgaaggatgcgtacaatacggtaaggcggacgatcagggtaaccgcgggttctgaggttgaagtgaaagtctcgctgaaaaagctcccctactactttaccgccgatgcacttagcccaaccaagagcggagttctgggtgatgtgttcgtttacgaggttgttttgaagaacctgggggaaaacgacgatacatacacgttcgatttgaaagctcctgagggatggggggcacttgtgaccgacgacccgagttcgagaaggggcatgggaagcgtgtacgtcgagagcggctcggatactcggctgtacgttgttttgatcccacccgacaccgccgaaatcggggactaccacgcggcgctcaaaatcacctccctgggaagcggcgaggagaaaatcttaaacttcacggcctccctctcgggcagctatggaatagcactatcccctggcaagtacagtctgaaaatagaagctggaaagagtgccgagctccatgttagggtctacaacactggaacgagtccactcaccaatgttaaactcaatgttgagctaccagaggactggaaaacaaaggcccaaatcacccctgagaggatgtcagagctagggagggacgaagtggccgagttcacagtaaagtttacagtccccgcaaacgttgattctggggactacgttgtcaagatttcagcagtcagtgaccaggacaagtcagaggagaagatcagagtcactgttacgaagggtggcggctcggaatacatcggtatagcggtaattcttggtgctctggtgctcctgggaatccttctacggaagtacggccgccgctaattgtggcggcttttggtttcatcttttttgagacataatccgaggcagatttccatcgagactattgctattttgataacacaaatacagaaaaatttttaaaccaataaattaacctttggtgagaataatctggaggtggtcagatgaagtacggagaagtcgggaagaactgggtctggatgctcggacttggactgatattcataacccttggagttgccgggctgatggttctgcccctgctcagcataaccagtgtaactctctttggagcgttcatggtcgtcggtggagttctccagatggttcagggtatcacaaaggctagggagtggaagagcagaaccttacacatcgtaatgggactcatctatgtcctcggtggaatcttcgcaatgataaaccccgtcctcgcgactgcaatatacacgcttatcctcggcctgtctctgatgttcataggctttctcaggattgccgttgccttccagaacaaggacgtctcccagtgggcactcatggtgctctctggagttctgactgtctttctgggcctgctgatagtcctccagtggccgtggtccagcctctgggcggttggcctgttcatatccatagaccttataatggccggtgccaactacatagcgatagccctcgctgccaaggtcgagcatgaggcggaggcaaaagctgcaggcgggtgatgtggaaagtgtttgccctgctttcctttattctcgtggttgtgctctctgtaataatcgtcaggataggcgcaatagccctcgagctgacgggcctatccagggatgtggcagcttttcaggcacagtctgcctattctggcacggggttcacaacgagtgaaagcgaatacgtggtctcccatcctgtcaggagaaagattatcaggcttctgatattccttgggagcgctggaataacctcggcaatagcgacgctcgtccttactttcgttggaaagagcagaggggaagccctgaattcccttgtaatactcgttgttagtcttgtcttcctatacgtcttcttcacctcaaagagggtcgagaggtggatgaggagggtcataaagaggttccttgaaaagaggtttccagagctcaaagtttacgactacaaccagcttcttggactctcgagggggtattcgatctcaaggatacaggttaagagaaacagctggctggcgaacaagacgctgagagagcttgaactggacaaagagggagttttagtgcttggaatatttaggaagacccccgagggcgagaagtacttgggggcaccgcgaggcgacactcaagttcttccaggagacattttgatctgctacggtcccgaagaggcactcttaaatctgtcaaagcgcgtcaggggtataaagggcgataaagagcacgaagaggccgttaaaaaagcagaacttaaaagaatggaagaggagatgctctccggtagttaggtgttcaggtgtgcgtcgaactctttgctctttttgtactcagcatagtccttgtcgagtctcttcgccacgtacggtccgttcttcctgtagccgaacttcctgtagtactctctgacaccgacgccgctgatgacgagcatcttcttgacctcgaactcctcgcgagcaatcctctcggcctctgctagaagctccctgccatacccgcggtgctgccactcgtacttcggctttccacctatgggcacgagcgggccgtatacgtgtagttccctcactatggcagacggacagcagtttatctccttcctgtgagccttctcgctcgggattctgaggcggataaagcctatcagtatgtcgttcttcacgtcttcgaaactcaggaatatctcccttcccccagcggcgtcgtagtcctcgcggaggagttttatgtgttcaacctcgggctggactccgaacttctgcatcatgtggccgacttccctaaagcggatctccctcggccgtattcccctctttatcagttcgttgaagacgagctggccgaggtttgagtgcttaacccccgcaacgatgagcttagccggtatgtctctctggattctcataaccctaacccacttcgggaagagcttgtaggcctcaacgaggagctcaacggcctcctccgtcgtgtagggcctgtacttgccagccttgtaccatgcgtaaagaggagcatctgcggtaacgagggttggatagatcttcagcatgtccgggcggaagcggggatcttcgaatatcttcctgaaggtgtacagatccctctcaaagttactccccggcaggccgggcattatgtggtagtttatcttcaagccggcatcgcgaagcaactgggtggcctttattatctcctcaacgccgtgacccctcttagtcctctcgtggatgaagttgaataccgtctgaactccgagctcgacccttgtcgttcccagtttgagcatcctgtctatctgcctctcgaaggcccagtcgggacgggtctctatagtgaggccgaccatcctgaccttggccttctcgttcttcctctgctcgtcttcgaggtagtagtagggcttcctgtgggtcagctcccaggccctcttgaactcggggtcttcctcgaaaacagacttgtcgcccttaactatgagcctcacgagcttctcctcaaggttctctatgtccttgaagtacggaaagtcgttcatggccttgaaggcgcacttaacgtaccattcctgatagtcgaggtcaacggccggaaaagttccgccctggattatgacttccaccttgtcaacgtcatggccgatgtcggtgagctgttttagcctgcgcatcatgatgatgtatggatggtaagcgctctggaccgccctcagtgctgaaggctcctttccggtgtagctctgcggcgaaccaactgagggcccgcccgggcagtagatgcacctgccgtgcgggcaggggaagggctttgtcatcatggccacaacggcaactccgctgatggttctcgtcggcttcctcttgaggagttccctaaatctgtcgcgctcctcctctggaatggccttcaggatgtctgagttgcctggaatctttgaaaggtgatacttccgcgacacgatgatcttgtagcggttgagctcgtccctatcctttatctcacccgctaacacggctctcgctatctcctcaactgccctcctgaatttctcaccgtctctcatctcgcccataccaacacctctcggcactacttgaggggcggttttaaaagggtttggagacagaattgaggaaaagtttatattcagttagtgaataattcagttggtgaatataatgcggtttatcgaccgcgagagggagcttgaggtcttgcgtaaagcgagggaaaggagcagaaaaaagctctacaccctagccatttacggtctgagaagggttggcaaaacgcggctcttgagagaattcttaggggagaaagacatttatttcttcgttaatcgggagaagggaagcacagggttgctcagggaatacgaaaacatcctccgggaaaagggcgtgataacgaagagggagagaatagaaagctgggacgatttttttgaggttctctttgagaggtttgaaggagtggtcgccttcgacgagttccaggacttcaggtttgtagagccctcggtttaccctacccttcagaggctcatcgatgagaacgaggagaggaaaaacctcctcttgatctttacaggttcaactatcgggatgatcgaaaagctgttcagggattcaaaggagcccctgtacgggagaataaagcgtgagattcaccttaagccgctggacatccgtgggagctacgaaatggcgagagaactcgatattgtaaagctggacgatttctttaaggttcactcggtgttcgggggctttccgcgctactgggtggccatcgaggatgaaggtctggaagggagaagcgcagaggaaatcctgagggagctgtttttcgaggaatacgcccctctcgccgaagaagtgcccaagatgctctcccttgagttcggaaagagatctggggtttactatgatatcttggaggccatagccaacggggccacctcgataagcggaatagccggctatctcaacagggacgaaacttctctgactagacagctcagggagctcgtttactatttcagacttgttgactacgacagggcagttcttgggaaaaggagcatcctccacataagccacccgctgatagctttctggttcaggttcgttcagccaaagctgagcatgtacgagttcgagagaaggaaagtgtgggaagaagtgaaaaaggggctgggcgattacatgggcaagaggtttgacttcgcctgcagggagctggttctccttgaggaactgcccttcaggccagcgaccatcggaagacactggggatattacagggaagacggagttaagaaggtgtacgaaatagacgttgtcgcccttgacgagaccggaaagcgcgcaatattcggagagtgcaaatggagaaaccgtgcccagaatgggaagaaactcgtggaagaactcagaaagaatgtagagctgactggctggaagggggaagcccactatctcctgattggtaagagtttcaagcacgtccctgagggggttaaggttatagatgaggacaggattagagaactcctggagggatcagaatgaaccgcgatgaactcgtctctttcctcgacgagtacctaaacatatctgcctacccagacaagtcgagcaacggccttcaggttgaggggaatgaagaagttgagagggtagcgttcaccgttgacactacactcagaaccatagaacgcgccgctaaagccggggctgacatgatggtagtccaccacggcatgatctggggcgggttagagtacgtaacgggggtgcactacaggcgtctgaaagctctcatagagaacggtctgaacctctacgttgcccatcttcccctcgatgcccacccagaggtggggaacaacgtggaactgctcagactccttggcctggagccgaaggggccctttggcgagtatagggggctgaccataggcttctggggcgagtttgaggagcctcagcccatagagaagatcgcgcagatagtcgcggagaagctcgacacgacggttagggcctacgagttcgggaagagggagataaagaccgttggagcaatcagcggggcgggggcgtttgcccttgaagaggcctggagaaagggaatcgacctgctcataacaggggagtttgggcacgcggactacctaacggccgttgacctgccgcagagcgttctcgttgccggccactacaaaacggagacccttggcgttaaggccctgatgccagtcctcgggaagaagttcgggctggatgtatttttcatcgacgagccgaccggcctttgatttttgattttcttcatcatggcgcgtaacaacctacacaaaagggttaataacggaatgggcgtaacctatttggagggaccactatgaacaaagctctcgtcatcatggcagtcatcacaatagcgctggtggtttatgcctttgaaaccgcccagcttccaccggccagtatagagtacacggaggtcttttacgtggataaccagagcgttacatttgttacccaggacggctttgggctgttcacaatgaaggttagcccgcacgtggacaacttcgagcttaagattgagttcccggagggcaccacttacctcgtccgctatggttccgagcagtttaagggagagacaacgttcaaggttaaggttcacaagggagacgctcctcaggaagtttacgttcattttcagcttccggaggatctcaccaagaaagtgatctacgaaggggcaactccagaaatcaaaataactggcgataaactcccattctggcacagtgaagatgtcatctacattaagtaccgcaaggaagagaagagctgaaggacttctttctcctttattaatttgagttttatcccaatctcttctgcgtacccctcaatccagccgggcttttggggcattgaagttaccacccacagctctgggaaacccgccctctgtgccttaacgacgtcgtagaggagtctttggggaaaccacttgaaggaagcttcaagctcgatggcgagaattttctcatctccgttgagaattgcaacgtctattctcgtgccgtctggagttctgtattcgggaacggcctgaagaccaagcttttctgaaagctctacaatctggcgggtcagagttttgaccttaatttttggcacccctccttttttctacccttccttcaaaatctttgcgatagctcgaacaaaaattttgggagaaagaggctccccgagcttttagaaaggcacgggctttcaggaaaggccctgatggtcacggggaggagcagcactaagaaaactggcctcctctacagggttcaggagcttctcaagaaggcgggcgttgagagcatcgtcttcgacagagtcattccgaatccgatttcaacccacgtggatgaagccgctgagctcgcgaggagggagaatgtggacttcgtcgtggggctcggcggcggaagcgcgatagacagcgccaaggcaatagccatgaccgccaagagcgggggcaagtactgggactacgttccggccgtcggcggaggaaaaaagccgagcggggcgctgccgatagtggcgatccccacaacccacgggactggcacagaggcagacccctacgcggtcataaccaaccctgaaacgaaggagaagcaggggatagggtacgatgtcctctttccgaagttttcaatagtcgaccctgaggtcatggtaaccctgccacagaaccagaccgtctacacatcgatggacgctttctaccactccatcgaagctttcctcaacgtcagggcccagccatactccgacgtcctggccctcgactcgatgagacgagttgttacctacctcccgatagcctacgaaaacctccaagacctggaagcaagaacccagctcgcctgggcgagcaccgaggcggggataaccgagaccctaacgggagttatagcgaaccacgctctcgaacacgggctcagcgggttctaccccgaagtgccccacgggttgggactgtgcatcctggggccatacctgttcgagtacatcctcgatcacgcctacgagcgccttgcaatcgttggcagggaggttttcggggtctacgagagcaacgacagaaaggctgcagagctcgcggtcaagaagctccgcgacttccagagtctctttggagtcaacaagaagctcagggagctcggcgtgaaggaggaggacattccgaagatggcggaaacggcctacaggatgatgaagggtgttatagacgtcacgccggggaatctgagcgttgaggatcttgaggagatttacaggagggcatactgagttcagaatttgggggtacagaccttcccattttgacttttgaaaaagcaaagaaacgttggggaattcatgcccctgtccgggtgttctcaggctttatggcgtacgttgcaacaacggccacgatggcagtcactatgaacgtcatcagcctcgctgagacctttgcatcgagacccgagctgacccagaataccgtgaagagcagtcctgcgattatcgtcggtgggaccgcctttccgtggaacttcttccagaagagagtcaggatcactatgaccgagaacgtgtccccgattcctgcccaggtgtagccgactattgtgtagattaggtccgacggaacaatgaaggccattatgagggctattattccgagtgcgatggttgtgattctggagatcgtcaggcccctgcgtggatccatgtctttggcgagcacaaatggcctgaggaaattctcggagagctccgttgacgcgaggatgaggagagagtccgcagtggagagcatggccgctacagcgcctgttatgaagaccgccgccaaggcaggcgggaagagcttgagcattacctccggcataacctgctcctgatccgcgagtccgctcggcccaaagatcgctatgccgatccagccgattagaagggcacctatgtaggctattatcgtccatgcaacgccgacgtttctggccagcttggcgttttcctcatcctttattgccatgaatcttatgctgagctgtggcattccgccgaggtatccaaagaaccaggagaactcggctatcacgaatatgattgccgcactcccggcgagtcccccgagtatcgttgagtattctggtccggaagctttgagcgcctcagtaaccgagtgagcaaagacatcatggtgcgtggagatgtagtggattccaactattggggcgatgatgagcgtgactatcatgacgattgcctggattgtgtccgtgtacgcaacgctcttcaggcctcccgctaccgtgtacgggagtattatcatcgctgtgatgatcattccaatcttggggtcaatgtcgaagagggcatttagggtctttccgccgcctatgaactgtgcaccgacgtagaagaaaaagaagaacgctatcgtcagactgccgagaatccttatccacttttcagcgtcgggatgtctcttcgctatgtagtccacgaaagtcgatgcgtcgtatttttcggcctcccttctcagtctgggagcgaagattacccaagcgacgacgattccgaggacacagcctatagctggccagattgccgccaggcccgccgcgaacgcaaaccctggtagtccaagaagagcccatgcagattctccagtggcgcgctctgacagtgcggcgacccatccgggcaactgtcggccggctatggcgaagtctttactgctcttggtcttcctgccctggtagataccgacgcttatcaaaaacaaaagatacccaaccagaacaatcaacatttgagtctgggcttccattgtgcaccctcccatttcaacgtaccaatatgcactctattgtactttattgtttttataatgctttttgcaacttgtggtgttaaactatacgttaaggtatgacaattcactcagttgtattcatgaatcattaaatttggaatgtaaatcacacaggcatacagaaactttgggtaggctgtagggggttgacttcccgcccttaaggacaagctctcaaaagaaaaaggcaagaatggagaaattttggggcatagaaaaataaaagtcatccaagcatcttcttgacctcttcaatcgcttcctcggccttgagcgggttctttatcctgccctgagcgagctccttccttccgcctccaccaccgccggcgacgctcgttatcaccttcgccagctctccggccttgaggtcgaggccgtctccgacagcaaccacgaagtgaccttccctgcttatcagcacgacgacgcggttctccttcctgagcctgttggcagcctccctgaggtcgtctattgttccttcaactacagctccgatgaactctacgttacccactttctcgaccttctcctggagttcgtagacgaggagctttgcaagctctttcctgagcttctcgacttccttcctggcctccttccactcgttaaagaacctctcggcagtttctggcaccttctcgggcgggacgcggaatatctctgccgtcctcttgaggagcctctcggtttcctgcatccagttgatagcggcttctccagccgcgaatatgatgcgctccacaccgtcctgtatcctctcggttctgagtatcttgatcggacctattaggccggtgttcggcaggtgggttccaccacaggcctggacgtcccagtcctctatcttgagaaccctgatgacccttcccgggacgacaccgccctggtagagtctgaaaccgtacttcatctccgcctcggtcctcgggagccactcccaggtgaccttcctgttctccatgacgaccctgttggcgagcctctcaatctctctcagctcctcttcggtgatgcgcttgtagtgggagatatcgagcctggcccaatcggtgtggagctgtgagccagcctgccagacgtgctttcctaatacgcgaacgagcgctcccataaggacgtgggttccagtgtggtggcgcatatgctgtattctcctgtcccagtcgagcctcccgtggacggtgacaccttccttgaagagctccggcttctcaaccttatggagaatgacctttccgaccttctggacgttcgtgaccttaactttctcaccgttcacttccaaaacgcctgtgtcgtagggctgaccgccgccctccgggtagaaggcagtctggtcgaggacaacccagtcggctatgaccttcaggactctcgcgtcgaattccttcatgaacgggtcttcgtagtagagcgtcctcgtgtctggtaagtccttgaccagctcgaagtctacgacatattccgccgcctctttcttctcggcctgcttttcggcttccttcgccaccagggtgtagaaattgtccgggatgttaacctttatgccctccttctccgcgacctccgcaactatctccggcgttaatccgtggctctcgtagaacagtatgagcttctccagcgggagctcgttgatgcccttcttcttgagcttggctatctccctcttcacgaggtcgcttccgcgcctgagagtctcggcgtagcgcttctcctcgacgttgattatatcgaggattacatcctccatctccttgaactcggggaaagtcggagagagctccttgatgtgcatggcgactatctcagcgagcggaatctcaaggccgagctcgcggaggtgccttatgctcttccttatcagcaggcgcgccaggtaacccgctttcacgttggacgggataactccgtcggcgagcataaaggttagggcttttgtgtggtcggctatcgcatagatcagctcgtagggtctaacggccttctcaagctcctcgacgcttatgccgacgcgcttggcaacctgctctctcagatagcgcaggtcgcccatgtcctcgatgtcgaacatcccagccaacctggagttctccatcaggatgcgctcgtctatcttctcaactccagccatcttcttgagcggctcaatgacgtagccgagaaccgcgtcgtaggccgttggggttccgtggctcatccagacgagcctctcaaggccatagcctgtgtcaactacgcgcgtctccatcgggacgtagtagtctccctttatctcaacgacctggctcgggtcagcatcggccggggccttcttgtactgcatgaagacgagcgtagccacctcaaggccgcggtagagaacctcgaatgccggcccggcgtttccgccacccgcccaggggttctccttgaaagttatgtcctctggcttcatcttcaactccttggtgaagaattcgaaggctagctcgacagtctcgtccatccagtatatcggcttgccggggtagttgaaggcgtggtgggccatcatctcgaatatcgtgaagtgccttccggttattccgacgttgtcaatgtcagtaaagcgaatcgagggctggcttattgtgagcgggtttgcggggggatcagcttcgccgcttatgacccagggctggaagtccatgattgaagccccgacgaggagcacatcgtccctccagcgcggaaggacggggtagcgcttgaccctgccgtggggatagctctcgtgcttttcgaagaagctcaggaacttctcgcgcatctcgtcgagtgtgtacttcttcgggattccgggctttcctatgaactggtactcgtcacacggcgggtctccgcaggtctccctgtccgggtcgagcgtccagaagtacttaccgcacttggggcacttcttccttatccatccctcttccttgaacattcgagttgtcatgtccatgctcataagcatcacccgttcatttagctgaacctaaaaaagagggggagttaattaaggtttccgttccggctggctgaaacttgaggtgcataggaagaaagaacaggcgaggtatagaaggataaaaacagaaaacaatgccacattggcctgcttcttgattatccagtgctggttgtgcagaggcctgttctcgggtcgcagaacccgggtgattttccattcgtcactgtaaccaggaacattggcactttcaccttattgtagtcctcggcaacgtccagtttttgatagtaccttaaggcatagcagtcctcccgcggagtcgcctgcaggcggtaaatcagcattgacctttggtttgctgttttgtggaatccgatggttagtgatatgctgtttaggattctgcggacttgcgggtatttcttcagtactccctctttttccagggccttaaccgcggccggccctatcggtattgaaaagctagactcactcgaaaggtgccagctttcgttgagccactcgtcaattatgagccccctaccgtccccttgatttatcaatatcctctctgaatctgcagagccaggaatctctagatagtgcggttctctggttatgcttggagtgtagaacgttgatcccggcttggactcaacatacttttgactgccgtccggggtttcgtagattttgtagctgcccgtggtgagtatttcgagtgggtaagtgaggattaatggcatttcagtatatttaccagtataacggtcataggcgagaacaccatatacggtaaccacatacttgacgtccagattcacataacgagaccacatagagctttgaggattgacttcgcggggggtggtgtactccagcttcaggccctttcctttgaagctctccccgaattttgtcgtggtgagtgttactggtccgacgtcgatgccagcggtccagtgcgagtacgtggcttcgcttaggaatagcctcatatcgaagtctatgtcttttaggacgtggttgtctattctgagtccgaggaaggatattttttctgttacagtttttgaggtgatcactctaatccagtttctttcggggttttttgggatgcagtagcggtatccttcggggatgtaatccttgggacaggagtgggctgatgcagtggtaatttttgagatctccgggatttctagttctttgagttttactttgcttcctttgaggcttgctattcccaatcctttatcgttcacgaatatcactatcggggttggcatggcttttagcgtgttttctctgttagcgtactcttttagccacgcgtttctgggaaccttgacaaaagttgggaagattccgatttttccggtttttaggagttttattgtcccgtctggcattgggtagaagatggcgtagtggcccgagccttcaaacttgtaaacatcataaccaaagattcggaggggttcctcctcgctaagtctccaggttatcgcaactactagtgagacgatgcttacgccaatgatcgttatcaagagcatcactagaaccctcttccgccccaacacttactaaccaccttagttataagataagcacattttcataaaaaatttactgtctgaggatatggcttggttatattgtccgatgttgatgtttatgaaaaccgatcttggtaccacaaaccgtttgactctgctactggagaatcatcgaagctgatatagtctcaagagcttttgagcaaaacgtatcatcggttcattctgatatatccacgtcctcgaactcgtcttcgtcaacgatgacaaaggggactccaaatttcttgagaagttcaatgaggtacttttcccttttcttcatcatgtcaagtttgtgcctgaggctcgtgttctctatcgcgaggctgttggcttcctctactttaaggcggagctgcatcttcagctcgtttatctgctcttctaactctactattgagcgttcaagcctctctatctcctcaacgtactccctgcagagctttctttttatcatgccggtcagccccgcgaaacctcttcacctctcagggggctccagactcatcatcccgtaaaccgttaatggcttaaacctttccatgaataaaaacctggtggtcggaatgaagagcagacttaaagtcctctacctgaaatggcgctcaaggtgtccattcgtgagaaagttagaagcctggaggatgaaaaggagggcaaaggagtttaaggtgaagctctgactacaaaaatacttttaagctagttcttccgcagtgacccattatgaggggaataatttcagttttgatggtgctggttttggtagcggctggatgcttgggcacccctagtcctggaactcattctaactcctctaactattcacccgcatcaaggaccacggtagcaaccgtttcggaagaaaagtgtgtccgcaacgtctcaagcgatcttagtaaagagctctccgacctcaaaactaaggtagagcttttgaacgcgagcctgagggagtgccgcagcaacgcctcccttttgaagtattcgctcaacgttacccagagcaggttggccgtcctgacttctgagtataatgggtgtctggctcatctctcaacctgcaactcgaccagtttgaaacttgagaactgccagaaagagcttgaaagcgctcaagaggagctcaaggagtgtagggtaacctctgaccagctttcttcggagctggaagagtgccgactgaagctcaatgaaacctatgacgtcctcaacaggacttacaccgatggaagtgttgaactcctcatagagcgtgattactacgaggaggcgattgaggcaattgatggcgcaacgcaggaaatatacgtaatgatgttctcgatgctctacgacccagacgactggtcggacgaggccaacgatttgataaacgcactgatccgcgccagacgccgcggcgttgaggtccacattcttctggagaacagcctagataccaacagggaagcgtataactaccttaagtccaatggaatcgacgtttcatacgactccccatcaacgaccctccacgccaagattgtcgttgtcgacggcaggatagtcttccttggaagccacaactggagtgaatccgccctccactggaaccacgaggttagcgttaagataatctccaaacagctcgcggaggaggtgatcaactacttctggagtgttaggggtccctgattttgttttttacaaggacaatccattaacagtaaaacgggaaaagaagctaggaaatgttaaactcccaagatgttgaggatttcctcaacggctctttccttctctatgctcttctgctcgcccgatttcatatccctgagggtcacttttccagcttcgaggtctttcttgccgactaaaaccacgtaggggactccgagctttccggcgtagtcgagggcttttctgagctttctcccagtaagctcaatatccgccctcacggtggcttccctgaggccctgggttatctctatggcagtcttcttcacctctctatcatctccgattggaataacgtaaacgtccggcctgagcttgatctcagggaggaggcctttccattcaagtatcgggatgagtctctcgatgccaatggcaaaaccggttgcgggggttggcttcccgccaaaaacctcgatgaggttgtcgtagcggccgccgccaccgatggagcctattccgaggtcgttgggggctatcgcctcgaagacgacgctggtgtagtagtcgaaaccgcgggctatgccgaggtctatccttacccacttggagacaccgtaggcatcgagaaggtcaacgagctcgtagagcctctttatttcggctttcgcctcctcgctcgtgaagagctcttcagcctttggaaggacttcatcggggagacctttaatctcgatcagcgagaggactttctcaacgccatcatcgttcagcccgaactccctgagcgcccccacgaactcttccctgctcatcttgtccttcttgtcgatgagcctcataaggccgatatcgtcctcaacgcccagcatcttggcgaactcgtcgaggaggattctgtccccgatgttcactgtgaagtcctcaaggccgaccgcgaggtagctctgggtgaagagggctatgacctccgcatcggcctccactctgtcacttcctatcagctccactcccgcctgccagaactcgcgataacggccgctctgcggttcctcatagcggaacatattcgctatgtagtaccactttatcggcttcggcgcgttctggaacctgttcacgtagagccgggcgacgcttgatgtcatgtccggccttagagagatgtcccttccgcccttgtcttggaaggcgtagagctgtttgacgacttcctctccactcctcagcttgaacagctcggtatattcaaacgttggtgttagaacttcctggaagttaaagccctcgaaaacttcccttattctctcaaacacccatctcctcttcgccatttcctcggggagtaagtctctcgtccccttgactttatcaagtctcgccattttcaacacctggcagaaggagggttttggaggttaaaagggttgctgaatgaaaatcagaaactacgctccggtcatcagaaggtatatccctatgaccccttccaccatcatctgggcgccgattgccatgatgaagagaccgattattctgatggttatgctgaggaagctcttgttcacggatttcatcatgtagagggctatgaacattgagatcgcgactattagaattgctatggccgttgcggtgagggagacgaagtagccgtactcagccgtcattgttattacggcggttatcgcggccgggccagctatcaggggcattgccaccggaacggccgccaaagccagtatgtccttttccctcttgagtgtgaacatgccaccgccctcgagggcctcaaggcctatcttgaagaggacgaaaccgcccgcaaccttgagggcgtttatatcaatgtggaatatctcctggaggattatctggccggcgacggcgaagctggccaggagaatgaacccgatgaggtttgccctgattatgagggcttttatgtcctctatgtggaagtcttcgcggaggaacgtaactaggagtatcttgtcgctcgggtctatcatgatgagcatgagtaaagctgaactcagtatcgtccccagttcgctcatatcgtcgcgttggaaaagggatttaaaaagctatgccaatttcccttgctatgatgacaccggcactggctgatcagtgatgagcactcggttgtctgagctaccttgagtagagccacttgaggagtggaggcgttattatcgtcgtcgtgaagatcatcaggattgccacagtaagggcatcgccgcttattacgccgctcgacatcgcaacggccagcatagccagctcgacacccatcctcggtatcattccgacgcctatcctcagggaagccgcccagtcgaagccgccaagtctcgccccaagtccacagccgattaccttgctgactattgccgcagtggtgtagagaaccgcaaagagacccgcgtggaggatgtaggacaactctatcctcatgcccacctcaacgaagaagagcgggatgaagagggaataaccgaggacgttcatatgctccatgatggcctttttcttcggaatctggccgagggcaaggccggtgaggtaagcaccgaggatcgaggcgaggttcaggtgctcggcgaggtacgcaaagactatcaggaagacgagggcgaaggcagtctcgctctcggggaggtcgatctttgagacgtagcggaagactctatctgcaatctccgggccgaagtagaggaagaagaacaggagaagggaaactgagatgagcacctctgccaagctagaataattaaccgaacctcccttaatcattgatatcgcgacggtgagcacgaggattccaagaacatcgtcaacgacggcagcagcgagaatcgtcgtcccctcgcgcgtgttcagcttcctcagctccattaggactttgacggttatgctcacactcgtaggcgtcatcaatgcaccgtagagaaccgcctcatggaacggcacaaagaagtatgcaacgccgaatccaaagagaaatgcaactatgacacctactccagcaacgaagacgctctgctttccgacgcgcttgaactcctcgagctcgctctcgaggccggccatgaacaggaggagcaggacaccgaggttggagaattgggcgatgaccgggttagtttcgaagaagatgccgattaacagacccccgaatatctggcccagaacgacgggctggccgatcctctcgaagaggtagcccatcacctttgccgttgcgagcattatggctatgaggagcagtatctccatgttaccgcctctactcccttgagaacgcccacttcaggaggaacggggttacaatcgtcgttatcaccaccattgtgaccggaatcgcgaaaacacccctgtcaaagacgccttctctaagggcgacgttggccatgatgagggcaacttccatcctcggaaccatgccgacaccgacttggatcgcttcaatgggtttgaacttggcaaagagtgcgccgagtccacagccaaccactttgctaactacggcgagcagggcatagacgagggcgaaggttccagccgtggttagaatcctgacgtcgctctctattccgatgctcacaaggaagacaggaatgaagagggagtaccctatcgtcaccgtcttgtcggccactttcctggcttcctcggtcgttgccactagtattccagctaagtaagcaccggttattccggctatctggaactgttcggcaaggtaggcgaagattagcatgattgctattgccatggccgttaccgtctcgggcagggttatcttttccgacgccttcagggcctctttaaccgcgggagtccccacgagaaggccaatgaggaagaatagtgctacctctccaatgattatgaggaggtccttggcgtagacgcttccacgcgtgtttatccccacgaggatcgtcagggcgatgatgccgaggacgtcatcaactacggcggcagctaaaatcgttgtcccgacccttgtccttagcttcttcatctccatcagaatgctggtagtcaggccgacgctcgtcgccgtgagaatacccccgaggaagagggcctggacgtgcgaatacccccaggcgagggcgccaaaatagccgaggagaaaggggacgagaacgcccatcgccgcaactataaaggcaggaatcccgacgtgcttgaactcctcgatgtccgtttcaagaccggccaaaaagaggagcataacgacaccgagttccccaatgagcctgacggcctcgtcgtaggagactattccgagtatagaaggccctatgagaatccccccaatgagctggccgagagcggctggaaagccgaggcgaacagtgaggtatccgaacagctttgcaactaccagtatcagcgccagttccaggaacacgtccatgattgtcatcccctgcagtttattcaaccctgcagtggttgccaaacctcagtacgaaactatgcggatgagccggatgatgtccttaacctcaaggacgccgtggacgcggttttcatcgtcaacgacgggaaggtggtgttttccggtttcgagcatgatttgaatggcccttcccaggttttcgtcaacgtgaatcgttatcggcttcttaaccattatgtcctcaacgcgggaagctctgttgatggagtacctcttcagcaggtctaagcccactatggagtaccttttcggcggtgcaaagaagttgagcagatccttcatggttacgaagcccagaagcttaccttccccgtcgatgacaaccgcggagctctcctctcccctcaactcctgaacgagcttggataatgagtcacttgggtgaagcgtcaggaactccgtatccatcacgaggctcaccgggacctttgagatgtagcggatgttgtggctcagctcctcctttctctggagcatcagaaggcgcctcttgctgtggattatgtggactttcttggccttggttgcttttgtattcgagacacctgaaacgtcctccattgtactcactggtacaagtctattgtctgaatgcgtttaaatgtttcgggcgttttttgacataaaaatgtttaaatatctcgaaatcttttgaattttttgactaattttagccaaaaactttttaaggcaatggccatagacatcggtaagggaaatatggtttctggaaacggaagcggaaaggcgtacgatgttgttataatcggtgctggccccgctggcctttttgcagcctacgagcttgccgaaaagagcgattttaaggttctcgtcatcgacgagggtggcgacgttgaccagaggaagtgcccaatgtacgagctcggctactgtgtcggctgccagccctgccacataatgagcggcgtcggtggcgcgggcgggctgagcgatggcacgataaacctccgcccggacatcggcggcgaccttagggagctgaccaacgacgagaactacgcctggcagctcgtctgggaggtcgaccagattctcctgagacataaggccccaaggaacctcttcaagggcgatccagagcaggtcaagtactgggaacagagggctgcccaggctggggtgaagttcatcccgataatccagaggcacataggctccgacaggacgcccgaggtaataggcgacattaagcgatacctggagagcaagggtgtcaaattccttctctggacgaaggcccttgagttcaacaagggttgggtgaaggtaaagcgcggaaaggacgtctttgagattagaactagatacatcatagtcgccccggggaggggaggcgccgactggttccacgacgttgcccagaagattgggctgaaggcaaggcacgggccgattgacgttggagttcgcgtcgaggttccggccatagttatggagccaataacgagcataaaccacgaccccaagttccacatctacacagacacctacgacgacttcgtgaggaccttctgcacaaacccgaacggcttcgtggttgaggagaagtacgattcctacgtcggcgtgaacggccactccatgcacgaaaagaagagcaacaacaccaacttcgccttcctgacgaggatagaactgaccgagccggtcgaggacacgacagcctacggaaagagcatcgcccagcttgctacaactataggcggcggaaaacccctaatccagcgccttggagacctgaggaggggcaggaggagcacctgggccaggatacggaggagcgacgttgagccgaccctcaagcacgttactccgggagatatagcgatggccctgccacaccgcgtcgtcacaaacatcatagagggccttgagaagcttgacagagtccttccgggcgttgccagcgaccacaccctactttacgccccggagattaagtactacgcgatgagagcagaggtgaatgagaaccttgagacgagcatcgagaacatctttgccgctggagacggggccgggctgagcagggacatagtgaacgctgccgcgactggccttctcgccgcgagggggatactcaagaaggaaggtctttacactgagaaggacttcaggaagccgggcaactggaagagtgttgttgagtccctcaatggataggttttttaaactctccttctttttctctgctggtgtagaaaatgccgatgaaatgtaagttctgtgagagaccagccttcatcaagctccactatccaaaaatgtacctctgcgaggagcacttcaccgagtactttgagaggaaagtaaagagaacgatagagcgctacaagatgctcaaacccgacgaaaaagtcctggtcgtcgtcagtggtggtaaggactcggcagttacagcccacgtcctcaagaagctcggctacaatatcgagtgcctccacataaacctcggcatcggcgagtactcggagaagggtgagagatacgctagggagcagtgcgagaagataggtgctccccttcacattgtcaggctcaaagagcttctcggctatggtatcggcgaggtgagaacgaggaggccgacgtgctcctactgcggcttaaccaagcgctatatcttcaacaagttcgcctacgacaacggcttcgacgcagttgccaccggtcacaacctcgacgatgaggcgagcttcatcttcaacaacataatgaactggaacacgcagtacctggcgaagcagggcccggtaaccccctcccagttcaacggaaagcttgtgaagaaagtaaagcccctctacgaggtgaccgaaagggaggttgttgcctacgctttggccaacggcatagagtacgagatagacgagtgtccctatgcgaggggagccacgaccctcgagtggaaggcaatcctcaacgagatggaggagaagaggcccggaacgaagataaacttcgtcaagggctacctgaggaagaagcacctcttcgaggccgagctgaaagagaccgagcttagggagtgcaaggtctgcggtatgccgtcgagcggagaggtctgttcgttctgccgcttctggaggctggaaaagccgattgacttcagggtggaaaaatgagggtcgtggtaaagtttcctggggaacgaaggcgcgtgctggcccttctaagattctacatggtagcgctgcttgttagtgcggttatttgttcggcctttaccgcgttctgggttatggaggccagtctcccccatgccatcgtttaccttgtagcgtcgatgtttttctttgcctcgttcctgatgtaccgtgaggtttacctctctctaaggaaaaccaggtttgtccaatatttccgtgcccttgaggaatatttcagccctccctttggggcatacgcctcagtccacgtccttgcttccgtaatcttttacactgccgacgtgctcaggggtgggtatgcgctcgttgccaccctgctgctgctaaagggtatagttgagtacgtcctgggactctttagggatgacttgaaagtggcgtccgttctttatgcctcggtaataggaggcgactttgataggctctccctcaaagaccccttcaagtgaacctctgcgtcttctcccatgtgagttttcctatcaggagctttgtgaggcccctcatggtgtacacaacccccgcaaggacgaaaaccatgaagtacagggatacgccgcgacgaagctccagggcacgtggtagttgtgtctcttcatctccacccagttggaatacgctaccgatgcccagaacaccaaaaacgcggttatcgagacggcaaggaacagcccgggtttggccagcatgagcggtacgttgcctgacaggatgatgtagccgttcaagacaaccgagaggaaccagaacactggaacgaggtagcttattagataaaagtgctctataaacccctccgtgattccggagcagctcctcaggacgttccagtagtaatcgagcattacctggaagtggccctgtgcccagcgcgacctctgctttatgtagtccttcaaggtctctacggcctcctcccagccgattaccccatggtagtaccagaagcggtagcccgaaatcatggccctggcccacaggtctgtgtcctcagtgacggaatcctccctgaacatgccgagcctgagaaggtgtgaaaacctcaggagggcaactgtcccaccgtatttcccgttttcgtttagcttcatgtccccctctatggcgacgttgaagcccaccagcctttcaagggttatgaattttgttacgaagttcctgtcccagttcctaggcctcacgttcccttgaacgcccaggacgtactcgggggcattttccattatcccgacgagggtgcggagggcgttggaaggtaagaggtagtctgcatcgagaatgaaaacgtaatcggggtgatcccttgactgttctattagttcaagggtgtaattaagggcccttggcttgctccttcccctttcggggggaacgtcaattacaacgaccctttttggattttcagaggctattctctccatgatctctttcgttgagtcagtggagttgtcgtttatcaggaacagcttgaagttgtggtagtcctggttgagtacggttctggccgttatctctatgactttctcttcattgtgggcaggaatcaggacgtaaacgagcggttcaaagaaggggtttcccttatgggcttcaactttaaagggatagtcacgtcttgaggcagcgatcagtaaggagtagaatatcgttccagaaaacacaattaggaacaggaatatcaggaccgcctctagtgcataggccggcggaactatgagtgtcagtccgatggttatcagaatgtacagatagagggctgattgaaacttcagggccggtttcatggtaagggttttatttgaggtgcttaaaatacctactggttgaaatggcggtggtacaaataagaaacgttgcctaccttgtgaagttcctggacaagtttctgagggagaacagggtgagtgcttggcagggcagggacaggtacctagccgagtactcagttgacggcgggaacgtacgtctcgtttgtcattatcccgaaaacacggtaacggtgtggtttgaacctgatttattgaaattcgttctcagtgacctcatcctccacgaagagcaccttcgaaaggcggtgataataggtgtcgccaacgttccagttaaaggcgtgccgagcggcttcatagatgcttcttgggggagggttgaaatcctgaaggttgttaggggactttggcttggcaccgatgggcactcaacgttcttcgcttcgaacctggaggggcttgttgagctcgtcgaactcctggagggatcgtcttgaggagagcctacttcatccttctggcggtaattgcggtgctcttatacctcccgctgttcactgctccgtctcccccggccctcaatacggacggcaacggtcatctattcaagatacacaagctcatgagcgatgggtgggagccgtggattgaagactggtactcaggctttccgttcctcagattttatcctcccctgtcgtacctcataggggctttccttggcatcttgctcgggagcgatataaggggatacgccgcaaccctgatgctgacctcgttcgtgggtgctgtcgcgctacacttctacctgaggaggaccggacgcgagccgtacgttgctcccgttgtttttctgctctttccctggcaccttggagttgcatatatcgaggccaactttccgagggccaactcaataaacctgtttcccctctttcttctcgcacttctctgggcggttgacattcgtgaaaggtacctggcggcatccgccgtggcgatctcggttatctctttgatccatcactcggccatggttccgctcgttatcactggtctcgtactgctctttgaaaacttcaggaaaacccgcgttctctcaaactttttcaaggtcggcggaatcgtcgtggcacttacatctttttggtacgtcccattcctcttagagagagaatggacaaacttttggaagatataccagtattcttggctcttcaagagttacagcgtgtcgccttcgcgctttcttgagccggtggggatagcatcaaccgccgtcttttcagcgttccttatcgttgcttatttcagggggactctccagcgccgcacccttggcctcatcgcactttatatctacctcgcgctcgggtactactcgccgaccccatggattcattcccttccggttctctcgatgataccccagtatagatggatggacatggtcaacctgctggttcccctcatcgttgccgacgccttaacgggagtagaacttaagtggaggctcgttgctggagccttatctgtgggcattttgatcttcggtgcactgccctatgccgagcccatcccgccttatcccggggacttgatggaggtcgccgagttcctccgcgaacagccaggggaagattggaggtttgtagtgcatccgggtgtttcacaccatagctacctgcccgttcttacgggtaaatctactctaaacggatggtaccacgagggggatcccgcagaagagggacaccttaggatgtggtatgctctgtccactggtaatgatgcatccttatacctcaagatctacgctgcgaagtttttgatggcgtccatcaacgtcactgtgaaagactattctcggattgagaggataggtaactattggatctacacctccaacgtcagtttcgttgaacccgttggggcagtgctccttggaaacttctatgacctcccggtggactacgcctactttgaggatccgtctaaccttgctgcgattccaccaggttccgttggcgttgtttacgctggaaacccgtcaaaggaagaggagggtcttctctggaacttcgtgaggaacggcggtacggtcgtatgggttcccgaggggagcggatgcctctttggtgtgtgcggcgtaatggagcgcattgataattctcgcctaagctctgatgtcttcaacgtctcgatctttgcccccttcgagtacgagggaatgccctggtacggtcccgtctttgagaacgtgacgccgctcctctcggttggggataaggctataatcggtttggtgaagcttggaaacggcaccctctacctcgttgggggcaacctcctgtaccacagcctctactggaactcaaagaaggaggcggagttgatcttcggcctcgcagggatcgatggaagcctgaactacacgctcttttccagatcggacggtgagtactcgcttggactctcaccgtcgagaccgatgcttgtgcggatatccgagagctactacccccactggaaaattagggtgaacggaaagcttgtggaaccaattagggacgaccgcacggggcttacgctgattactgtctcggggaaatccacggtggacgccgagttccgcgacccgtttatgcgccttagggcgtattctgcaatcgggtgggtggttgtcctcgcgtacctcttggtcgagttcttctggagacgcaggttaaaggtggtgataaacgaatcaagctgaccttctccccgccgtgaacggcgaggctttcaaaagaagtaaagagagaagtgtttttaagacccccattcaccgaccgagtgggggttagtggtgctgaagtgttcaatctgcattcatgatgagaggactgcgacgatagacataatcaacggaaatccgatatgtagggagtgccaggtttatctaaagcatccctttgacagggagaaaatcagaagagaacttgatgagctgatggagaaagttgatagggccatcgtggcttactctggagggaaggacagcgtcgttgccctttatctggcgaaggaagtctacaaagtcccggagcttgaggctgtaatggtagaccacgggttaatggcagaggaagccatcgagaacgcccggaggatggccgaggcccttggagtcctcttcaaaatcctccgctacgactactcggacatcttcagggaggccctgctgaaggcccaaagtccctgcagggcctgttcgaggaggacgatggagagactccgaaagtacgccctgaaaaacggctaccgctacatcatcaccggccatgagcttcccttcggccacaagccctacaggctcatgagcggtggtgttatccagataaggctactctccctgatgacggagcgcgagaggtttgaaatcctggaaaagctcccctttgagttccctgagctcccaggctacacgaccaactgcctcgttcttggcccggctcttgagcgctactacaaggttcacgggcactcctttgagcacaggaggatagcggccctcgtgaggtacggcttaatggacagggagagggctgagaagcttaccgctccccccgaagttcccgagaggcagtgggaaatcgtcctgaaaaagctgaaccttgagggaaaaattgaacgataagctcatatcaccgccggaattcccggcactctcgggaatggctgaacttcggcgatgtgcttcgccccgactatgtacctgaccagtctctcgatgccaatcccggcccccgcactcggcttcagcatcccggccttagcaacttcgaggtagggcctgaaggcctcttcgctcagccccgcttccctaatcttcctctgtatcttctcgtactcccactccctctcgccgccgctggagacctcgccgtagccttccgggagatagagatcgtagttcctccagactccatcgacttccctgtcgtagaactcccttggtatgtctgttatccagaagggttcgcccatctctctgcttgctttctcttcactgccaaactcctcaataacttcttcaagggtaaagcgtttgaagggccgcttcactctcggcagttctctctcaaaagtttcccacactggccccctgagctccctgaacaggcccacgattagttcttctaccagcctcataacgtcgtccatgctggcgtgggatatttcaaagtcgagctgggtgaactcgtaggcgtgtcttccgtcgtcgctttctctctcctcaagcctgatgtttggcgaaaggacgaagatcttttccagacccattgctacagcaaactgcttatggaggatcatgctgtgcatgagcttcagcttactgccatacgcttcaatctcaggcgctctcatcttgctcgcggccgggtcgggccagagcgggtctgttatcgagctgagcatgactggtaatagccacctaaaccctctggaagtcagctcgctggtgaggtatcttatggcctcggtctgcaccctaacaacgggttctattctcctgcttaccatctggactgcgttcatgagcatcaccggtggataattgagcgcttcttctttatgtcttttatccaaaaatagctgtcatttgggccaattttaacagattatttcctaaatttttgacataaagacaagaatgtagtgccaatcaggatagcagtgttcaatcttttccgggttttgagactcgatatcgttataaccactgagaaacaactaaaatcggtggtatcatgggagtctacatctttacccccgaagacctcgtcaggtacggttccgcaaggcccgaacagctggaagttctcagggaggcagttctcgaaaaaaaggacatcctcatagttggaacgagcaggagcggaaagacaaagctcgttgaggctctccttcactacgtccccgacgaatggaagatcgccgttatcacggcctacggtgagttcaagcccttcaggcccaacatcgaggtcgttgacacggagttcgacaggcgctctacggatgttagaacttctgaagtcatagagaaaataaggcgcatcaacccggattacgttgtcatcgatacggttcacacggttgacgtcgctacgatactcaagaccctaatagacgactatgcgtttattgtgacgtcactcgcgctgactgatgacatcaaaggcgaggttatgcactggctcaggatagacgaggacactttcaacaggtttgacgtggttgtcgagctggcgagggactggagaaccgggctcaggaagataaacaggatttacaaggtcaaggacggggagctgatccagattctttaaccatcgattttcttttctcgtactttagccaaattcttcaattatgggggataagaaggggaaaagagggagaattggaatcacttcttcttgagctcctctatgacttccctgaggttgtcgagcatctcccttatgtcgtcgaaggtcatgtaacccatgttgccaatgcggaaggtcttctcggcgacgcttccgtagcccttggcaagctcgaagcccctctcgcgcatcgcgttgtaaacgtcaactcccttcattccctccgggacaacgacagctgtaatagtggggctctcgtagcccggctcggcgaggattccgaggcccatctccttcacgccttcccttatcatctcgcttctcttcctgtacatgtcgagccaggcttccttgccgcccattttctcaactatcctgagaacgacgttgagaccgaatatctgcgggagcggtggagtcgagggcgttcccttcttcttctcgttgaacttcttgtagaggggcaagtcaaagtaccagccgcgctccggcatcttctcggctatctcgaagactctctcactgacagccgctacggccagtcccggcgggacgccgaaggccttctgagagctcgcgaatatcatgtcgagaccccacttgtcgaacttgatgtccgctccgcccatagctgagaccgcatcgacgaagaggagcttgtcgtgctcctgaaccaccttggccagctcggggagcgggttgaggacaccggttgaggtctcgttgtaggttatcgtaaccgcgtggacgtctggatttttcctgagggcatcgtcgagttcctcgggctttatggcctttccaggctctttctcaaggataacggcttcccttccgttggcgttcacaacatctgcaaagcgctttccaaacgctccaataaccgtgacaagaacctttccgccgcgtggaatcgtattcctgactgctgcctccatgaagcctgttccggagctcgggaatagtattatctcccccttgtcggcctcgagaaaggccttgagcctgttgagcgtgtcaacgtgaacggccttcgcctcggcagagcggtggctgaacatctggacgctcataatagcgagaacctcggggaagcacgcgacgggaccggctgtaaagagcttgtacttcggcttcaccatctcgtaaacttctctgtaggcgtcctcataggtcatgtcaaagtggagctccatagttatcacctcgcccttagttgctcaagggggtaaaaagggtttgctttagacctatcaaaggctctccgaaagttaatcggaaacttcatctttaatgagaatttcattcactccacccaagacttttaaacaggtactcaaacgttcagtcggtggtctgatggaacggagaagactcgccggcatcgtcctgctcgtgctctctgccttcacgggcactctcgcctttcgtctcgccacacccgccatagccttctacacgagggacacgctcagcgcgagcatgctggcggtttcaatagtttccatgtcctttgttctggcgagggctttttcctcggtgttcggtggcctcctccttgagaagaggaagtccatcctccacatcggcggaatcgccatgatggggaacgccctggccgttcacctctaccccctcacctctaactggattcaggtggctggaataaagctcctcaacggctttctcaacggcctcagctggcccatggcccagttcgtcgttgccgtggcggctccacaggagataagggcccgggttacggccgtttacttctttttcggcagcatcgcttccctcctcggcaactacgtttatgcctacacaatagatttgggactttctggccagatgtgggtatcttctgtcttctttgtgctgaccgggctgataatgataatcgcttacatcctcctgaacgactgggtagcaccgaaaagggagaaaaagagctctcaaaggccctccctcgacccgagaaaagtcctcgtgatagcctccctgatggcggtcatagtggcctttacctccggagagataacgtacgtctacgtctccgaggcccttggactggaaaaggcaactaccgcgaccctgctggggtgggttggcttcttcgcttcccttctcagctacttctcctcctggttcgcggataaggtcagcgaggttgggatggtaaagctgacggccgtacttgcggggatttctccgatcctcgcggccgttaaaacatcgttcaccgttttcctcggaatattcctcgcgctcttcggcttccagagctttaggcccatatctaggaaggtgctcgccagctaccaccgctcctccctggccataggcggggttaacggtgtccagaacctatcgactttcatcggaggggttttctttggccttgtgtactcaataggagaaatccacattggggttaccttgaacggggcgcttttggcatttacgccggtctcgctggcccttctaattcaggccgttaagcttaaaggtgggagggagtaaggactctgttggagatttcaccatccaaaacttttataaaagcgatggccagctaagtttaggctttaacttacgctcatttggaggtgagagtatgggacttaggccagcaaagattgatagggacgttgacaagcccgcttacacgaggagggaatacatccgcggtgcccccggtccaaagataacgatcttcgacatgggcaacctctcagccgagttcgagtacgaggtgagccttcacgccgagcaggccatgcagatcaggcagaacgccctcgaggccatccgtatccaggtcaacagatacctccagaagaacgtcggtaggagcaactaccacttcaagataagggtttacccgttccaggttctccgtgagaacccgatggctaccggaaggaaggccgaccgttacggaaacggtatgcgcaggcccttcggaaagccgattggattagctgctcgcgtcaggaaggaccagaagatactcaccgtctgggtgaacggccagcacctcaagttcgcccttggtgcaatgcacagggccaagatgaagcttccgtacagtgcttactacaggatctacgacaaggaaggcaacgacgttaccaccaaggttctctccacgatgaagctctgaaccgacttttccctacttttctatgctttatccctcaagcaggttctgtactgccttcagtcctcacgttttgtcttgtgtttctgggtgatgcagattcataataatgattattaatgatgctgccatacttactggtggtgagaggatggtaagctcgtacttcaggaacctgctcctcaagctgggccttccagaggagaggctggaagtccttgaaggaaagggggccttagccgaggacgagttcgagggaatcaggtacgtccgcttcagggattcggcgaggaacttcaggagggggactgtggtattcgaaactggggaagctgttctcggttttccacacataaagcgcgtcgtccagcttgaaaacggcataaggcgcgttttcaagaacaaacccttctacgtggaggagaaggttgatgggtacaacgtccgcgtcgtcaaggtaaaggataagattcttgcgataacgcgaggcggcttcgtctgccccttcacgaccgagaggattgaggacttcgtgaacttcgacttcttcaaggactatccaaacctcgtcctggtcggtgagatggccgggcctgaaagcccctacctcgttgaggggccgccctacgtcaaggaggacattgagttcttcctcttcgatattcaagagaagggaaccgggaggagtcttccggcggaggaaaggtacaggctggctgaggagtacggaatcccgcaggtggagcgcttcggcctctacgactcttccaaggttggggagctgaaagagcttattgagtggctcagcgaggaaaaaagagagggcatagtcatgaaaagccccgacatgaggagaatcgcgaagtacgtcactccctacgccaacataaacgacataaagataggctcacacatcttcttcgacttacctcacggctacttcatggggaggataaagaggctcgccttctatctcgccgaaaaccacgttaggggagaggagttcgaaaactatgcaaaggccctcggcactgcccttctgaggcccttcgtcgagagcattcatgaagttgccaacggcggcgaggttgacgagaccttcaccgtccgcgtcaagaacataacgaccgctcacaagatggtgacccactttgagaggctgggggttaagatacatatcgaggacatcgaagacctcggcaacggttactggaggataaccttcaagcgggtctatccggacgcgacgagggaaatccgggagctgtggaacgggctggcgttcgtggactgaaggatttccattcatttccaagctgggaaaggtttaaatattcgaatcacggttattataattatgatccgtaaattcgtgaacagaaaacgggagcttgaggtgctggaggagctctacaacagaggggcaaacctgattgtagtgtacgggcggaggagagttgggaaaacaacactccttagaaagttccttgagggcaagagggggatttacttcctgtgctctcagagggggtatgaaaaggacctcgaacggttctcggaggaagtgagcgagttcattggtatgccagtgaggttcgggagctttgaggacgcttttaggttccttacaaagcagggaaagctcgtagtggtaatcgatgagtttccctatctcatagaggcctacagacccatagtttcagtgttccaggagatagtagacctcataatcaaggactcccaggtcaccctcatcctctcgggctcaagtgtggggatgatggagcgggaggttctgggctacaaggctcccctctacggcagggccaggggtataatgaagctgaagcccttcaggttctttgacatggtggaatggtacgggagcgattttgagaggctcgtccgcctctacggcgtcacctggggagttccgaggtacatggagctcttaaaggacgggagcgacgaggagataatcgcgaacttctttgagccaacggctttcctcttcaacgaggcgaggcttttgctaatggaggagcttagaaacccgacgacctacgcccagatcatcgaggccatagccctggggaagacgaggctcaccgagatctcccagtacgcgatgatggaggcgaaggaccttccggcctaccttcgggttctccagaatcttggaatagtcaagcgcgaggttccggtcaccaaaagggtctcgaagagggggatctacacaatcgaggatgagtacttccgcttctactaccgcttcgtcagcccgcactatgaggacattgagggcctcaatcctgagcccgccatagaggacttcaggaagaacttcaacacctacctggggactaccttcgaaaaggttgcgagggagttcctgataatgctctcggccaaggggcaccttcccagcttgtaccaccgcttcggccgctggtggcacaagggcgaggagattgacctcgttgccctcaacgagcgtgaaaagaaggcgctgttcgttgaggttaagtggaaggagctcaaagagagggaagcgaggggggttttgaaggacttggagaggaaggccgagcttacgggcctcgatggatgggagaagagctatgggcttgtggctaaaagcgtcgagggaaaggaagagctcagggatgatggctggttagtatgggatttaggagacttcgaaaggcttatttcctcaaagacccaagtttaaggggtggttcccttgtcgctcttgccgttcgtcggatgctttcaggaattttttaatttttcttttgacgcccctttgggcgttggttttggagttaaaaccaacacaactaaggtatttcaagtgttttcatgttcaaactggctttccaaagaagaaaatcgcgtgaaatctagctttttaaggatgagctacgaaccttgatcaaactcaacgggactatcgtcccgtgcgttgaagcgaagcttcaacgtcgcgcaggaagcttttgggaaaagcttcaccaaagtttgaatgtctccgaggattggcttgatacggttagattctcttgatagatgggcggagaagtgcgggttttcttattttttaacgccctttgggcgttatattgtgagtaaacccttgagaattgccaattaatgattgagaatcactgaacgcagggcgctcaaaaggacattcactctttgatgaaactttgccctgcaaagtttcctttgcaaaaaaatttcacactcctcaacccaaaagagggtggaaaggttcgaaagccttttaaatagtctccatagaccccagttcagcattggagctaccacatcaaaggatgacggaaaaatggcctggcacgtcttcattcccgattcgctcctcgaagagaccgacgacccaaagatcagaacgtacaaggtcggacaggtagccagggcctgttcaatattcggcgttgagcacatctggatttacagggccggcggcagggacggaaagttcatcaagaccgtcctcgagtacgcggagaccccccagtacctcaggaagaggctgttcccgctgatgcccgagctcaagtacgtgggagtgataccgccgctgaggacgccgcaccacaaactcaagggaaggccaagggtcggcgaaatccgagagggtttcgccttcagaagggggaaaagaacttacgcggacatcggcctcgatgagctggcggtcgttgaagggaacgttgaagggcgtgcaacgttcaaaatcgtctcgacgagacctctgagggtcgtcccgacaaaaccggaggactactggggctacagggttcacctcacgaggaagtcgctggcgaaaacacttaaaaaggccgggcttgatctggtcatcgcgacctcgaggaagggtcgcgacataagagaggttgagatccccccgctcgagggggaggtcggtttcgtgttcggctcaccgaggaaaggcgtgatggagctcctcggcgaggagaagtttgagttccatctgatcctcaacaccattccaaatcagcggactgaaacggtccgcaccgaggaggcattgcttgcaaccctcgcgatatttaatctcataaggagggattgagatgggaaaaatacacaggccaaggagaggttcactggcatattccccgaggaagagggcaaagagcatagtgcccaggattaggagctggccaaaggacagtgaagtcaggatgctcggtttcgctggctacaaggctggcatgacccacatcctcatgatcgacgacagcccagggctcaccaagggtaaggagatattcgtgccggtcaccatagtcgaggttccgccgctcttcgtctacggcataagggcctacaagcagggatacctcggccttgaaacggccaccgaggtttggttccacgaccttcacaagaacgtggccaggaggataaagaccctgccgaagaactacaacgaggaggccttccaggcgaagctcggccagcttgaggacctcgtcaacgatggcgagatagccgacgtcaggcttctcgtccacacccagccctggctcatcggcctcaagaagaagccggaagttatggagtacgccatcggtggcgacgacgtcaaggccaagttcgactacgccaaggagaagatcggcaaggagctccgcgctggagaggttctccacgagggcgagctcctcgacgtcatagccgtcaccaagggcaagggaacccagggcccggtcaagaggtggggcgtcaaggtgcagttccacaaggcccagagggctggcaagggcaggcacatcggtaacctcggtccgtggcacccggcaagggtcatgtggaccgttccgcaggccggtcagatgggcttccaccacaggaccgagttcaacaagaggctcatcgccataggtgagaacggcaagctggttctcgacggaaacgagatcgagatcaccccgaagggcggcttcccgcactacggcatcgttaggagcgacttcctcatgatcgagggtacgattccgggttcattcaagaggataataagggtcaggccggctataaggccgccgaagaagaagccgccggttgagaggccgcagataacctacgtcagtagggagtccaagcagtgaggtgagatagatgaaggtcaaggttttcaatctcgaaggcgagcccgttgaggagatcgagcttcccaaggtgttcagcacccccttcaggccggacctcataaggagggctgtcatcgcttcctggactcacaggattcagccgcagggtagggacccgcaggcgggtaagaggcgcgtcaccgagaacattggaaaaggccacggaatggcaagggttgagaggataaagacctccccaaggttcgccgccttcgtcccgttcgccgttggcggaaggaggacccacccgcccaaggtcgagaagataatctgggaggacatcaacaagaaggagagaaggcttgccataatgagcgccatagctgcaacggccaactacgacctcgtcagggccaggggccacgtggttgacaacgtcgttcagatcccgctcgtcgttaccgacgacctgcagaaggtcttcaagactgctcagaccagggagatattcaagaagctcggtgtctgggacgacatcgagagggccaagaagaacaccaagatcagggcaggaaagggcaagatgcgcggaaggaggtacaagaaggccaagggcccgctcatcgtcgttgccaagaacgagggcatcgtccagggagcgaggaaccacccgggcgttgacgttgtaactgttgacaacctcggcgttgagtacctcgcaccgggtacccacccgggaaggcttacgatctggaccaagggtgctatagagaggcttagggagatttacgggtgatgagagatggatccgtacaaggtcatcataaggccgctcgttaccgaaaaggccgtttccctcatcgagagggagaacaagctcaccttcatagttgacaggagggccaccaagcaggacatcaagagggccgtggaagagatgttcaacgtcaaggtcgcaaaggtcaacacgctcgtgactatgaagggcgagaagaaggcctacgttaagctcaagcctgagtacgatgcaagtgagatagctgccagattgggattgttctgaaggggtgagtgagatgggaaagagtctgatccagcagaggagaggtaagggaactaccacatttagggccccttcacacaggtacaggggtgccgttaggtacgtcccgctcaacctcgtccaggagaggacactcaggggcgtcgttgaggagatactccacgacccgggcagaaccgccccggtcgcgagggttaagttcgaggacggaaccaagaagctcatcatagcccctgagggagtcctcgtcgggcaggagatttacataggccccgaggccccgatagcaataggcaacaccctcccgctcgccaagatcccggagggtacttacgtttacgacatcgagggagttccgggcgacggtggaaagtacgttagagctggaggaacctacgcgctcgtcgtcagcagggagaaggacaaggtcatagtccagctcccgagcggtgagctcaaggccttcaacccgatgtgcagggctaccatcggtgtcgttgccggcggtggaaggcttgagaagccgatcgtcaaggcgggtaaggcctactacatagccaaggccaggaacaggttctggccgaagccgaggggtgtcaagatgaacgccgtcaaccacccgcacggtggtaaggagcaccacattggaaggccatcaaccgtttcaaggcgcgctccgcccggaaggaaggtcggtcacatagccgcgagaagaactggtaggaggaagtgatgaagatggcgagaaagaaggagtttaggtataggggctacacccttgatgagcttctcaacatgtcactggaggaattcgcaaagctcctcccgagcaggcagaggaggagcctcaagaggggcctttcacccgagcagaagaagctcctcaggaagataaggctcgctaagaagggcaagtacaacaagccgataaggacccacagcagggacatgatagtcctccccgagatggttggcatgaccatccacgtctacaacggaaaggagttcgttcccgttgagatcaaggaggagatgatcggccactacctcggcgagttcgccatgacgaggaaggtcgtccagcacggctcacctggtgtcggtgctacaaggtcctcgatgttcgtggcggtcaagtgaggtggtttagatgagcaggggcaggttttcctactcattccaaaattttgaccccgagaggatggcgagggccagcggaagggacctcaggatttcacccaagcacagcgtcgagctcctcagggagataaggggcatgatgctcaacgacgctctccgctacctcgacgacgtcatagccaagaagaggccggttccgatgaagcgcttcaacgacagccagggccacaagccgggcaagggctttggcccaggaaggtacccggtcaaggtcgccaaggcagtcaagaagatactcctcaacgccaagaacaacgccgagcagaagggccttgatgttgacaggctcaagataatccacgccgcagcccacaggggcccagtcctcaggggatacatcccgagggccttcggtagggccacaccgttcaacgagcagaccacacacatagagatagtcgtcgaggagattaggaggtgagacctttggcgatcgagaggtacttcatcaaggaaggcgttaaggagatgctcatcgacgagttcctcgagaaggagcttaggagggccggctacggcggcctcgacataaagaagactcccctcggaaccaaggtcactatcttcgccgccaaccccggttacgttatcggaaggggtggcaggaggataagggagctcacgaggatccttgagaagcagttcggccttgagaacccgcagatcgaggtcgaggagatcaagaacccctacctcaacgccaaggttcaggccgtcaggctcgcccaggcccttgagaggggcattcacttcaggagggctgcctactctgccatcagggccatcatgaggaacggtgctcgtggcgttgagataaggctcagcggaaagctcaccggtgagagggccaagagcgtcaggttctaccagggctacctcgctaaggtcggaaacccggccgagaccctcgtcagcaggggctacgcccaggcccagctcaagctcggtgtcatcggtgttaaggtctccatcatgccgcccgacgccaagcttccggatgagatcgagattaaggagatcgttgaggaagaggtgagcgccaatgaagcccagtgagattagggagatgagcatcgaggagatcgacaagaagataagggagctccgcctcgaactggccaaggagcgtggcgtgctcaccatgggggcctccatggagaaccccatggtcatccgcaacctcaggcgcgatatcgcgcgcctgcttaccataaagagggagaagcttagggagaaaaggtgaggttaggtgccgaggattgtgaaccctctggatgagatgctctttaaggaggtcctgaaggagcagcagaggataagggtctacgtggagagggcccgctacggcaagctcaagaccataatcgagggcatagacgagaaggagttcgaccttgaggacatcgcaaaaaagcttaaggcgaagctggcatgcggcggaacggcaaagaacggaaggatagaactgcagggagaccacagagacagggtcaagaagttgctggcagagcttggattttcagaggagctcatagaggtcgagtgacccggaaaaacataatctggcacgagctgataggccttaaagcaaaggttataagggcatctcatccagagctggtcggcatcgagggctacgtccttgatgagacgaggaacactctcgtcctggtgggagatagggtctgggtagtcccgaaggacgtggtcgagatcgagtttgaccttggcaatgagaagatccgtgtcaacggaaaggatctggtgggaagacccgagatgagactcaaaaagaggtggcggaaatgagagagattggattgagggttcagcctcccgctgaggtttgtaacgatcccaagtgcccctggcacgggaacctcaagatacacggtagatacgttgagggtatagtcgttagcgacaagggcaagaagacggtcgtcgtcgagaggcagtactaccactacctcaagaaatacgagagatacgagctcaggaagagcaaggttcacgcccacaacccggagtgcatcaacgctaaagttggcgacaaagtgctcatagccgagaccaggccgataagcaagaccaagagctgggtcgtcgtggccgtcctccagagggccgagagggctgaggaggtgtgatgcatggccaagaagggtgctggtgcaaccaggggtattagccccgtcaggccgacgcgcgccctcccgataggtgcctacctcaaggttgccgacaacagcggtgccaaggtcattcagatcataggcgtcgttggatacaagggaaccaggaggaggctcgcggccgctggcgttggcgacatggtcgtcgccaccgttaagaagggaaggcccgacatgaggcaccaggtcgtcagggctgtcgttgtcaggcagaggaaggagtacaggaggctcgacggcatgcgcgttaagttcgaggacaacgcggctgcgatagtcactcccgaaggtgtcccgaggggaaccgaaatcaggggtgcaatagcgagggaagccgccgagaggtgggtcaggctcggtagtatagcgagcatagtgctgtgaggtgagatgagatgaagcttgatatgaagcagccgaggaagcagaggaagttcctctacaacgctccccttcacctgaggggcaagataatgagcgcccccctcagcaaggagcttagggagaagtacggagtgagaaacctgcccattagggttggcgacaaggtcaaggttatgcgcggtgacttcaagggcgtcgagggtaaggtcgtggaggttgacctcaggaggtacaggattcacgttgagggcgttacccacaagaagaccgacggtaccgaggtcttctacccgctccacccctcgaacgtcatgattgttgagctcaacctcgaagacgaaaagagagagaagataattgagaggagggctgcttgatggcgaggaagggtccgaagaggcaccttaagaggcttgccgctccgacttcctggtacattcacaggaaggcttacaagtgggccgtcaggcccagtccgggtccgcacagcatgaagacttccataccgctgatctacatagtcagggactacctcggctacgccaagaccgccagggaagccaggaagatcctcaacgagggcaagatcctcgttgatggtagggtcaggaaggactacaagttccccgttggaatcatggacgtcgtctcaatcccagagacgggtgagcactacagggttctcccgaacaggataggcaagcttatactccacccgataagcgaggaagaggccaagctcaagcccttcaggatcaacaacaagaggatggtcaagggcgctaaggttcagctaaacctccacgacggaagcaaccacctcgtcagccttgccgagaaggacgcctacaagacctcctacacggtcataatgcaggttccggagaggcagatagtcaaggtgctcccgttcgaggtcggtgcctacgtcttcgttacccagggtaagaacgttgccagaaagggtaagatcgtcgaggtcaggcagttcccgatgggctggcccgacgtcgttacaatcgaggacgagaacggcgagctcttcgacaccctgaaggagtacgccttcgtcattggtaaggacaagcctgagatttcccttccgtgagaggtgagatgagatgcagatcaacagagaggcaatcctggctgactgggaagctcacccgatgaggaagccgaggatagccaaggtcacgataaacataggtgttggcgagagcggtgagaggctcaccaaggccgagaccatgcttgagcagctcgtcggccagaagcctataaggaggagggccaagcagaccaacagggacttcggaatcaggaggggcgagccgatagcggtcaaggtcaccctccgtggagagaaggcctaccagatgctcgacaggctccttgaggccgttgacagaaagctcaaagcgagcaacttcgacgagcacggaaacttctgctttggaatccaggagcacatcaacataccgggcgtcgagtacgaccccgagatcggtatcttcggtatggatgtctgcgtcaccctcgagaggccagggtttagggtcgccaagaggaagaggcagaggaggaagataccgaccaaacacaagctgactaaggaagagggtatagtcttcgctatggaggagctcaaggctaaggtggagggattgtgagatggcgaaggccgattacaacaagaggaagccgaggaagtttggtaagggagcgagaaggtgcatgcgctgcggccagtacgggccgataatcaggatacacggccttatgctctgcaggcactgcttccgcgaggtcgccccgaagctcggcttcaagaagtatgagtgaggtgagagaaaatgactctgcttgaccctctggcaaacgcgctttcacacataacgaacagcgagagagttgggaagaaggaggtctacatcaagcccgcctcgaagctcatcggtgaggttctcagggttatgctcgagaacggctacatcggcgagttcgagcttatcgacgacggaagggctggtatatacagggttcagctcataggtaagatcaacaaggccggcgcaataaagccgcgcttcccggtcaaggccagggactacgagaagtgggagaagaggttccttccagccttcgagttcggtatcctcattgtctcaacgtcccagggtgttatgacccacaaggaagcgctcgaaaagggaatcggcggcaggctgatagcctacgtctactgaggtgagaaaaatgccggtggacgcttggattcgtgaggagattgagataccagagggagtcgaggtcaccgtcgagggtaacaccgtcaaggtcaaggggccgaagggagagcttcagagggagctcaagtaccccggcgttcaaatcttcaccgaggacggtaaggtcgtcatctacaaggagtttccaaggaagaaggacgtcgccatcgtgagaacattcaaggcccacatcaacaacatgatcaagggcgttaccgagggcttcaagtacaggcttaaagtggtttacagccacttcccgatgaccgttaaggttcagggcgatgaggttgtcatcgagaacttcctcggtgagaagaacccgaggagggccaagatccttccgggtgttaccgtcaaggtcaagggaagcgagatcgaggttgagggcattgacaaagaagccgtcggtcagacagctgcgaacatcgagcaggccacgaggataaccaagtgggacaggcgtgtcttccaggacggtatctacatagttgagaaggctggcaagccgataaagttctgatggtgaggtgtgagagatgaacgaaaaggcgagactcctgaggataagggccaagctcaagaggaagaagccgaggttcctccgccaggagtggtggaggtacccgaagttcaagaacgacccgaagtggagaaggcctaagggaatcgacagcaagatgaggctcaagaagaagggcaagccgcgctcaccgagcatcggatggagctcacccaaagcagttcgcgggctccacccgagcggctacgaggaagtcctcgtccacaacgtcaaggagcttgaggccatagacccgaccaggcaggccgccaggatagcgggaacagtcggcgccaggaagagagagatgatactcgctagggccaaggagctcggagtgaaggttctcaacccgtgaggtgatgatcatgctcaagacccagaggagaattgccgccgagctgttgaagtgtggcgagaacaggatatggatcgacccggagaggattgaggacgttgctgccgccataacgagggaggacataaagaggctcatccacgacggcgtcatcaagaagaagcccatcaagggtcagagcagggccagggctagggccttccaggaggccaggaagaagggccgccaccgcggtccgggaagcaagaagggcaagaagaccgccaggatgggcaagaaggaagtctggatgatgaccataagggccctcagaaaggagctcaggaagctcaaggccgagggcaagctcgatgcccacacctacaggaggctctacatccgtgccaagggcggccagttcaagaacaagaggcagctctacatgttcatgcaggagcacggtattttgaaggagtgaggtgagagagatggcacacggaccgaggtatagggttccgttcaggaggaggagagagggtaagactaactatcacaagaggctcaagctcctcaagagcaagaagccgaggctcgtcgtgaggaagaccctcaaccaccacattgctcagatcgttgtctacgacccgaagggagacaaaacgctcgtttcagctcacaccatggagctcatgagggacttcggctggaagggacacggaggaaacactccctcagcttacctactcggtctcctcatcggctacaaggccaagcaggctggtatagaggaggccatcctcgacataggtctccacccgccgaccaggggttcgagcatattcgcggtcctcaagggtgcggttgacgccggcttgaacgtcccgcacagcgaggagatctatccagaggactacaggataaacggcgagcacatagccaactacgccaaggccctcaaggaggaggacgaggccctctacaggaagcagttctctggatatctcgtcaagggcctcgagcctgagaagctccccgagcactttgaagaggttaaggccaagataatcgagaagtttgagggggcgagagaatgagcgacccgagagagatagcccagagggttcttgaggagtgggaaccaaagaccaagctcggcaggctcgttaaggaaggccagatcactgacattcacgagatatttaggaagggctaccagataaaggagcccgagatcgttgacgtcctccttccggaggtcaacctcagggagaaccaggaagtactcgacatagccctcacggtgagaatgaccgacagcggcaggaggatcaggttcagggttctcgctgccgttggcaacagggacggctacgtcggccttggaatcggccacggaagggaagtcggtatagccatcaggaaggccatcaactacgccaagatgaacatcatcgagatcaagcgcggctgtggaagctgggagtgcaggtgcaggaggccgcactcaattccgttcgccgtcgaggggaaggaaggcagcgtccgcgtcaagctcatgcccggaccgcgtggcctcggcctcgttatcggtgacgtgggcaagaagatactcacgctggctggcgttcaggacgtctggtcacagaccctcggtgagactagaaccaccgtcaacttcgcgaaggcagtgttcaacgccctctacaacaccaaccgcgttgccatcaagcccgaggacatcgagcgctacggtatcgtcgtgggtagggcgatgcccacgaccttcgaggttgagtgaggtgagagaagatggcaaagcttgcgctcatcaggcttaggagcgggattagggcgaggggtgaagtgagagacaccctcgccatgctccgcctccacaggatcaaccaccttgtcatagttgacgacaccccgagctaccgcggaatgattcagaaggtcaaggattacataacctggggcgagatcgacaaggagaccctagccaagctcctcaggaagaggggcagactcataggaaacaagccgataaccgacgagtacgtcaaggagaagctcggaatgacgatcgaggagttcgccgagaaggtcgtcaacggcgagatgaagctcagggatctgccgaacatcaagccggtcttcaggcttcacccgccgaggggcggccttaagggcagcaagaagcgctccttcaaggagggcggagcactcggttaccgcggcgagaagataaacgagctcattgagagaatgctctgaggtggcgagagatgattaggaggaggaagaaggttaggaagctccgcggaagtcacactcacggatggggctgcaagaagaagcaccgcggcggtggaagcaagggtggccgcggtatggcgggcaccggtaagaggaaggatcagaagtggacttggaccatcaagtacgccccggacaggctcggtaagaggggcttccacaggccgaaagcagttcagtacatcccgaaggtcataaacctcaacgacatagacgagaactttgaactgttcaaggatgcgggcataatatacgaggaggacggaaagctcgtcttcgacgcgactgccctcggcgttgacaagatactcggcacaggtaagctcacaagggccctcgtcgtgaaggcctactacgttacccccaaggcagaggagaagatcaaggctgctggcggcgaggttctcctcgcctgactgtcttctttaacttttaacaatcccacaggtgttgaagatgggagtccgggaagtagtctacgccatcgaacgctggttcccagaagttgaaaggcccaagaggcacgttcccctaaaggaaaaattcatgtggacagggattgccctgctgctctacttcgttctggccgagatacccctctatggaataccccagcaggttcaggattattttgcaacactccgtttcgtgctcgcaggtaggagcggctcgctcctgaccctcggtatcggtccaatcgttaccgccagtataatcatgcagcttctcgttggttccgagatagttaggcttgacctctcaaatcccgaggacaggcgcttttaccaggccacccaaagggtattcgccgtgttcatgagctttttcgaggcgttcatctatgtattcgccggtgccttcggtaaggtgaacaccggaataggtgcgttccagaccgtttcaatccccaacgggccgatctacattggaataggccttgcactcctcatcgttctccagctcggtctagcctcgacactgctcatactcctggacgagctggtgagcaagtggggcatcggaagcggtatcagcctattcattgccgcgggtgtctcccagacggttatctatagatccctggctcccgttcagagcaaccagtacatagacccactcacgggagagcctgccttgattggtgcgattcctgctttcattcagcacatcctcaaaggggacataagcggcgcaatataccgtggtggaaccctcccagacatcgtaaagctgattggaacgatagtggtcttcctcgtggtcgtctatctggagagcatgcgcgtcgagatacccctcagctacggccgtgttactgtccgcggcaggtatccgataaggttcatgtacgtcagcaacattccgatcatccttactatggcactctacgccaacatacagctctgggctaggctcctcgccaactacggccacccaatccttggccagttcgacagcgcaggcaatccagtcggtggtttcgtcatatacctctacccgcccagggacatcttccacgtgatcaacgacccagtgagggcgctggtgtacgcgttaatgacaatattctggtcgctgatctttggattcctgtgggttgaactcacgggccttgacgctaggagcattgcaaggcagctccagaacgctggcctccagatacccggtttcaggagggatccaagaatcctcgagagggtccttcagaggtacattccatacgtgacattctggggctccttcaccatagccctcgtggcagtgctggcggacttcctcggtgccctcggtactggaacaggaattctcctgacggtaggtatactctacaggttctacgaggagatagccagggaacaggccaccgagatgttcccggcactcaggaagttcttcgccaagtgaccctttcctttttgcaaaaccttttaagctcgtttttctgtatccttttggagtaaatctttgagtcctctgggtgagagccatgccgtttgttgtcgtgatcacgggtattccaggtgtgggcaagagcaccataacgaagctggccctcaaaaagacccgagccaagtttagactcgtcaattttggggatctgatgttcgaagaggccgtcaatatggggcttgtgaagcacagggacgagatgagaaagcttgaccccctgacccagaaggaacttcagcttaaagtcgcccagaggattgttgagattgccaggaaagaacccgttctgctcgatacccacgcgactatccggacccccgctggataccttctcggatttccaagggaggttatagaaatcctcaatccgaactttatagtcattattgaggctgccccgagtgaaatccttggaaggcgcctgcgtgacctcaagagggatagggacgttgagaccgaggagcagatagcgaggcatcaggatctcaacagggccgcggccatagcgtacgcaatgcactctaacgcgctcatcaaaatcattgaaaaccacgaggataaaggtcttgaagaggccgtaaacgagctcgttaaagtactcgatctggcggtgagtgagtatgcttgagggaatatacgcgttccttgacaacctgtttggaccgttcataactggctaccatcccatgtgggtcattacggtagctggggcaataatcggcgggacttacactttgatctactacttcttcacggatattgagaagcagaggcacatgcagaagcttgccaaagagctccagaaggagatgcgtgaagctcagaagagtggcgacgaaaagaagcttaaaaaagttcaaaagaagcagatggagcttatgaagatgcagagtgagcttatgcagcagcagatgatcccaatgttcctgacgcttcccgtattttggatattcttcgcgtggctcaggcgctggtacgtcgaggttggaatagtcaaagcccccttcaacttcttcctctttgactggttccacagctggcagcactcggcgctgccgcccgaccagctcggatacgtcggctggtacttcctgaccagctacgcggtcggcatgatactgaggaagttccttaatatgggataaatttaaaaacgctctgcaaaatgaggttgcgaggtgagagtatgaagcccatgtacaggtcaaggtcatggaggagaaagtacgtcaggactcccggtggaaggaccgtcatccacttcgagagaaggaagccgaaggttgcccactgcgccatgtgcggcaggccgctcaacggcgtcccgcgcggcaggccgagcgagctcaggaagctcccgaagaccaagaagagacccgagaggccctacccgaacctctgcccgagctgcatgaggaaggtcatgaaggcccaggttagggcttcaatcactgcctgacgtggtgcggaatgcccaagggctgcctcgtcataaccgtcagcggtctggcagggtccggcacaacgaccctctgcaggaacctcgccaagcactacggcttcaagcacatctatgctgggcttatattcaggcagatggccaaggaaatgggcatgaccctcgaggagttccagaagtatgttgagctccacccagagatagacagggaaattgacagaaggcagatcgaggcagccaaggagtgcaatgtcgttattgaaggccgcctcgctggctggatggtcaagaatgctgacctgaaaatctggcttgacgctccgataatggagcgcgccaagagggttgccaagagggaaggcatctccgttgaggaggcattcgttaagatagccgagagggagaagcagaacaggaaaaggtatttaaacctctacggaatcgacatcgaggacaagtccatttatgacttgattattaacacggcccactggggccccgatggcgtcttcgcgattgtgaaggccgccatcgaccacctttcccccagcggtgacgcgggggaggatgaaaaagaaaaggaggtgggatgaatgccagctattgaggttggaaggattgccgtcgttatcgccggaaggagggctggacagaaggtcgtcgttgccgacataatcgacaagaacttcgtcctcgttaccggtgctggcctcaacaaggtcaagcgcaggaggatgaacgttaagcacctcgagccccttccggagagggtcaacattcagcgcggcgcttccgacgaggagatcaaggccgccctcgagggggctggaatcagcctcgagtgaggggccttcccctcacaattctcattctcggttctggttctttgttctgccttttgtatcccaagattttatagccctgttctgggcataaactttggtgagaggttatgaagactgccctaattactggcgccaccggcggcattgggagggcactgtcagagaggcttgttaggcagggctaccacgtaatctgtgttgcgaggagagaggataagctcagggagctatccaaggccctgaaaagctttgattacatagctgctgacctttccgacacggaagctccggccaaaatcagggatgctttagctagtatgggaataagaaagctcgacctgctcataaacaacgctggctacgccatcagaaagcccctcctggagcattccagtgaagagcttgagaacatattcagagtaaacgtctttgctcccatctggcttacgaaggagctcctcccgtttctcgggaagggctcaaaggtcgtctttgtaataagcggcgttgcctttgtcaatgtccctgagatcccctcatactgcgccaccaaaggtgcgctccactatctcacgataaacttagagaaggagctggcggagctgggaataagcacgattagagtctatcccaagcaggtgaagagcgagttctggaagggtaagattcccagggggtcaatcgaacctgagcgggtagccgatgcggtgcttaacggcattaaaaagaacaagcgtgaggtctttgtgcccggctacctgaagctcgttaaatacctgcccaactggcccgtctttacataccgcttcagatattaggtggatttataaagagggctacagtagagaaaacggtggggagcatgaaccttcatgccgttatctgggaggaagagggagtttacgtcgtcaaggaagtgttcacgggggtaactactcagggcgagacgatagaggaggcacttgagaacctcagggaggcggtggagctttacctggaagagttccccgagctcaaagaggaacttgggaagataaagttcgtgggcgatttcaatgtcgagattgccaaggctctcgggtgaagaggtcgtcaaagtactgacatctaagttcggctttaaggtctcgcgtcagaggggcagtcatgtcgttttagttaaatatgaaaacgggagaaaaattggtaccgtggttccgcttcacaaggagctgaagcccggaactttgctcggagtgcttcatcttgctggaatttcaaaggatgaatttgttggggctcttaaagatctgtaggtgatgatcatggcgagggacgaagtgaggaggatccttcccgctgacatcaagagggaagtggttgtgaaggacgagaaggccgagacgaatccgaagtggggctttccgccggagaaacggccaatcgagatgcacatccagttcggcataatcaacctcgacaagccgcccgggccgacgagccacgaggtcgtcgcctgggtcaagaggatactgaaccttaacaaggcaggacacggtggaacgctagatccgaaggtcagtggagtccttccggttgccctggagagagcaacaagggttgtgcaggcccttctgccagctggaaaggagtacgtggctttaatgcacctccacggcgacgttcccgaggacaaaatactcgccgttatgagggagttccagggggagataatccagaggccgcccctgaggagtgccgtcaagagacgccttaggacgaggaaggtctactacatagacgtgctggagatagaaggtagggacgttctcttcagggttggagtcgaggccggaacctacatccgttcgctcatccaccacattggccttgcccttggggtcggcgcccacatggccgaacttagaaggaccagaagtggccccttcaaggaggatgagaccctcgtgaccctccatgaccttgtggactactaccacttctggaaggaggacggggttgaggagtacttcaggaaggcaatccagccgatggagaaggcagtggaacatctgcccaaggtctggataagggactccgcagttgccgctgttactcacggcgctgatttagcagttcccggcgtagtcaagctccacaagggcataaagaagggagacctcgtcgcaataatgaccctcaaggacgagcttgttgcactgggcaaagccatgatgacaaccggggagatgctccagaagagcaagggcatagcggtcgatgtggacaaagtcttcatgccaagggactggtatcccaagctgtggaaggagaaagagtgatttctctttcccttctttggggtgcttttcatggaggggaggaagggcctcaagctgataattgagaccgttgttggtatgatttccatattaatggccctcctctttttgggggcccgcagtggtggcgaaaccatagatgctggactgctcgtgacgatgtttgcacttctcccgctcttcggagtttctgctctctttttcatcggccgccatcttgagaagcacggatatcggagggaagactttaagcggctccacgtaatcctcgaggagaactggggcagggacaggtttgtgaaggatgtacaggaaataattggtcatcacataatcgtttggtatctgctcggcatggccctctttttaaccggaaacgttgtgggggcggcaatttccgtggtcgccatgtttctggaaattttttcgtttatccctatcttcctcctcatggtgcagtggatattagacattcccctcactttgtatgctctcgcctctgggaaggaatggacggtaacatcggctagggacctcggcctgtggattataaagacctcccttttcggtgccggtttgctggttggtgtctatctcctgggacacactgtagggggctcttctcttgagatggtcgatgaacttttgaggttgggcagaagtgagcatctcgtcaaaaaccttctcctattgtccgctcagagtgttgccttcggtgccgctgaagcctacgtattcccgaagcacaaaaagcttggcttccttgtcctccttgtcgttggagcagtaggtgtggctgttgtgtgggacataatacggggattttaggctccttcacctttataaaccccttatcgaatccccgaccatgagccactactactcagaagagccgagcactccgctgaagacgaagactatcgaagtctgcgttagagggcactgtttcaagttcatcacagcgagcggggttttctccttcggcaggctcgacaggggaacggaactcctcatcgagagcatggttcttcagccagggtggagggtccttgacctcggctgtggatacggtcccataggcatcgttgcctctcgctttgtggattatgtcgtcatgactgatgtaaaccgcagggcggtcagcatagcaaagaaaaacttaaaaatcaacggcgttaggaacgcagaggttcgctgggggagtctctacgaaccggtcgctggagaaaagttcgactccataatcacgaacccccctgtgcacgcagggaaggaagtcctgagggaaatagttataaacgctccacggcatctgaacgatggtggctacctccagctggtcatcaagaccaagcagggggcaaagtatattaagtccctcatggatgagactttcaccgaagtgagagagctcgcgaaggggagcggctatcgggtgtatgccgggatcgcctagcctgggatggcgcgggccttgagagcccgtggccgtatggccaccggggttcaaatccccgtcccggcgccaaaatcccttatcgtttcaaagggatgtggaggtgtattcgtaatgaccgagaactttaggcacatcgtccgtgttgcgggagtggatatagacggacataagcaggttaggtgggcccttacgggcataaagggcatcggcataaacttcgcaacaatggtgctcagggttgcaggaatagacccgttcatgaaggcaggttacctcaccgacgagcaggtgaagaagatcgaggagatactcgctgacccggtcgcccacggaatacccgcttgggccgtaaacaggccgaaggactacgagactggcaaggacatgcacctcatcactgccaagctcgttatggcctggcgtgaggatgtcaacaggctcaggaggatcagggcttaccgcggtataaggcacgagctcggtctccctgtcaggggacagaggaccaggtccaacttcaggcacggtacaaccgtcggtgtgagcagaaggaagaagtgaggtggtgtaaatgggagacccgaagaggcagaggaagaagtacgaaactccctctcacccgtggattaaggagaggcttgaccgcgagagggttctgaagaggaactacgccctcaagaacaagaaggagctctggcgccacgagacccagctcaaggagttcaggcgtagggctagaaggctccttgcggcccgtggcaagcaggccgaaatcgagaggcagcagctcctccagaggctctacaggcttggcctccttccggccgatgcagtcctcgatgacgttctctcgctcaccgttgaggacgtccttgagaggaggcttcagaccatcgtctacaggaagggcctcgccaggactatgaagcaggctaggcagctcatcgttcacggccacatcgaggttaacggtcaggtcatccgctctcctggctacctcgtcctccgcgaggaggaggacacgataacctacgccaagggctcacccttcgccaaggagggccaccccgagaggatggttatcgaacaggctaagcagggtggtgaggcatgagcgaggagcagaccactcaggttaacataaagaagaaggagaagtggggtgtcgcccacatctactcctcatacaacaacaccatcatccacatcacggacctcaccggggccgagaccatctccaggtggagcggtggtatggtcgtcaaggccgacagggacgagccctcaccgtatgctgctatgatagccgcgagaagggccgccgaagaggctatggagaagggcatcaccggcgtccacatcaaggtccgcgcccctggaggaagcaagagcaagagcccgggaccaggtgctcaggcagccattagggccctctccagggccggccttaggattggaagggttgaggacgtcaccccgatcccgcacgacggtaccaggccgaagggcgggagaaggggcaggcgcgtctgatcccctacaacttcttttttggtgatgccaatggtagagttcaagattcttgagaagaggcccgactcaataaagttcatcgtcagcggcgttgatgtaccgttcgcgaacgcccttagaaggactattctctcggaagtcccaacctttgccgttgatgaggtcgagttcctagagaacgattctgcacttttcgacgagataatagcgcacaggcttgccatgataccgctcacgactcctcatgagaggttctcgctcgatgcccttgagcttgatgactacacggttaccctctcgcttgaggctgagggccctggcatggtgtactcgggcgacctcaagagtagcgatggagatgtaaagcccgccaacccgaacatccccatagtaaagctcgcagaaggacaaaggctaacgttcaacgcttatgcgaggctcggccgcggaaaggatcacgccaagtggcaaccgggcttcgtttactacaagtacctgaccaagatacacgtcagcaaagacgttcccgactgggaggagctcaaagagctcgctgagaggcgtggactccccgtcgaggagagtgatgaggagatagtcataaccacgataaaggccttttaccttcccaggaagttcgaggagcacatgggtaaggggatcagagaggagatagtgcccggttcattcgtgtttaccgtcgaaacgaatggtgaacttcccgttgaggaaatcgtgagcatagcgctcaaaatactcatgaggaagagcgatagatttataaacgagctccataaattagccgactgacgcgggggtagccgagcctggccaaaggcgcgggattcagggtcccgtcccgcaggggttccggggttcaaatccccgcccccgcaccataattacgctcaccccgtccgactgtcggtttccctgcgagagctttgaggaggtatgttcatggttaagagaactggaccgaccgatattaacctgagaaggctcatccgcaccctcaggaaaaagtcaaacgaggaaggagtcaagatatggaaggacatcgcctggcgccttgagaggcccaggaggcagagggctgaggtgaacatcagcaagatcaaccgctataccaaggagggcgacgttgttatcgtcccgggaagcgtcctcggtgcaggaaggcttgagcacaaggtcgtcgttgcagcttggaagttcagcgaggcagccaggaggaagataatcgaggccggtggagaggccataagcattgaggagcttatggagagaaacccgaagggtagtggagtaatcataatggagtgatgggccatgaggataattaacgctgaaggactcatactcggaaggctcgcctcgaaggtcgccaagatgctcctcgagggcgaggaggtagtcatcgtcaacgccgaaaaggccatcatcaccggcaacagggaggacatcttcgccaagtacaagcagaggaccgagctcagaaccaggaccaacccgaggaggggcccgttctatccgaagaggagcgacgagatcgtcaggagaactgttaggggcatgctcccctggaagaccgaccgcggaaggaaggccttcaagaggctcaaggtctacgtcggagttcccaaggagttcgagggcaaggagttcgagaccataagcgaggcccacatgtcgaggcttgccactccgaagtacgttaccgttggagaggtcgcgaagttcctcggtggaaagttctgaggtgagaaagatgagggtcatccagactgctggtaagaggaagacggccgttgcgagggccaccataagggaaggaaagggccgcgtcaggatcaaccacaagcccgtcgagatcatcgagccggagatagcgcgcttcaccatcatggagccgctcatccttgcaggtgaagagatcgtcagcagggttgacatagacgtcaaggttgagggcggaggcttcatgggccaggctgaggcagctagagttgccatagccagggccctcgttgagtggaccaacgacatgaacctgaaggaaaagtttatgaagtacgacaggacaatgctcgtcggcgacagcaggagaaccgagcctcacaagcccaaccgctcaaccaagggtccgagggccaagaggcagaagtcataccgctgatgcctttcctttaaccctttgaggtgtgaaaaatgatagtccccgtcaggtgcttcacctgcggaaaggtgctcgcagacaagtactacgagttcaagaagagggttgaggccggggaagacccgggtaaggtcctcgacgacctcggcgttgagaggtactgctgcaggagaaccttgctgagccacgtagagctgatcgaccaggtaatggtttataaagtctactaaaaaccgcatttctgggcggggccgtggggtagcttggtctatcctcccggcttggggtgccggagacccgggttcaaatcccggcggccccaccaaaatttgatctgtgcacaggaagtggggtggtagtcgtgtttaggtacacccgctttgaaaaggcccgcatcattggagccagggctctccagatagcgatgggagccccggtgctaatcgatgtacccgagggaattactccccttcaggcggctctcctcgagttcgagaagggtgtgataccgatcaccgtaataaggccgagctgatgagagatgacggtgatagagaacatagtcggcagggtaacagtactcaggggcggcaggtattcggttgaggttgacgttataactagctcgggttttggcaggttcgccgccccggtagacgagaatcctgacctctacatagcggaagcccacagggccgtcagtgaggttgacgagataatagggccagagcttatcgggtttgacgcaacggagcaggagcttatagacagctatctgtgggagatagacggcaccgaggacttcagccacatcggtgcaaacacggccttagccgtatcggttgccacggcaaaggcagcagccagcgagaagaaccttccgctctacacttaccttggcgggacgttcaccaccgaactcccagtcccgatacttgagttcgcgagcgacagtgagtttgactactacgtaatggtgcgcgacctgatggagataaccgatgttgttgatgccgtaaacggcgtgctctccaacctcaaagaggcgactgttgaaggatactcggaggcgacagaaaaagccagcagtgaactcggtctcgatgtcgccctgggactcgcccagaaggctcccatggacatggaaaaactgctgaccctcgttgaagacaacaacgtggcttatctaaagccaatgggtgatgaggagctcttccttgagcttattgccggaactcacggggtttttatagatggggagtacctgttccgccagaaggacatactagacaggcgctattacaacgccctgtccataaagccgataaatctgggcacgctcaccgacttatacaaccttattaacgacgcaaagtcggagaggattgttccaatcctcgcggaggctcgttttgagtcctccgacgaggcgctcgcccacatggccgtgggctttaggtgtccggcggtggtgctccgcaaggactccatcgccaagctcaacgagctgataaggatagccgaagaccttggtgaaaggggtagggtgataacgtttgaaggatgaggaggtgtgaaaggtggaggagtatctcgttccgctcgaccagtaccttgctgccggtgtccacatcggaacccagcagaagaccaaggacatgaagaagttcatatacagggtaaggcaggacggactctacgtcctcgacgttaggaagaccgatgagaggcttcgtgtcgctggaaagttccttgccaagttcgaccccgagagcatacttgccgtgagcgtcaggctctacggccagaggcccgttaagaagttcggtgaggtcactggcgccaaagctatacccggtcgtttccttccaggaactatgaccaaccctcaggtcaagaacttcattgagcccgacgttctcatagttaccgacccgagggccgaccaccaggcccttaaggaggccgttgagattggaatacccatagtggccctcgttgacaccgagaacttcctgagctacgttgatatcgcaatcccaaccaacaacaagggcaggaaggctctcgccctcatctactggatacttgccagggaagtcctctacaacaggaaggagatcgagagcagggaagacttcaagataccggttgaggacttcgagatgaggatcataaggacctgaggggaaaatttttaacgcccctcgctttactttccctcgcgcgggggtgcccgagcctggccaaagggggcggacttaagatccgctgccgtagggctgcgcgggttcgaatcccgtcccccgcaccaaaggtttaaaagttccagatcaaagggttgcaggctttaaggttatcgaggtgataagaatggcgagattccctgaggctgaggctaggatctttaggaaactcgtgtgcatgcgctgcggtgccactaacccatggggcgcaaagaagtgcagaaagtgcggctacaagggccttcgcccgaaggccagagaaccgcgtggtggaggacgctgatcactcccccttcagttttttcaatgtttcttcgaggaagtttattccctcttttaggagttcttcgcccttcggtgtgagcttgtagtacttcctggccggtttacctcctgtcgtttcctgccattctgaggttacatatccctctttctcaagcttgtaaagcaccacgtaagagctgactgtggcaggttcaaagttgaaagcctcttttatcttctcctttagctcgtatgcgtacatggggcgctctttcaaaagccggagtatgtagagccacagaacttcctttgtaatcttgttctgtaatctctctaggggggttgtcatgatctcacccttttgttctttgtgaaatattttagatccatataatttaagggttttgccaacaaaaggtttatctttcttctcgcccgatttgttagtggtggtctcatggagttcgatatgagcggtatgttcggggatctgggcgttggtgctatagtgggctttgtaacagggtatgcactgaagaagttcgtgaaaatcgtgatgacattaataggagcctaccttttgagcctcttctggcttcagcagaagggagtgataacaataaacactgacaagctcttcaacctgagtgagaacgtgacccagcaggtactaggtcttggacagaaggctcttgggatactcccaggtactggtgcgtttgttgcaggcttctacttaggattcaaaaaaggttaaagggatcagacctttccatgatagagtatcttgataagctcttccggaaggccctctttcttgattttctcctctatgagctttttctcgtcatcatagtccacttctatgaacttggtgtgtagagtgtccacatcaacgagggcaaaggttgctttgtggttcttgcccggtgggtatccaatgcttccgggacagatgaccctaccgtagcgggtcatagcgttgaccggatacttgggtgatgcaacaaagagtatctcatagtctttgaccggcctcatgatggcttcgtagtagctggtcggctggtctggcagtacaactcctccaaacgggttcagaggacttccatagactccgaatatgtcgttctttccaatcttgtcgacaaggtatattggaaggtcccttatgaactcgcgcccttcgtgaccaagggcttcccaggtgtacttgagggccttctttatgtagtcgggatattcaaccttgtcaatgtagtccggtccttccgcgtggggatcgctctcggctattacctggtcgaactcacccctgatgaccttgactgtgttgtttctgatgaggtcatcaagagcgtcaaggacttccttcgggtacgggaacagaccaacgatgttgcccagaacatagtacttctctatttcgtacccttcctcctttagggcctctatcttttcaagggcctttgccagtgctggaaggttgccgttgatgtttgcaagaacggccacgtacaccatggccaccacctccttttttcttacctgaagaaaataaaagtgttgaagtatttaagcctttcgtttccagcaagcttttggaaaaagcttgaccaaaagtgtgcccttcttctcgaactttgcttatcgggagtgtatgctccccagaaagcaggttcgcgtgtgggtttgttcttaaaaatctctcgttaattgtgatttcgaactttctttttagcgctcaaagagcactatactgtggggaaaatcctgtaagtctggcaactcgaaagtaaacccactcaaaaattagttcattaaaaacgcatacctcttttccgccggcgctgaaactttgccaggcaaagtttcatcaaagtttgtagctcttcttcaagagggttttattttaggattttagactgcaagtgctcatttttgagtgagaaccttttaggaagcttcttgaagagggtgttttcttttctttgacgcccaaagggcgccgatttagagttaaacacgagttgacagggtggattaagggttctcactctcaaaaagccatttgagttggaaaatcacggtgaattggcattccgaaaaagagctacgaaccttgatcaaacttcgcgcaggaagcttttagaaaaagcttcaccaaaagtgtgtgcccttctcctcgatctcgcctgttagggagtgtatgctctcaagaaggcaggctcgcgcgggtttaactccaaaatccccgcgctaattgtgatttttgactttctttttagtgcccttcgggcactatacggtgagaaaatccttttgaatcagccaattggaagtaaacccttcaaaagcaggcatatctaaaaagaaagcataccaatcttccgccagcgctgaagctttttggaaaagcttcaccaaaagctcgaatgtctccgagaattggcttgataaggttagattctcttgatggatgggcagggaagtgcgggtttttcttcttttttaacgccctttgggcgttatactccgagcaaaccccttgagaattgcaaattgattgtgagaatcactgaaaagcagggcgctcaaaaggacattcgctctttggtgaaacttttcattagaaaagtttctatggcggaccggcggggcttcgaaccccggacctgcggcttaggaggccgccgccctatcctggctaggctaccggtccactgcccgctaatccctcttagagaagggtatttaaagtttacggtgtattctctccggtggtgattgtggtcgatgagcttgacatgaggatactgtcattactccagaaaaacgctaggctttcctacagggagatagcgaaggagctgggggtggctgtcggcactgtatacaaccgcattaagcgtcttgaggagagcggggttattaagggatacgccccgattgttgactatgaaaagctgggttttggtttgactgccctaattggagttaaggcccaggggaagaaaataattgagattgagcgaaaaatcgcggagagcggtagggccatgatggtttacgacatcaccggtgagtttgatatattcgtaatcgcaaagttcaaggacagggctgatatgaacaggtttgtaaaatggctgctgtcgctcgacggcgttgaaaaaacgaacacgagcgtggtcatgcaggttgttaaagaggaaccgagactatcccttgaggattaggacttccctgaggaatctttcggtaaagtcctgaaaactttccacgggaagagttacttccctttcattaactttccctttgaaaacaaaccttctggaagttatctccctgattttgctgaaggacggattttcctttattgttttctcaagaacctttgtgaattcaacttcatcgacttcttctatcacgccttctatgaccacaacctttccgcagtcttcttcggggcactcaaatctaaaaggaacgccgggcgtgaactcgactgggatgctcagcccggcggcgttgtaaatgaaccccttcatggaaatccctcagagctttatgaggctctcaacggggaatgggtactcccctttgagtttttccacttcgtctccaacgcttatcaggaagaacatgccgacgggctttgcaccggcctggtgtgccagctccacgagcgccctctgggtctcaccgctccttatgacatcgtcaacgatgagcacggtctctcccttcttcagtgcccattgtggcagatagagagtcataacgcttcccgatgcacttggtacgtagttcacctcgtagaacttctcgacgccgacttccttcttcttctttgcgtatatcaggtcggcccccagctctctcgctatatgagctcccaggacaatgccgtcggtttcggctgtgaggactttgtcaatgtccttgtccatgtacttgctggcaacttcctccgctatcagactcatcagcgcggtgtcgctcagggcgggcatgttgtcgaagaatcccctttcatcgaactttatcctcttgcgaacctcttcttcaatgttgatatagggtgcaagcagctccataagctctttagtcctctcggagcttggtagtacctttcccctaacgtatcggttaaggaccgttattggcaatcccgttatgcgggacagctcctcgtatgtgtaagacttctttaacagcctcaggattcttatcagtctcagcttttcctggactgcctttaactggctcaccctctcacctccaggtggccagggattaacaaaaaaatgtataaatatgtttcggtctaaacgctcgcattcacctgggttttctggcctttgtggattactttttgtctgtattcctcgatgatgtcccagtattctttcataaggaaatctttggtgacgggtttaccgtcgggatggttaatgccagggcagaatgaatcttccttaatatagatctccattctctccccgtgtttaacaaagacaaatggatacagcctgcatgcgagcggcctgtggttgtagattttgcacttctttgtttctggatcgagaaagacgcatgcatcagtaacggggttcttctttatcgcataccctagaaacttatcccctctgtagaagagcttttcatagtccacgaactcccaggtattgtagcccaatccttcgattctctctatgtcctcatccctgagcgggatttcaagcctctcacagcaaagtccgcagttctcaatgcacttaaatttgaaggttgggtcggactcgacctccaaagtgactaggtcgactgtcgcgacccaccttttcaattcgttcacctccggtagctgcttgctataagggtctccgttagttcaatgtccttgatcttcctgagaacttcgtcgtggaacctgtctagctcctcaatgctggggacttcgatgcggattataatgtcgtactctccgtatactctgtaggcctctttgacgcgggggtcttttattatctcctgatagaccttctcttcgtttccgggtttcacaactatcagaacgattgcctctatcatattcccagccccccgaaattgaacttcttggccatcttcgcgagctttctcttattcaagctcttgaacatcttcttcatctgattgtactggttgagaagctcccttacttccgccgttgttgccccagatcctctggctatgcgctttatcctcgaatagttgatgatctctgggttttcaagctcttcttccgtcattgagtccattatgactttgtacctctttagcttttcttctcctaccctaactgcgtcctccgggagggaatagccaagtcccggtatcatttggagtatctgcttcagagggcccatcttctgcatcgcttcaagctgggcgtacatgtccttgaggttgaactttccgcgcaggaacttctccatgtcctcttccctgaactcctgctccttctggagctcttctatcttctccagaaggccctgtatgtcgccgagaccgagcagcctcgaaacgaagcgctttggatcaaagggctcaaggtcgtctatcctctctccggttccgatgaactttatcggagcacccgtcgccgctactgctgagagcgctccaccacccttggcgcttccatcgagcttcgtcacgattattgatcctatgggggttgcttccttgaaggccattgcctggttgtacgcctgctgacctatggtaccatctattacaagtatgacttcatggggcttaatggcctcgcttatctgcctcatctcctcgatgagacccttctcttccttgtgccttcccgcggagtcgactattatgacgtcaacacccttctcacggaagtgctcaacgccttccctcgcgagcttaactgcgtccttctcctcgggatcaccaaaaacctctatgccaaacgggtcgagaagctgtctgagctggtagtaggctcccggtctccaggtgtcggaacagacaacgccgactttgtatcccctcttctgaaggtagcgggcgagctttgcgacgcttgtcgtctttccggaaccctggattccaaccgtgaggataacggtcggcttgtgctttatctcgaggggctttgcctcggttccgagaaacttggttagttcttcgtacacgatctttattatgtgctccttcttactgacacctgcgggaggttcttcttcgagcgcccgcttttgtatctgctttgttaactgaaggacgagcttgacgttaacgtctgcctggagtagtgccctctggatatccctcacaatctctttgatcgtggcctcatcaacggtgctcgaacgggcgagttttttgagagcgctgttcagtgcttggccgagcttctcaagtgccatttttctcaccttgtttagagatgaaccataaccttataaacggttgggtctttgagttcttgtaaaatgtattcatttcgtttaatcagccgttttagagccgcttaagatgtaattttttgtacattgaagctaaatccaattctatggtctcttttattgagtttggagttcttttcggttcatttctgtgaaaaaacaatctacaaaagtttttaaacctaaaaatgctattggttaacggagagaaaaatagggggtgagagaatgcttccgtggatgctcgtttacgagtacatgttcaccaaggagaacgagaggagaaagagaaggccgattcctgaggagcttgagtacgttgagatgctccgtaggtgagtctgatagggctgtttttcttttttggctgttcttagcatttttatggttttcgtcggacggattgggtgctttttcaaattattcgtcgattgtcgaatcattttttaacgaatgtctttaggaaagctttttatatgttgaagttgtatatatcattggtgatacctatgccaacggttatcaagcgtgatcccaagaggtttttgaaggagcttcgcatccattacggcgatgtctggaagatgccctcgagccagtacttggccagcccggattttgtcgttgtggatccgaaaaccggaaagaagacaaaggtcagcttcgtttccctggacgatggggaagtcgttggagttgtgtacgacgacctcagctgattcttttggatttctgtaacttttatgtgttttgatcttgaacatgggggcataacatataaatacaacatcattggatattttttggggtggtatagtttgtccaaagacgtttattttgagttgctgtcaatagcccgtagtattcaagacccctatctaagggcacttacgtatgctagaatcggctactatatgcatctagccaaacgtcccaaatataaagatgcgttctcttctgctctccaggcaatagcctcgattgaaaatcctccccttatggttcacgctctaattgaggtcgggacacttttgagcagtataaaccctcagagtgctaaccgtgttctcgaaagcgcctatgaggcaatactcaaaatgccgcaagcaccaagggatgatttcctctatcgcttagtgaaaaaactcgttcaaatagacttcatggacagggcgtttgagtattctttggagattgaaaacgaagttaaaagaaatgatgcactactcctgatcctgaataagcatatccaggatggcaatctgagaaatgcgcacaaaattgttgaaaaaatccaaaacgagccttggaagtcgcttgcgctcttcaatatcctgaaggagcatctcaaaagagatgagcttggcacagctctgggcatgctttctcagttcaagagtgattactggcttggtgaggccgtgaaggctgtggctgtttacctcaaaaaatcgggcagtctggactctgcggtttacgagaaagttttccagtttatagtcggcctttcgtcggatgttagcgttgacgttcttaaatcgttccttgtcagtctggcggtccagggtgaaatcaagttcgtttcagagtcccttgagagaatcccccgtgagcaatgggatgaggtgatatctgccgttgtatcctctataatcgatagagtggagcttgttgaggagttcattgattcgctgcctgaggatgctaaactactcgcagcgggatatgtgctggatattcttcttgaaaggcctccaagttcggagtacctagaactcgtcagaaaaataggctcttttgtctcttcggaacgcttgaaggtcaaggccgtccgttatctctcgaaactccatgactatgagggggcttggaatcttgcttcctctataagtgacccccacctgcgctccctcgcctttgggagtatagcaatcgagaagctcaaagagggcgacatagatggagccatagacgcggccctcgaggttaaggatccgaggtggggttcatggttgctcagcgagattttggcgaagatagcagagcttcaggccagtggtcgcgtggttgaggatatagaggagcgggcagaggagcaaaagcgcctgtgggcagatgaataacgttttaaggcacgtttcttttatctgtctaggtgatgcgaatgccaaggatagcgataataggcggttctggagtttacgaccccgcacttctaaccaacatcagggaagagaccgttgaaacaccctacggaacggtcaaagtcaagatcggcgagtacaacggcgaggaaatagtatttctcgccaggcacggtgagggacacagcgttccaccgcacaagataaactaccgtgcgaacatctgggccctctacgagctcggcgtcgagaggattctttcgacttcggctgttggttctctcaacctagacatgaagcccggtgacttcgtaatcctcgaccagctcatggactttaccaagaccagacactacaccttctacgacggtgaagaaagcccgcacgatagaaagttcgtggcccatgtggactttactgaaccctactgtcccgagctgaggaaagccctgatgaacgccgccagggagctgggctttacatatcaccccatgggaacttatgcctgcatggaagggccccgctttgagacgagggctgagataagggcgctaaagatcctcggggccgacgtcgttggaatgacccagtgtccggaggcagcactcgcgagggagcttgagatgtgctacgcgagcgttgccatagtcaccaactacgccgctggcataagccccaacaagctcactcacacggaagtggtcgagcttatggcccagaagtccaacgagataaagctcctgctcatgaaggccatcgagtacattccaaaggaaagaaggtgcccctgcaaggatgcactgaagggcgcgaccggtgagtagtgttcctcttcgttctctccacttcttaactgtgcttacgttttaaacctcgggttaaggaaagtgtttaatagtcttttgagaactctctttggtgaggttaatgaagtacgatgtggttgttataggtggaagtgctggcggtctaacggctgcgatctctgccaagaggttctatcccgacaaaagcgtcctcgtgatcaagaaagaggacgtttccatgattccttgcgggattccgtacatcttcggtaccctgaggagcgttgaggatgatgttctcccaacggagaggtttctcaaacccctcggcatcgacgttctggttgatgaggtcacggaaataaatcccaagtccaagacactcctgacgaagtcagggagagagataggctgggaaaagctcgttctggcgactggttcgagaccccagatccctgacatccccggcgttgagcttgagggtgtgtacaccgtctccaaggactaccactacctcaaagagctcaagaagagagtagaggatgccgagaaggttgtcattatcggcggcggtttcatagcccttgaagttggggacgagatcagaaagctcgggaaggacgttacgatagttgtcagaagcaggctgttgagaaactctttcgaccccgaattcagtgagatgatcgagaacaggctcaaggaagttggaataaacgttgtttacgggcacgtggagaggctagtcggcagagagcgcgttgaaggtgtcaagctcgtcgaaggtggggaaatccccgccgatctggtaattctctcaacgggctaccgcccaaacgttgagctggcagtaaaaacaggtctaaaagttacaagatacggcatctggactgacgagtacatgagaacctcctgcccggacatattcgccgtcggcgactgcgtcgagcacagggacttctttacaggaaagcccttccctctgatgctagcctcaacggcaaccttcgaggcgaggatagcaggggcgaacctctttaagctccagatagtcagggagaacaggaggacaataggcgcttactccacccacgttgctggcttgaccttagccgccgcaggactaactgaggaagccgccaagagagagggctttgaggtcattgttggacgggctactggccccgacagacatccagcaaagttcgaggatacttcgatggtaacggtcaagcttatattctccagggacaggggggccattctgggtgcccagctagccggtggaaagagcgttggcgagatgatcaacgttcttgcactggccatacagaagaggcttacggctagcgagctctacaccctccagatagcgactcacccgctcctcacggcttctccagtcggataccagatactccaggcagcggaggatgcactggcgaagctgagagcgggggcctgaattcccctttcattttctagcaagcttttgggaaagcttcaccaaagaaactttgcccggcaaagtttcatcaaagtttgtggttcttgattagagggttgttttgagtggatttccttttgaatgctgtcttggagtgtgaattccatttttgttcgctcgctctttgtgagtttgctttttaatcgacgcccatagggcgtcaaggcgagaaaactcctttccaattaagtatgctcgaagaattcactcacttttagctaatttatcgtgaaaatccttttagaagggcaatttcaagagaaccacgaacttgatcaaacttcacgaggaagcttttggagaaagcttcaccaaaagcttgaatgtcttcgtgatattggctgagaatggagattctcctaatgtacaggcaagagaatttgggtttttcttctttttaacgctcgttgggcgttatactgcgagcaaaccccttgaaaactgctaatttggtaatgagaatagctgaaactcagcagtttaaaaagacattccctctttgatgaaacttttcgccagaaaagtttctatggcgccccggcggggatttgaaccccggacctcgaggtccgcagcctcgcgccctatccagactaggccaccggggcacgcccgctaaccctttctgaagactctttataaatttaaccttcggaacagaccgaaagatttataaacgagtccccaatgagtatcctacgggctggaactgcggtggtagtctagcctggctaggacagcggcctgccacgccgctggcccgggttcaaatcccggccaccgcaccacaatcttctgggctttccaagcattcaaagcttcttctcgtggcaatttatttcgtagcccttttggacacctaattaattcagtttccggccggtttaggcgctaaaaagggtctaaagagcgtgttctccagtttcaattttcctgcccagctcaaagagctccttagaagtttttctcatctcatcatcctttgacttcttagactcttctagcatttcaaaggccaagaacttgagaaccctggctatctttgagggggttcccctccacgaaagaacttcaagaatagctttctctttcgcgccatgtttttttgcgagctcgtaggctatcagcatcctgggaaggggatcgaaaaccttcttgatgtattcaagtgccctatcaacctcgtatccataatggtgtattagggcgtgcccaagagtatttgcgacttcaagctgggagaatatctcttcggccttttctgcattgcccctgtttagatactcaatgcccactctctcgagatatgcgctcctcacgggctcaggaagccctttggcaagtttttcggcctcttcaagtttcccttcattcaaaagcctgtttatgtagcttaatacgtattcattggtctgccctttctcctcgaactctggttctgggggcctccatttgggtctcttctcaaaacgctccactactcccgtctggacctctccctttatcctgtgcagggtggctccgggcatgagctttccgtccttgtagacgattccatgggggagtggcttcaactcctcaatgtccctctcatccagcttcaggtcgctgagccttatctccgtcccgccgcgtgcaaccgctattgccagaagattgctcaccgatctgaaggccttctttctaacgaactggtctttgataagcctcgccgcttctagggctttcttaaactccccctctcttgaaaaaaggtaggaaagggaggcgagggtctcgtccttgattgagtgctcttctatttcactcgctacctcaagggctttctcgggttcgtgtgcatagctctcggcaacccaccggagcgcgtaggagcgccagtaggagtccttaatcttccgggcttctttgagcgcctcttcccttcttccatccctcagcagggttttgataatgaatagcctctcgtccatttcaacccctcatgccagggtgccataccctctttccggccctctccttttcctcgtcccactccgcgagtatcttgacggcctcactcgcgaccaaagcagcctccttctcgcccgccttaccgaactcgtttgttaccctgttggcgaatactgcgcacacacagcccgccctgagcccgtagatgttggcgagcgtgtagagagtcgcggcctccatttcgaagttcgtcacgcgggcctgtctgaggtcgtcaacgaggttcctggcaaagcttgggaagtagccgttcagccctggcctaccctgtccgaggtagaagctgtcggttgaagccgttattcctatgtggtatctcactccaaggctttcggcggcctctatgagggcgagggtgacctcaaggtctgcaacggcaggatattcgacccttacgtactgttttgaagttccctcaagcctaacagcagctttcgctatgatgaggtctcctatctcaatcccgggctgtattgcacccgtggagccaacgcggatgaaggtgtccgcccctatcgccgcaagctcttcgatggctatagcggttgatggcccgcctatgcccgttgaggtaacgcttatcggcactcctttgtactttccggtgtgcgtcctgtactccctgtggaatgctatctccctcgcctcatcccagagcgagcttatcttgggtactctctctggatcgcccggaagaaggacgtagcgagcaacatcgcccggcttgcaggctatatggtactgcattccttcctcggtctgcggtctctctgcggaaacgaacttctcgaccatggcaaccacctttttaacttgatatcatttacttttcccaagacctaaaaaaggtgatggcatgctcaggtgttcaaggtgcggaaaaacctatcctgagaccttcatgctgaagtgcgactgcggcggaacgctctttgtggagagggagtacttcgacttcttcgggagcctcatgccctaccttgatgcaaggagatacatcaactttttgcccgttagcggtaaccttcttccaccgccagtacccgccataacgccaacggttgaacttcaggtcggccctgttactgctctcttcaagctcgactacctccagccaagcggctcgtttaaggacaggggcacgtgggtgactgtggcaaagctgatggaggagggggtaagtgaagtagtaatcgacagctcgggaaacgcggctttgagcttcgccctctactcacttcccgctagaatccgggttcacactttcgtctcctatgacgcaatgcccgcaaagatttccctactccagcggcttggggcggtgattcacttcgttgatggggacagaatggaagttcacaaagaggctatagagttcgcgaagagggagggtataacctacgtgacccactggctcaacccttacttcatcgaggggacgaagctcatcgcctacgagacctacgagcaggtgggagttccggactatgctttcgccccaacaggttctggaacgctcttcctcggtctctggaagggctttagagagcttagagagatgggggagataaacgaggccccccggcttgtagccgtccaggcagaaggttacgagagcctctgcgagcgctccgtaatgaaaaaccgcctcgccgacgggatagcaattcccgagcctccgcgaaaggaggacatgctcagggctctggaggagagtaacggcctctgcgtgagcgttggtgaggccgagacgagagaagcgcttgagtggctcatcaacgcgggcttccttgtagaaccgacatctgccgttgttcttgctgggatgtggaagctcgtggattcgggtgaaatacccgaaggttccaaagttctccttcccctatctggttcgggccttaaaataaccgaaggtatttaaactctcgagctaaaatccattgggggtgatggagatggtggtaaggtatcccgctgtagctggaagcttttatcccgctgacgaggagctagtcctcatgctggagaggttcttcagcgacctcggcgaggaggggaatgatagaaggataaccgcaggtgttgcgcctcacgcgggctacatattctccggctacacggcgagcagaacctataaggccatctttgaggacggtcttccggagacgttcgtgatcctcgggccgaaccacaccggcctcggctctccgatagcggttcaccctccgggcacttggataacgccgctcggcgagattgaggtcgacggcgagcttgccagggagatagcaaaaatctcaggcatagctgaccttgacgacctcgctcacaaatacgagcactccatcgaggttcaggttccgttcatacagtacctcgcggagaaggcaggaaaggaagtcaagatcgtcccgataacactcggtattcaggacgaagacgttgccgaagaccttgggagggccatcttcgaggcgagcagggagctaggaaaggacgtggtggtcatagcgagcactgacttcatgcactacggccagatctacggctacgtgcccttcagagcgagggcggacgagctcccccacaggataaaggagtgggacttcaggataataaggagaatcctcgacttcgacgtaagggggatgtttgaggagataagggagatgaaccacaccatgtgcgggcctggcggtgtagggactgcaatagtctactcccgcctcgctggtgcggtcgaggctgagcttctccactacacaacgagctttgaggtgagccgctcaacagaagcagttgtcgggtacgcgagcatagtcttcaggcgctagcgaaagtgtgataagcccttttccatattttctactatgaacctcgacgaggccgttgccagaatcctccagcttggtggagataaggtcaagtttataatcctctttggctcgagggcgaggggagacgctcgcaaagacagcgactacgacctctgcgtttattacgaagggaacgaaaaggaggccttcaggttcagggtgctcgttctgggaaaccttccggacaaatatgacgttcagatcttccagctccttcctctgcccctgaaaagggagtgcctcaaggggaagattctcttctgtcgcgacgagacttttctctacgacctcgcctatgaggttttgaaggagtgggaggacttcaagcgctattattacgactacctcggcctggaggcgatagaatgagggttgagctgatacgctcgaagatcgaggaaatactagaaagcctgaagctggttgaagagcacctgccagaggacttcgagaccttccagtcgctgggtctcataaaggacgggatttacaagcgcgttgagtttgctatacagaacgtcatcgatatctgcgcaatcataaactctgacctaaagctgggaatccctgagaaggaagaggacgtatttgaaggacttgttagaggagggatcatctccaaggggctggcccaaaagctgaggctcatgaagggctttagaaacgtcttggttcatagatacggcaggataaacgatgaacttgcctttgaggcacttcgcgagcatctagatgacatttatgagttcattgagactatagagaagtttttggagggtcaaaaatgagcgttaaaagggttcttgcctcggcaccggctaaaattatcctctttggagagcacagcgttgtttacggaaaacccgccatagcggctgccatagacctgaggacgtacgtcagcgccgagttcaacgatacgggagcgataaagatagaggcccatgacataaggactccaggcctgatagtttccttcaccgaggacagcatctacttcgagagcgactacggaaaggccgctgaagttctcggctacgtcaggcaggcgatagagctcgtaagggaagaagcggacgtaaacgggaagggcataaccgtctcgataacctcccagattcccgtcggcgctggtcttggaagctctgctgccgttgccgttgcgaccatcggggcggtctcaaggctcctcggcctcgagctgagcaacgaggaggttggaaagctcggccacaaggttgagctcctcgtccaaggcgcatcgagcggcatcgatccaacagtttccgccataggcggcttcatacactaccagaaggggaagttcgagcaccttcccttcatggagcttccactagtcgttggatacacaggttcgagcgggtccacgaaagagctcgttgcaatggtcaggaaaaactacgaggagatgccagagatattcgagccgatattgaactcaatgggcaggctcgttgagaaggccagggaagtcatcacctccgacctcgacagggaactgaagttccagacactcgggaagctaatgaacataaaccacggcctcctcgatgctcttggcgtctcgaccaagaagctcagcgagctggtttacgctgccagaaccgccggcgctcttggagcaaaaattaccggtgctggtggcggtggctgtatgtacgccctcgcccctgggaagcagagcgaggtggcaacggccataaccatagccggcggaacgccgatgataacgaagataagcagggagggcatgaggattgaggaggtggaagagtgatactcatcaagatcggcggtagcgtcttcagtgataagaggggggagccagaaaacttcaggacggacgtcgttgaggaaattgcaagagagctggctgagttctatcccgatgaaaaattcgttatagtccatgggggaggcagctttggacaccactatgctaaagagtactccataagagaggggctttccgggagctgggggattgacagctggaggagactcggcttttcactaactcatcagtcaatgcttagggccaattccaagttcgttgagatatttactgaccacaaccttccagggttttcaatatccacttcctccctgttcataacggaaagaggggagatactctacgccgacatagaggtcattgagaagctccttgagctggatttcattccaatcctcttcggtgatgtttccgttgatgtcgcccagggaatagacatcctctcaggcgaccagataatggcgtacctcacgaaaatgctcaagccgaagaaggcgatattcctcatggacgttgacggcatctacgacggaaaacctggcgaggggactctcattccggaacttgcccgcgaggaagttcctgccctccttgaaaggcttcattgcaccgccgccgggacagacgttaccggggggatatgcaacaagctgaggaaagcctacgagatggcccactactctgaagtctggttcgtgaacggtaaagttcctggcaggctgagcggggctattaggggggacggcttcggaacgaggctgaggtgaggggtatgttcgccgaagtcctcaccatcggcgatgagcttttgaccggccacaccgtcgacagcaactctgccttcatagcctcgaagctgaccgagcagggctactgggtgaggaggataacgacggtcggagacgacgttgaggagataaaggccgtcgttggggagatacttgcaaggaagcctgaggttctcgtcatcagcggcggccttggtccgactcacgacgacgttacaatgttggccgtcgctgaagctttgggcaggaagctcgtcctctgcgagaagtgccttgagaggataaaggccttctacgagaagctctacagcgaaggctacatagacgacccgagtctgaacgaggggcggaagaagatggcctatttgccagagggggcggagccgcttgagaacactgggggagccgcgcccggagctttcatcgagcataagggtgtgaagatattcgtccttccaggtatgccaagggaaatgaaggccatgcttgagaaggaagtccttccaagacttggaagaaggaagttccttcagagaaagtttctggcagagataaccgacgagagcaagctggctcccattctcagggaggcgcttgagaggttcaatgtcagaattcactcctctcccaaaggctttgggaagtacatagggctgataatttttgccgaggacgaaggagaactggagaaaaccgttgagtacctcgaaagcaggggaataaggctggaagaggcctgaccttcacttccttcttttcttgaaatccctttcattggaaagactattaaccatttctgtccacttgcgttggtgatcccgatgaaatggataggtctcatcggcggaacaacccctgaatcaaccgagtactactaccgcaaatacatcgaaatatcgagggagctcttcgagccctacttcttcccggagctggttgttttctcgatgaacttcaagaccttcaaggacaacccgcgcggctgggaagggaggaaggagatgctcatcgaagcggctaaggcccttgagagggccggagcggaggtaatcggcatcgccgcgaacacgccgcacatagtcttcccggacgttcaggaggccgtgaacgctgaaatggtcagcataatagatgcagttgcggaggaggcaaggagacgcggccttaaaaagctcctcttgctcggaacaaagaccacgatggaaatgccgttttacagggaggctctcgaaaagaagggcttccaggttgtagttccagacgaggaagagcgcgagagggtaaactcgataatattcaacgagctggccctgggcaagcttgagagcaagccgtacctcgttgagctgattgaaaagtacgcccgggaaggcgttgagggtgtaatcttgggctgtactgagctcccgctggcaataaagcccggcgacgtcggcatagaagtcctcgacagcgcagagattcacatgagggcgctcatcgagaaggcgatggagtgagcggaaacttctttaacttcttttcctctattccttcggtggttgtaatgggggagtttgatagggaggaactcacgatcatcaggaagttcgagcacatagagcactgcctcaagaggaacgtccaggcgcatgtcaccaacggttttgaggatgtccacttcgtccacatgagcctgcccgagattgacaaggatgaaatcgacctgagcgtcgagtttcttgggaggaagttcgactatccgattttcatcgctggaatgaccggcggaacgaagggttcacagctcgcggggaggattaacaaaacccttgccaaagccgcccaggagctcaacattccgatgggcgttggcagtcagagggccatgataaggaagcccgagacctgggagagctactacgttagggacgttgctcccgatgtgtttctcgttggaaacctcggtgctcctcagttctccgagacaatcagggagcgctacggccttgaggaggcgcttaaggccgttgagacgatccaagccgatgccttggccatccacatgaacccgctccaggagagcgtccagcccgagggggacacacagtacaggggcgttttgaaggctttagcagagctgaaggccgagtttccgtatccgataatcgcgaaggagaccggggcaggggtctccatggaggtcgcggtgaggcttgagagcataggtatcgacgccatcgacgtgggtggcctcggcgggacgagctggagcggtgtggagtactatcgtgcgaaagatgagatcggaaaggacttagcccttcgcttctgggactggggcataaagaccgccatcagcgttgcggaagttaggtacgccacagaactcccgataatagccacaggcgggatgagggacggcatagcgatggcgaaggctttagcgatgggagccaccttcgcgggtgttgctctgccactcctcaagccggccgtcaagggcgatgttgagggcgtgataaaaatcctcaggcgttacatagaggagataagaaacgccatgttcctcgtcggggccagaaatgtcgaggagctgagaaaggttccgctcgtaataacgggcttcacaagggagtggctggagcagaggattgacctgccctcttacttgaggaacaggggcatctgatttccgtcctttgcgctttccctctttcttctcgtacttctttcaaatgcacacctttttaaacccatgacaacaactatgagcaacgcagccccacgcctcgagaggggcctggggcaggaggaggattaggcatgattagagtttacacaatcagcggctacgaggaagtcggtaagaacatgaccgccgtcggctattctgacggcaggaaagaggaagtcgttataattgacatgggcataaggctcgaccgcgttctcatccacgaggatgtcaacattcagcagttcccgaccaaggaactccagaggctcggcgcaatacccgatgattcaattctgagaaacaagaaggtcgtggcgataacgttcacccacggccacctcgaccacattggagcggtcgggaaaatagcacctcactacccggacgttccgatatacgggactccttacacgataaagctggccaagagcgaggtcaagagcgagcagtacttcgaggtcaagaacccgatgtacgaaacggaattcggcgagatagtccaggtgagcgagaacctggcgatagagttcgtacggataactcactcgatacctcaggcggcgatggtggttgtccacactcccgagggtgcggtcgtccacaccggcgacttcaagttcgacaacaacaacccgctcggtgagaggcctgactacaaacgcctaaaggagctcggcaaggagggcgtcaaggttctcatagccgaatcaacccgcgtcgcagagccgactaagacaccgagcgaggccgttgcccagatgctcttggaagacttcttcctctacgagggtatggacgagaagggtctcatagcgaccacctttgccagccatatagcccgtctccaggagcttatctggatagccaacaagatgggcaggcaggccgtcttcgttggcaggtctctggcgaagtacaccggaatagccaaacagctcggcctgataaagatgaagggagcgagggcagtcagaagcccgaatgccataaagaaagtcctcgctgaagtctctggagcgagggagaactacctcctcgttgttacgggccatcagggtgaaccgggggcagtattgaccaggatggccaacggtgagctctacgacataggaaagcaggatacggtcgttttctccgctggaacgataccgaaccccctcaacagggcccagcgctacatcctggagacaaaactcaagatgaagggcgtcaggatgataaaagatctccacgtctccggccacgcgagcagggaagaccaccgctacctcctcaggatgctcaaccctgagaacatcgttccggcccacggcgagttcaggatgctcacccattacgccgagcttgccgaggaagagggctacctgatcggcagagatgtcttcgtgtcgaggaacggatacacggttgagattgagtgagggtaaaactgataaaggataccttctctcttttttcagcttcactttcattgctcacggggtggtatcatgggaaagtacgatgagctgtttgcaaggattaaggagaaggcgaaggacgttgatagggtcattctcgaacttgttcccgaaaaggagcctcttgagctttataaagctgctagacactaccctcttgcaggtggaaagcgcgttaggcccttcgtcgtcctccgcgcggccgaggcagttggcggcgacccggagaaggccctctatccggcggcttccgttgagttcatccacaactactccctcgttcacgacgatataatggacatggacgagctcaggcgcggcaggccgaccgtccacaagctctggggagtgaacatggcaatcctcgccggcgatctgctcttcagcaaggctttcgaggcgatagccaaagcggaagtcccagccgagaagaaggcgagaatcctggatgttctcgtcaggacttccaaccttctctgtgaaggccaggccctcgacatagagttcgagacgaaggaagaggtcaccgtagaggagtacctcaagatgataagcggcaagaccggcgcgctcttccagggctcggcagagataggtgcaatagtgggcacggaggacgaggagtacatcggggccctctcaaagtggggcatgaacgtcggaatagccttccagatatgggacgacgtcctcgatctgattgccgacgaggagaagctcggaaagcccgttggaagcgacataaggaagggtaagaagacgctcatagtgagccacttctttgagcacgcgagcgaggaggacaaggccgagttcctgaaagtcttcggcaagtatgctggcgatgctaagggcgatgcgctgatacacgacgagaacgtcaaggaggaggtcgcgaaggccatcgaactcctcaagaagtacggcagcatagactacgcggcaaactatgccaagaacctcatcagggaagcgaacgaggccctcaaggttctccctgagagcgaagccaggagagaccttgagcttctcgcggagttcctcgtcgagagggagttctgaggcctctttctctcactcacttgttggtcaaaatctttttaactttccatcgttagtttgtgctggaatggcgatgggggaggacgtttcgggaggagaatttgacatcttcaagtactacaacgacgtcataatcctatccctgcttctgctcataggctctgccctaacagcaccctggcttgaagtgtcgtttcgttcatactgggataccctttactaccttgctcttccgctcgtccttaccgtccttcttcacgaggggtttcacgcccttgtggcaaagctctgcggcgctgacgtcggctttgggatctcagccaagtatggaatggttacgccttacatcagctttaggactcccttgacagttaagaaagcgagatacgtgatagtggctcctattttaatttccattgctgccttcttagtctcgtggcttactcgctctcccttctgggcactcctatacatcttcaacaccgctggaatggcgggggactttttgatactcctcgtgctctcaaagatgccgtctgaagcccctgtgtgggacgaaggcacagttatgaagtcggaaattgaatttcctgaaccttatccgatctgggtctccaaaggattagttctgctccttgttttggttatcctggttattgcggcaaacttcagggtggaggttgaggtagtctatgtctcaaaccagaccaacccttaaatatcatttcgacgtctatcttaacggtggtttcgatggacgttctcgaactcctctcaagccttgtgtcctttgagactgtgaacgacccggccagggggataaggccttccagggattgcccggccttcataagggatacgctcgcatcgtgggggatagagagcgagctgatcgagcgcgacggctactacgcggtctacggtgagattggggaaggaaagccgaagctcctttttatggcccacttcgacgtcgtgcccgtaaacagggaggagtgggagaccgatcccttcaagctcacagtaaaaggagaccgcgcctacggaaggggcagtgccgacgacaagggcaacgttgcctcaataatgctcgcactgaaggagctctcgaaggagaagctcgatggaaaggttctctttgctttcacgggcgatgaggaaatcggtggcaggatggcgatgcacatagctgaaaggcttgctcaagagggaaaacttcccgagtacatggtgaacgccgacgggattggaatgaagccgataatcagaaggaggaagggctttggagttaccgtgcgcgtcccctcggagaaaacaatggttaagggcactattaagcgtgagatcttcaggataaggacgcccgtgctggagacgaggcacgccgcctacttcctccccggcgttgatacacaccctctcatagcggcctcgcacttcctccggagcagagaggctttcgccgtttcgctcgaaggaaagttcctcaagggcaacgtcgtgccgggtgaagtgacccttacgtacgttgttcccggcgagggtgaggaagtcgaggttgacgtcggcctcacgaggctcctcaaggcggtggtgcccttcgtgagggctccgataaaagcggagaagtacagcgactacggcgtctcgatcacgcccaatctgtattccatcaaagacgggaagcacatcctcaaatttgacgtgagggcgatgagccgcttgaaggacgagattgagcaggcgatgagggaagtggcggagttcaaccttccgaaggcggagatagaggttgccaccaatgaaaaggcgggctacctcttcacccacccggaggaaaagatcgtcagagtgactctggaagtccttgaggagctcggcgagaaggcggaaccggtggaggggcctggagcggcagactcaaggttcttcacgccctacggggtgaaggcgatagactttggcccgaggggaggcaacatccacggcccgaacgagtacgttgagatagactcgctccgcaagatgccggcgctctacgctgagctggcgaggaggctggtgagggagtagtcagcgcccttcctccccaacttcattgaaatcctcgaggtcaaagacgaggtagcctttctctctgaggctctcttttccttctatcctcttcccgatcagtccgaagtaattccctggtattcccgtgagctccgcttttctttcaaggtctttcaggattcccctcgcttccctttcgctcaagttcttccacttggcctcgaaaaagcccgcttcccctgtgatgctgttgagggcaaccaagtcgatctcctcccccttgtgccaccaccttccgagcttcgtaaacctgaagggcagctttccgagacggttcatcctgatcaggaactgtccggcaacgctctcgaagacctcgccgaggtagcggttgaagtcgctctggaagtcctcgaagcttattgctccgatctctatgtcatcgcggtaggggtagacaaagcggagccagaagcggtggtaaaagtctttcaccctgtaaacaccgcgcccgcgctttctctggtttatcgggtactccttctttacgaggtcgagggtctcaagaactttgaggtacttcgggaggttcgtcacagcgaccctcgtctcattagctatctccgtgagcttcgcctttccgtcgtttatggccttcaggatgttgaggtacgtagtcggctccctcagctcgtctttcagcaacctctcggcgtcttcatagaggacactcacccggttgtagaagttgttctcgatgtttttctccactgaaagagagtcatcgaagtactggaagtaagctggaattccgtctatagttccatagaccttaacgagctcctcccagctgtagcgcgggaaagcctccttcaggtggaagaattcaaggggacggagctttatctgaccagtcctcctgccgtagagcgggttcttgtaactcataaggctctccatcgtcgagatcgaagaaccgagcagaacgagaaaaacctttgagtccttcagcacctcatcccagatgtactggaatgttgagggaatccccttatcttcctcaacccagtaagggaactcgtctattacgaaggctatctttccgaactcttttactctctcaaagaactcctcaaggttctcagcctcgatgaagacgttgaacttcctgttgaaggcccttacgagcctatccagctcaagctccatcggctcttttttagctaggaagtagaaggccttctttccatttatgaactgcttcacaagctcggtctttcccacccttctcctgccgtagatgaggacgaggtgagccttgtcctgggcgtaaagctcctcaagtgcccggagctcctcttcccgatcgatgaattttaatatcatggtatttaatatcgcgttattaattttaagggtttcggttgacctcgctttcggcaatcagccatcccacgggtggatgttcggctccgttcttccacttttcataggccctatcccagcgctccaggagttcagtgcgctttttctcgtcttttatctgcgatacgtactcccgcggtatgtatgcgaggtagtgcggcaggttgggctcgaaggttccgctctcaacgatccgtcctccggcgcgctccacaaactcctccagcttttccagcgggaagtagtgcaggtcgtccttctcaccgaacaaagcctcgaatatctcctgcctcaggttgtacagctcaaggtgtgccctctggcgctcgttgtttgctattgggaggctctcggctatgaaaactctatcagaaacgcggagcatctcagatatgacctttacgatggtttcttcgtttttcagacttctgatgccgtggacgagaactgccaggtcaaacgctttgaatggaaagggcagctctctcgcgtcgagtttcatggggattatcctgtgtttcagtccagcaacggatgttatttcctcgaagaagtgccagcgggctttatccacggcaactaccctaccggtctcatcaacgaggtaagcgagcggaactgttgttatcgcgtgagcaccacagccgatttcgaggacgttcatgccttctcttaggggcgcgaacctgaggacacggaatcgttcgagcatttcaatatgcaaccagttgggaggcaaaggtggctcgttccggggtgggattttggaaaggatctcttctctaaacttttcttcgttggcaggcatggagaacaccaaagagagctaaagaacctctgtttaaagcgtttttgggaaaatgttttataaggcggtgttgaattaatggcagggagaaattttggagtttcagggtttctcccaaaaggcttgatttaataagtctctacggctcacttacatccccatgcaacactttttactcacggcttattttcccagagaagtcggaattttagaagtattaataaaattactattggcatagtcattttaaaaactttgaatagtaaagtttataaatgtgtctgtcgcaaaatatagtgcaaacaactgtaagaggtgcaagcatgaagtggaaacccttgttcgcagtcctgctggggctacttgtggttggcagcgtagtacttgccgaggttcgagggtatgaagaggttggagtttctccatcgcctcaaaaggagccctcattgccattgccagtcccaggggataatgttgcattgaaaactttttccggaaaatccagtacacaaatggctgaacagtttttgcagaaatattgggatagactaacacttaggataaaccttgaagagttcagtaatgctactttcgttggtattgccctgagaagacttccctcaggagcgtatgccccattgtattacctcgggtacgatgttaaggcctcggatgttgaagtcatgacgaaaagcttctacattgaggccagaaagttcggaaagctccctctcaaagttagaggtgcgctcgcagatgaacccccaagagagtggacgtcaataggccggattagcacggtgactacatcagaggaaataacaaccagagaggggcacaaagttcatgtgtacaacaagcttggtgctgatttttgggtagccgaagcaagaatgggatattattactacgtctacatgagccatgaggcaaaagtgcccagtgagagagatttccctaagaatttccgagtggcagttaaggaggtcagagaaagggcaacgatccttaatccctcacctgaacaagcctactttggcgtggggagtttcaggccagaaggcagtggttcttcatcagagccaaccgtcacttggggcttaaatatagggatcgacgctaagggccttccaagtgcagcagcaggcttcagtgagacttacactaaggggctcattttcaaatggtacacggacgacatcgatgccaaccgcgatattgaatttcagttttatgacctgaagaaaaaagggttactgagcagctctcccgcgtggggcaaaatattcgtggcacaccctgttgttgtcccattcgttaaaaagggaacaccattccacatgatagagcttaagctaaggggtgaagcagagttcgtttatgaagaggatgttatcatctgcttgggctacaattgttgggtttcccacccaaggcacaccgtccaagcacctccaattgaattcacagtggaaatgtacccatggttcataaacaggaggtgatattgctttagttattcatttcaacaggctactgtgtacactcaaagaataaaaaggtgggagacggtggaaaggtacttatctgaagtcctatttaccttttttgaagatatgcttctcatttattttttaggagtgatagcaggtccagtaatctattctttgataagtcctctagcgtggattaaagggaactccctagagctcgcattctccattgctattgcattgtggggagtctcaatatttcagcgtggaactctgtcggtccttaacggcaaattaccaagattcactgccctgattctcgttgttataatcccaattatgtttattctcggctattggccagttgcaagccttctagtgggattcttaggaggctacacagagtaccaaaacaaagaatcgggagtacagggaactgtttcagggagttgaccaaacttagaaaaaaaagaagagaaaccccctcactccacaaacaccgcgggcttcagcggcatggcctgcttcttctttccgcccctgtcctcctccgggttgatgattatctcgatgccgagctccttctcgatgaagtccttcgcttccctaagggccttttcttcgtctatgcgcttcacctcgaaggccctttcctttatgagcctctgtatgagcttgctaacttccttgccgtgcttcctcatctcagggtccttcatcagctctgccatcgccgccttgaagtccctcttttcagcaactacctcaacgaccctccacttccactctggagcggtgtatatgtatgccctcttcgggttctctatctttgcgactgttatgatctccttgatgtcctctatgagggacttgacaaagtcttcctcggcctcaaccgtctcgttccaccactccggaaccggctcgggccagggagcgaggctgacgaagccctctccgccgagcttctcccagagctcctcgctgatgtgaggcgtgaacggggccatcagcctgacccagacgtcggcgagcgttctcaggacatagcgctttgcatcgtcgtcccttccctccgttctcctcaggtaccagcggaggtcgttgaggacggtgtagaacgcccactgcacagcggttctcgttctaaactcctcaagggctttggttgctccttcaatggccttgttcaggcggtggagcatccacctgtctatgtccttcagctcgacgccttccttggcctcgtacgtggcgaactcgctcaccagctcgtagaacctctcgacctgcttcctcagcttgcccacttccttcctcctccagtcgaagtcgctgtcgtgctcggccaggcccattatgtagagcctcacaacgtcggcgccgttctcctcgattgcgtcaatgaagttcagcacgttgcccttgctcttgctcatcttctggccttccagcgttccgaagccgtttaccgctattcccttgggccagtgctttttatcaaagatggccacgtggttgaagatgaagaacgtcaggtggttcgggattaggtctttggccgaacagcgccagtcgagcgggtaccagtactcgaactcttccttcatctcgtggatggtctccgccggaatccccgtcttctcgctcagtttcctctccttctcctcgctgaagggctcgcggaagatgtagtcgaagaactccctgtcgagcttctcggcgtcgagtttaccttccttcctcagctggttgatgtgtctgcttatggtgtagtaggccatgtagatcgtcgagtcgctaaggctctcgataacccagtccgggtcccacgggagcggtgttccaaggccaaccttcctggcacaggccttcttgtccagccagtctataactgcttcaaactgcgccctcctgctctcggggtagatggtcatattagcaagtgcttccctcgccttggccttccactctgggtttccgtagtctatgaaccactggtcgtggattatcttgatgacggcctggtttccgaagcggcttatgacaggtttgtcggcgaactcgtacattatctcggcgatgcccttctccatcatttccttggcaacaagctccttgacctcttgcacgggttttccggcgtagggctctatcttgaagattcccttgtggtactcggccttgtagatgttcttggtcgcctgctccagcttctccttgtccttctggctcttgactccgagcctctcggcctcttcaacagccgggaactcgccgtagccctctaggcttatcagcgagatgtagcttatctcctccacgacgcgcgggtcgatgtcgtacttgagcagtatctcggtctccttcttcaggtcttcgagggctatgtggtcgaagggtgcgtgggctgggacactcatgacgacgcccgtggcgttgtcagggtcaacgaactcggctggcaagattataacctcgtcacccgtcaccggattcttgacgtactttccgatgagcttctcgcccttgaactcctcgatgacctctatctccctgtcctggaaggagagcttgtaagctgcttccttgctgacgatccagagttcctccctgtcgcccttcctcacctttgccttcacgtaggttgcctctgggttcagccacatattagtgactccatagactgtctcgggcctcagggtcgcggctggcaggtagatggtctcgccgttctcctcaaggatgaacttgattatgacgtattcgagtatctggacgtcctcaccctccattatgtcgtggtcaccgaggggagtgcccacgacaggatcccacctgaccctgtgggcgcccttgacgaccagccccatgtccttgagcgtccagaactgccactctatgaacttgctgaagggcgggaagaggctggttgtgtggaactccctcgtccagtcaacggagaagccggcccttatgaatgtctccttcgcggccttcatgaagtacttgactatctccttcgggtcttcgaacttccacagtatctcttcgggaaccttgtaaacgtcgcggtagatgtggattgtcttggggtcgcggttctttatcctctcggcgataccgactatcggcgcgcctgtgatgtgccagcccatcgggaacagcacgttgtagccctgcatcctcttgaagcgggctataacatcgggtattgtgtacgtcctcgcgtggccgacgtgaaggtggcccgagaggtatgggaacgcaaccgttatgtagaacttcttctccttgggctttgccttcctgtccggctcaaaaaccctcgcttccatccagcgcttctgccacttctcctcgatggccttaaagttaagctcagccatggctatacctcctcaaaagtttttcaaaagagcgcgcgattcagagtccagaataggggggccatttaggtaatcagagcgaaacgcccgctgaacggtggagaaggtactcccccctcatcggcatcggagcgagtagcagttttgggtatttaagttttttggaaaagtgacatcgagagtaaaaagataaagtcagaggtgcctgacgacggagtcaatgtagtcctgagttttgttaaggtttctgagaacgatcctagcctcttcagtactcagtccataaagtttgaagacgagagcgtcgaggtatgcctcgttctctctaacgagctccagaaatgaagttaggtgcttcacaccggccctttgcttaacggttttaacgatcctccttgtttcctcgggatcatttcctatggtgaggactcttgttttgttcaggatgtccttgaggtttttgaccctctgcctcgattcgaggagttcgagcatcgaaagataaacgtgttcgagtatctcctcgtccccctcaagctcgagaatgggcgtgagcatgtcccactcccttccgaagagccttagagttccgtccttcagctcaagctcaaagccttcgtattccatttcttcattcgagatgagtctcacatccgtgaagaagagcttttcaggcgggagctttccgacgcccttcttccagccttcgatgagctttcctagtgtggttcccttgttagccagctttttgctccactccctccacagggattttactacgtagtgctttttaaggagggcgattatctcctcgacggtgtcctctatttcctccttgagggttttttcctcatcggttgaggggagtttgattggaaggtcttttattgatgcccttccataagagtagaatccaccctcgaactcgcttcctatttgctttacacgccagtcaaggagtgaactgttaagaagcgctccaatgaactgcagggaaatcctatctttgtaatcgtcctttatcaggacaccatagcctcctgcggttccgccaccgacaaagtaatagtctccgtttttgtcaagtgcaaagcgaggttcacttgaaagaacgcccgttattaattttggaagttcaaacttttcgtgattcttctcataaacatagctgtaccattttggagaacctttaaggctacctcgctctctcccttcaagcttttttctaacctctgaaatgtttaaatactcccagatccttggatatttgctcgcaagctcctcgataggtattagctctgcttttctttcaccgtttaccagatgtactttgtacgggaacaggatgagataacgatattctgggatcatccagcgtcttatttcctctcctttcaggagaggatggagtagatctttttcaagcctgtgttcttggttcgtaatctttgagtggactatgtagtagttaccactctccccaacgtattcgagaatgtaaactgggtcagcacttgtttgaagccccacaaagatatcggtaacctctcccagcctcttgcttccattgtagatcttttccacgatcttcttctcctcctcggtcaaaaacacccagggcttttcggaaagctccttggtgggaactttgatgacgctcaacctttccgagttccacttgtccggctcattcacggccctgagctggtcaacggtttccttcagctcctccaccttggcataggttagcttatcgttcctctccttcctcagaacaagtatcatggtgtacgtcgttgctcccttgaagacctgttcatcgccgaagtcaatgattaacctgacggctctctcccttgacaaaagtcccctgagtttttcaccgtaatctattttcatccacttcttggtgactatgaagccaagctctccgccttccctaagcaggttgtagcccctctcaatgaatggaattgccaaatcgtagttcttgtgtgcgctctcgtagaacctgttcaagaactccacgtactcagggctctccttcttgaggttctgtatcctgacgtagggcgggttgccgactatgaagtcaaaacctcctctaagcgagccatccggattgaagaaggccatgaagaactccaacgggtggtgaataaatctgttgttcagggcttcggccttctctccaagcttctccctcaacagctcccgatacctttcatcgagttctcctctgagggtttcctttatctctttgatctcgttaagaacctccaggtcttcggggttctcgatgaacttctcccacagctccataagctttcttacttcttccctgccctccaaaatcttggggtcagcaaagccgagtagcgagtccccgctcacgagattcaggctcaggtttggaaggacgtgctcattttctcctaggttatcccagcggaaggccttggggttgagctttatgagctctctccagaggttcatcttggccacttcaacggcgttctcgtcgagatcaaccgcaaagacgtgcctcagaaccatctgggacattagaatcctctcatcactcgggaagagctctctcatttttgctatgccctctatgatgtcctttctctggacgagggcggagagatctgaggtcttcttgccgatcagttcttcttcctttttcttcagctcgtcaataaccgccgaatatgtatcccagagccccctgagaactttgatgaggaacgagcctgaacccgaggcgagatctgctactttaatctcaaaaagctctttgctgagcctttccgcagtctcaaagtcgttctcccgtattgcggttgttattccttccttaagctcgtttagtcttttcccaagggtttcctcgactatgaactgggtaacgtacttgggggtgtagtagattcccttctccttcctcttttcagccaggtatgtctcataagctcttccaaggatgtcctcgtctatctggctgtagtcgtactgggttatgcccatcttaagaccggtctcctgccacggggcgaatccaaggacggtctctaaggccttgtaaaagcgtgcccagttctcgggttcatcttttataaactcaatcagtctgtctgagaaaagctctgtgtcatacaatgggtaaaagaagtcgtttatctccccgaggaacttctctatgaaggacttgtaatgcctccccgctacttcgggcttctctttatgtctctccgccagccgaattctgtcggagaagcccatccacttcttatagagccagttgaactcaacgaccccataatcgtcgagagtctgaatgaatatgaatttgttaatgagatgcaaaatcaggtgcatcttgattctctcgtctgttttgaactcaacatcctcgagggtctttatccactcacgtaggctcttgaaaaatctgttgtcaagctcccctttttgtattccgtgttccttcctctcaagaagatcgtagaggctcccatactgctctatgtcatggacgaggtcaataaaagtagcgtagtaaaacggttcggattttcttattatcgttttggagctgaagaagtaccactcgtagagattcgtcaacacgacaaatctggactcttcagaaaaaacatatttctttatttgctcctcatgctctttccagtttaagtcagttctcagaagcttgttccttctaagttcgaagagacgtttgaattcgacgatgattttcctaccgagggaatccctcaacaccagatccacgtagcctgaacctatccttacttctggggagcctctaactccgagaagcttcattatcggggctcccttgtagaagaagttctgcctcaggctttcttcgggcttggccctctcaactatcgcatccaggtactcaaccatgtcccgagttttaagttctctttttacttcgttaagcgagtcaagagggatagaactcatttccacgagcttttctaaatctgatgtgagcaatttaatctcatccacagttcttcaccagaaatactgaaaagcaaggggatataagttttgctggacagacatactgggggctttaacttcccctgaattgaataaagagaataaagaatatcaggcgtgcttaactatgaagctctcaacgtcttcgagcaggtcgagggctatgagcaggtgggccttggcctcggctttctttccgcgcttgaggagctccgcgctgaggcgaacctcctgggctgctgtcttgagcttgagctgggcggtcctggtgtcaactccctttctgtggggctcagcgagtgcccttgcgtcctttccaatgcgctcgttgagctctccgatgagcttggccatgttctttatcttttccttgacttcaacttcgtggatcttcctcttggtcagttcaatggccttgtggaactttcctattgtctccttgttggcggttataacgtcgagcgcttccgtgtagttgccctggtcggccaactccttgacttgctcgtagactgcctggaactcttccagcatctcctggagctcagtaacgtttctaccgctagcatttgccttctctatgactctctgggcgaacttcattgcgttctccccccttctgaggaaagcgtttactattttgtcagcgtttgcgtaggcgagctccttccttatctccaccagtttctcatcgagccccttcttgagctcccttgctaccgctaggtcttccttggctttctcaatgtctttgttctttatgtcttccatgacctgcctgtaggcttcctttgtctgattaaggagctggggtgcgtctccaacgtctatcccttcttcctgggcctttctgatggtcttctcagcagccatgaaatagccctgcatcctcctgagctcctcctggagcctctccccgacatcgtttctcacgttcttgaccttctcgaggataaccttgtagtgcctcatggcaaggatgccgtttgctattgcaccctcgtagtttccattctggtagtcctggatggcagcctcacggtactcctctgccttctggtagtgctcgaagaccgttgagttctcgctgacgtttgccttctcaattatcgttgatgttacattgtggagcctctcaagggcggagactatgtgttctgctacaacctgcgtctcggtggtactgttgtcctgaatctccggcggcagtggggccgtcccggcctcgtctgcaagtgccatccctgccgggactatgcttcccagcaggaggcctattatcaaccataccttcagccacctcatggccgtcacctcgatagtgtgtagtactgaactcctattttagggacacggtgaaaaagcccctgaaacgcacgtttcaaatgtttaagaatggttttgagctttgttgggctaaagacattaaaaaacaagtagtttaattaaatggaacgctgaggaccgagctggaacagaaatttggatgggtttgattgttctctactgcccttttggttggccaaaccaatcttattgggacattcgcctatggttcagaaggtggcaataatcagtcaaatacgctgaacagtcaaacttagggggctgtgtgggctatctactggcctaaaattcaatatgaaagcgacaaaacgtttttatacgccctgaaaaaagttgaggtgatagcaaacagtgttccaaaggagggaagcggcaatggagggtgatggaaatggcagtagtccgcgcttggatatcagaggagttcagggagttcataagggaagtaatgctcgcttcgtttccagcgctcctgctgtgcctcctgctggacttcttcgcgggagcttttctaggtaagttcttcgacaagattatgaacgaataccccataatcctcgttattcttcccggcctcatggggctcaggggaaacatctacggctcgcttgcctcccgcttcactacaatgctccatcttggtgaaatgacacctacaatcaaagacagaaacgtcacgaaaaacgtttttatctcaatcatcctctctctcgtcccagttctgatactctggagcataggtgcgattaaaataaggagcctcgagatagcgattgccgttctgctcataatcatagcctcgactgtttttgccggcatagtgctcggctacataacggccctcgcaacgataatccccttcaaacatgagattgaccctgatgccgtagcggcccccatagtcacttccgccgccgacctgataaccgttcccctcctcgtcagctttatgctcctctatgaaaaattttcagttgagttctacgccctcttcgcggcggggctggttctcctcggactgctcgccaagttctcaaagatagagaaaagcgataggagagtgctcgcagaagtacttggggttgtgggtgccctagcactcctgtctagcgtctcaggaggcctccttgagacttacagcgggctgatctacgcctcggtgatattcagcgtcatgtatcctgccgtcctggccacaaccggcaacctgggcgcgataatcggtacaaaaacatccacaaggatccacctcggagagctggaaggcttcctcaacagaaagattctggttgagatcctcgtttacagcgctgtgggtgcgctgctgggtttgctggccaacatcatagccatcctcgttgtgaaggtgacccttggagccagagtgggtctggtaaagcctttcctggttctctatccgatcctcatcttcggcgtgatgtggatggcctacttcatggcaataatctttgacaggaccggcctcgacccggacaacgccaccgtgcccacgataacgaccatagccgacataatctccaccctctttatcgttgccgttgcccacatgatcgtctagccccgaaaaagattaaagaggtggggcctaagaagggcaggaggagaaaaagaatggaggactttgaggagtttgagtatcggcccaagagcgtgaaggagatattcatcgagatgaagaacatcgtcgagctcatggttgacctcgcctacagtgccgtgctcttcaacgacaaggagattgccgaagaggtgctggacctggaggagaggatggatctccttaactaccacctcatgacccacgccgttcttgccgctaggaatcccaaagaggcagaacagataacttcagttctccagatggcaaactccatagaggacatctccaacgccgcaggggatctcgccaagatggtgcttgagggccttgagcttcaccccgttatcacggaggcaatactcgagagtgaggagataatagcgaagatccaggtaaagcctgactccgtcctcgtgggcaggactctgggagagctggccctggcaagcaatactggggtctggataatagcggtgagaaggggcaagagatggataatagcccctgacggcgacttcaagataaagcccggagacgttttgatcggcaggggcactcacacctccgttgagcacctgaaggagatagccaggggagtcataagggtggtaggcgatgaaagagcttgaggaaatacggaactgcctcatcgagatgaagaacctttcatcactcatggtcgacctcgcgttttcggccgtcatgtacgacagcgaggacatagctgacgaggtctacatccttgaggaaaagatggacgagctgacactgagggtcaaaaagctcgcccttagagctgcgaagcacgaagaaaatcctgaaaaactactcagcgtcatagagatggcgaccataaacgagcagataagtgattcggcctacgagatcgccgacctcgttcttagggacgtggagcctcaccccatcatcaggaagataatgcacgacgtcgatgaggaaataggccggataaaggttaacaaaggttcaatactcataggaaagcccctcaagcagcttaagctcccgaccaaggtcggagtcaggctcatcgccatcaagaggggcggaaggtacatatacaacccttcaaaggatgagaccatcgaggagggggacgtgctcatagccgttggctctggtattgacagactcagagagctgtccaatgaaagaggtgaagaaggagagcagatagaggaggaatagtctctcagcgcctttgattctgctctatttttggcctttttgaaaataactgtaggggtaacttcagaggatcaccagctccctgtccgctctggtcagtctctttcctctgccgttgatgacagcgacgtcgtcctcaattctgactcctccgaggcctggaaggtatatcccgggttctattgtgaaggtcatgccgtttttaaggacgacttccccatccggtcctatgtatggttcctcatgaacgtcaagaccgaggccgtgcccggttctgtgggtgaagtactccccatagccggcttttgatatcgtctccctcgcggctctgtcaacttcttttgcctttatcccttctctgacgctctggaaggcgtcttcctgcgcttctttcactatcctgtatatctcgaggagtttttcatcgggctttccgatggctactgtcctagttatgtccgagcagtagcccttccatctcgctccgtagtcgaggatcaccatgtcccctttgcgtatcttcctgttgcccggctcgtggtgggggttcgccccgttctcaccgctcgccactatcggctggaaggagattccgtcgctgagctcccttatcctgagttctatcttgagagctaattccttctcggtcattccaacgatgtcccagctcagtatttcctcgaacaccctgtctgccacttcggcggccttctgcataagcttaagctcctccttgtccttccgcattctcagttccctcatcagcacgttgaggggatagggatcgaagcggttgtcgctgtggaaaatcccgatgagccagtcagcgcgcatggtgttctcgaccaaaactttcccgccgattccaagctctttcattatcgtcccgagctttgagtacgggttctcgccgtccctccagaacgtaacgggaaagtcctttatgacgttctgatagaggctcggggcgaggatgtgatactccccatcagggttgaccgcaagaaccgtcagcctctcgcccgcttcatggatgtgaaggcctgtgaggtagtagaagttcgctccggggcttacaagagccccgctgaagcccttttcttccatcagggcagccagtttttctatgcgcatggacaccaccggttctggtattccgcaacccttaaaaactcaccctcgaaccacgaccgactaggcggggcagacccgcgggatgttcccggaagggagaaccacaaacagggaagaggtgaacgagatgggaatgtacaagtacattagggaagcctggaagagcccgaagaagagctacgtgggagagctcctcaagaagaggatgatccagtggaggagggacccggtagttaagaggatcgagaggccgacgaggcttgacagggccaggagcctcggctaccaggccaagcagggctacgttgttgtccgcgtccgcgttaggaggggcggaaggaagaggcccaggtggaagggcggaaggaagccgagcaagatgggtatggtcaagtactcaccgaagaagagcctccagtggatagccgaggagaaggccgctaggaagttcccgaaccttgaggttctcaactcctactgggtcggcgaggatggtatgtacaagtggtttgaggtcataatggttgacccgcaccacccggtcatcaagagcgacccgaagatcgcctggatagccggcaaggcccacaagggcagggtcttccgcggtctgaccagcgctggtaagaggagccgcggcctgctcaacaagggtaagggcgccgagaaggtcaggcccagcataagagcccaccagggtaagggtaagtgatttttctcccccttcctttaattctgagttcttatgatagtggcttaaggctccattgaaatacatctctgcttccatggttcaacttttgcatttccgggcaattctttgacctgaccttcttttgattcgttctaaactaaaaattcaacttggaactaattaatatttgaaaaaagaaagagttcttatgttaagtaagaggaaaaatttataaagatgagttgatgagttgattaatgaataatgtaaaaaactgaaaataggtgaacttcgtgaagtggaagcccctgttcgcagtcctgttgggactgctgatggtaggaatagcgatggctgaaacaagccgcccaatgatcaagcccacagaatccaacaatacgttggacatcaaacttcccccagcatcactgggcaaaacgatgtacttctatggcggagatgctgtgaaagccttgacagagcttgaacacaataacatgaccctaagaatagttctcaactacgagttatctcgaataacgttccttggagtgtacgagaatccagacggtagggtgtattactacattgttgaggggcccgcaaaaaaggaggctgctctgagggactttatcaaaaatgctaggcacttctcgcagagaccaacatttagagaagcatcgatgctgggacgaactaggaattggaccgacatcggtgcgatcacatggaaaaaggcttctatcgggacgacaatggagatgggggtaactgcggagttcagctacgtttccacaacatctgggatgatgtactatctggtggagatttatcaggttgccaaacccaagagacatgatatagccgttgatgaaatggtagttgatgtcagtgttcccgccgaaatacccctttcgaagatatggataagcaagtggctcccccaaatggacggggggcccaaaagatactactcgtacacctcacagataagcgtggacgggaacacgctcggttattcggcctctgcatcaactagtgaggataccaacgatggtatcacgtttagatggaaggttaagagtcgtgagattggcagggatgttgagtttatccactatgactttgtgaagaagattagaaatgggaggctatcgcgacccgcttatgggatgatcctcgatgcaaatccgagcgttatcctcgtctccacgcagaacaatgcccggttgtcctttgaagcccaagcgaagttcaacattgccaacaggatgattgtcccaacggatgcgctgaaattcgaagttgaagttaatcctgatggggtgagagagcgttgatgtttctatttttaactttaatctcggcactcaccgatggtgagggttatccagtggcattggggagtacagcctaacgccttcgatgcattccacgcggcaaaataagctcggacacagtttatgagaaggttgggattaaggggctaatgcttgaggatcccgaataagcaggactgttttatttcatccacaatagttgctgggggactaaacatttctgaatgcttatgctcataatatagagttgttaaccttaggttgttatttagtaagatttatttatctgcattgagatattgggataaaagaccccgcttgcaaaggaggtactgtgatgggcgtgctcaggtactcgttttccaagtactgggagctttccaggacgctgaggaagaggcaggcgctcatcgttctcctgaatttgattgtctcgtacctgaacgtccgctttgccctgatgctgagggacacgataaacagcccgaacacgagcagaatactcatccttggaggttttctcgtcttgataaacgccctgagcttcgtggttacctacctccttgacgtatccaagagggcaatgcaggtggagataataggcaggatttacgagaaaatcctccacgcaaaggaggaaaccttcagggtgaaaactcccggggaatacctcacggacctggtttcaaacgtcgtctacgtcagctcactctcggcagcccttatacccgctctggtcgtgaacgctgtgagctttggggcctatttaatagccctcttcctccttagcccaaggctctccctcgtcctgctcccgtttttgatagcgaccgttctcctcttcaaaaagcaggtcggggaactcgccaaggtgtcctcgaaagagagggacaggttctcaatgctgattgagaggataaggacgaacctcgaagggagaaaaagcattaaaaacacggactctttgagaggggccatgaggaagctgaacgacgagtgtacgggatggtacaactcggtcaaggggctcgtgctcgcgtctttgaagtacaggtatctttaccacaccctctacaggctcgtaccccttatcagcgttctggtcgggctcctctggaggatggacacaggcactctggtggcgttctacatgatggcgggagagatcatagagcccctggtcgtaattttaaacgacctcggccacgttccagaatcctacccagcccttaagagaatcgatgaggctctcaacatggaggaggagaactttggagagagaaccctcacacgggttgagggcatagagctgagaaacgtctcgtacggcacgatcctgaagaacgtgaacctcaagatatctcgcggggagagtgtgggcatcgtcggggagagcggaagcggcaagacgaccctcgcgaacgtaatcgcctgccactaccgcccggaggaaggaaaagttttggttaacgacatccctgccaaggagttcgggaacctgaggagaaagataatcctggtggaaaccaacgagttcatattccccggcactgttagggagaacgtaaccctctgggaagagttcgacgaagaggagcttagggaagccgtaagtattgcgaaggtgaacctgcccctggacgagaagatcgggcccagttacagggaagtctccttgggagagcggcagaggatagccctggccagggccctgatccgcaaaccagaggttctcatcctggacgaggccctttcgggagttgatccggacgtggaggcggagataatcggggagataaaagccagggggataaccctggtcgcgatatcccacaggccgtccacaaccaagctcgtggacaggctcgtgctggtggagaagggaagggtaagggaagtggggggataagcgcatcacaggccctggaaaacctcttgaaggattcatgattttccatgaacattcccatgctaaccttaccagtcaagccattctctcagaaccgcacagtgaaatggtttttaagccccctcgccaaaacccttctccggtgagaaagatggcgcagctcaaggcacaccacgttaggctcacaaccttcatccaggcgacggaagacgaggacaaggtgctcgacgcgatagcgacgttcattccagaggagatagacgaggacgacgtcctctttgacatcctagagacggagggctacttcgggaacccaataaaggttgtgaacgtcgagataaagaggagcaaagcggtaagaaagttcctggagtacttcaaggaactgctcagtgaggaagataaaaagtaccttctcgaccacctcgatgagaaggtcgacgaggagggaactttctacgtccgcttcaacaagcagaaggcctatctcggtgaggcagaggttgacgaggggcccgacgtcattcaggttaggataaaggtcaaggccttcccgatgaggaaggaagcggtcgtcaaagcgattagggagtggctggaggaatgagcgaggaggaagtttctttttcacgtgactacttcgtcgagatggacgttagggatgaagaggcccacgaacttgccagcgattggtttgacgaagtagtcttcacaaaaaagctcgtcctcgaagaccctccagattggggctctctaaaagaagaactcaaggagctccgcgggaagtacggaaaggtcgcactcctcctcgtgaccagaaagccgagcctcatcagggaagtaaagagcagaaacctcaaggccctactctacgttcagggcggcgacatgagaataaacaggatggcaatagagagcggtgtagatgccctgattagtccatggttcggcagaaaggatccgggctttgaccatactttggccggaatggccgcgagacggggagttgcgatagggttctccctctcacccctcctgaatgctaatccctatgggagggcgcagattctccgcttcatgatgaagacctggcagctggtgaagaagtaccgcgtccccaggtttatcacgtcttccgcagagagcaggtgggaagtgaggggcccgagggatttgatgagccttgggataaatataggaatggaaatacccgaggcaagggcgagcctgaacttctaccctagaactattgtctggaagctttagcgtttcttcaatatttgcatttatttgtttataatggctataatttttgagtttattgaagttttcatgtctattttttgccaaaatggggggatgaccttctgccgttctaactatccagcgttgaataactacaaggaatatttaatgccaaaaaatatgtcgaaaaatatataaagatgtgggggaagtggacgtgggtggttgcagtgaagcctctccatgatccagtgtacctcacggttgcctttgagcaggcaggcgagacggggctctcggacaggggttttgacctcaagtactccagggaagaaaacccaacggtaaggctcctggaaaagaaagttgcttctatagaggggggcacggattctctggcattcaacagcgggatggcagccataagcgctctatacatttccactctcaaagcgggcgaagaagtagttcttcccatggagggctatggaacgacgatccagctcgcagaggagctgaggaagttcggtgtgagggtcaagcttgcatatccgagttcagaagccctcaatgaggcgataacggagaacaccaggctggttcttacagaagtagtcaccaacccgaccctgaaggtaatagacgttcctgaagtcataaggcgggcgaaagaggtgggggcaacggtcgtagttgacaacacattctctccattgattttcaagccgctaaaagttagggcagatggggtaatccacagcctcaccaaatacatagctggccacaatgacgttatgggcggggctctgatatggggcgaccttgatcctgaaaacctctggcactggaggaggaggcttggatcgataatccagcccttcgaggcctggctggtaatcaggggcctcaagactttggagctgcgctttgagagacagagcagaactgcccagaccatagccgaattcctgagcgagcatccaaagattgaaaaagttcactaccctggcctcaaggacgatccataccatcccaccgccaggaggatattctcaaagcccctcttcggcggagtcctcagcttcctccacagggagggagagagcggggctaaggcgtttctcatgaggctgaagagggtattcccctcgccctctcttgggggcgttgagagcctggcatcctaccccgtgatgagtgccgccaagactatgccagaggagaggcgcaggctcctcggaattaccccaggcctcatcaggctctcggttggcgttgaggacgccgatcttctcatcgaggacatagacagggccctggggggtggttgatatccaggtgacaacgtgtccaaaggatctcctcaacggtccttgcgggggggcgctgaacgagaggtgcgaggtggatggaaaagaatgcccctgggtcaggatactggagaggttcaacgttgaccccgcgactctctttgaagagcatccattactccttgagctcgaagacctcgtggagagagactccaggcccagggattcggctttctggcagaacctagagaggggaagggccttcagcgttgagttccccgtggcggcggtctcaaagcccgaggaatccctccaggttcttagagagatcagagctaacctggtaacggtgccagataatccccttggatatcctcactacgaccccattgcggtggcctgctaccttaaatccctgggactgcgctctggagtaatgccacacatcaccgcaaaggacaggaacctgaacgccctgacgtcagagctcaggaccgcccaggtcttcggctgtgaggccgttctgcttacaaccggcgactggccgggctttgcggtacccagcaggcccgtatttgacgttgacgcctcgaacctgatacgcctggccaggctcgtctttgcaggggtgatgccgaccaaggaagtccttgaagtcgagagcaggccgcgggttgcgagcacaatgaaccctcattacagacccaaactggaggcaaggagactggcaaggaagctgatagcgggaagtgaggcctttttcacccaggtggtagcggcgggggagagcgcaactgggatttcaaagatcgttgaagagctcaagaaatacgcggacgttgatgtcccgataatcgcatcggtgctctaccccatgaaggaggagatgaagcccttccttagggctctgggcatacccgtgggggatgagccattcgaggcccttttggaggagttaaaggccgtggaggccgtgaggggcctcaacctcatagtcagctccaggagtctggaggaatggctgggcctctggagggaggccagagaaataatcaagggggtgtttgaatgatagtgccagcccttattggaagccttccaagacccgtttccctggctaagaaaatcgagcagtactcgataggaagacttggggaggaagacctcgaaaaggcctaccttgagcacacgaggagggccttcatcaagctcagggaggccggaatacaggtgatcaccgatggcctctaccgctgggacgacatcttcaaccccttcatacgcttcatagaggggattgaggtcaacggacttttcaagttctatgagaacaacttcttctaccgctcgccaatcgtgaggggggagctttccctgcgcgagaaccctcttcccgagtggctcaaccaggcgctggccataaaggaggaagtttaccccggggcaacgcttaaggccgtcctgcccggcccggtaaccctggcctaccactcacttaacgagtactacaaaaacctcgacgagctctcagaggcctacgcgggagtgattgaggaggccatcaaggagcttccggttgagctcgtggaaattcaggaacccgccctggcggctgagctctcaagggccacgagggaaaagagcgacgaggtatcgaaggagaccgctaagaccctgatagagcgcctctcaaaggtcaagaagctttgggttgttacttacttcggaaccccccaggttctcccgaataacgtcatcctgaacgtcgacctcgtcagcggctcggttccggaaaagtactctggagagctcggtctgggcatagttgacgctagagagaccaggatggagcgcagggaccgcctggaggacaagctgaggccctacctcagaaagcacagcaggatttacgtcaccccgaacacgctcctggacttcctcccggagagcgtcgcctggagaaagctcaagcttctcggaaagctcggaggtgagtgaaatggagcttccaatacttcccaccagtatcataggaagctatcccaaaccgagatggctcctgaggatgtacaaccttagagagctcggtagactgccggaggaggacttcagggaggccgttagagatgcgagtgtagccgtcctcagggagcacgagagggcggggattgatatcccctgggatggcgagatgggcaggagcgagatgacggaatacttcaccgccaagatagcgggcttcaaattctacggaccaattagggtctggggaaacgcctacttcaacaaggcggcggccgtctcgaaactcgagtaccgggaacccctcgtactcgacgagttccgctgggtcaaggagaacaccaccagggagataatcaaagtcccgataacggggccatacacgatagccgagtggagcttcaacgagtactattcgagcaaggaggagctcgcctttgacctggcgaagattctgaacaaggagttcaagcttctggagaaggagggggcaaccttcatccagatcgacgagccggccatgctcaaccacccggatgaggtttccatagcagttgaagcaataaacagggccgtaaagggcgttaaggtgaagttcgggcttcacgtctgctactcgaactactacttgctcgcggactactttgacgacataaaggtttcccagttcgcccttgaggccgccaacagaaacttccgcgatctggactacctcaagaagctcacccaccaggagcttgggtttggagtagttgacgtccacaacccgcgcgtcgagagcccggaggaagtagcgaaggccatccgcaaggttatggaatacattgagccagagaggctctacatcaaccccgactgtggtctcaagctgctcgacaggagaatcgcctaccagaagctcgtgaacatggttaagggcgtcgagatcgtcaggagagagctggcgagggagggcaaaacctccatacccttcaggagggaggtatagtgctctactcgggcgggagactcgtggtcaagttcggagggacctcggtcagggacgactttagggaggcggttaccttcgtctcccgcctctgggacgagaacgaagtggccctggtggtttcggcgattaagggcgttaccgacgccctattaaaattttcaagaactggggagggctttgaatggatagagaaggtccacagggacttcgcgaagaagtacgggattccctttgagaccctcgccgctccattgagggagcttaaaaaactctcaagagaggatttcccctcctttgaggcctacagggaccacgtgctctcctacggggagtggctttcggggctggcgtttgctgaggctttgaggcgggagggcatacaggtggaactctttgagccatgggaaatactagagaccgacgggaacttcggtaacgccagggttgacatagcgaagacctccagaaacctcaaggtcgtggaggaggcgttggagaggggtagggttgccgtcgttccaggcttcgtcggctcttacaacggcctcagaacgaccctcggaagggaggggagcgactacaccgccgcggttctcggtaaaggattgaaagcgagggccgtcctgataatgagcggcgtcgacggcatttacacggcggatccaagaagagtcgtctcagcaaggcttattcccttcgtgtcctacgacgagctctacgtggcatcaaaggccgggatgaaggcgatacaccacggagcaattgatgtcgtgaggggtatccccataatcttcggcagaacgagggactggagtatcggaacaatagcgggctacgagtcgtccagcctgccgatcctggtccacagggtagccggcgaggaggcggttataaccgctgtcggagttgcggaagttccaggctttgatggagaaaacggttctgaactgggtattcccctggtcaggctgaccgtcccgagtgcccgcctagggagtaccctcaatctcatacatcttcggctgatagcggacagaataagcccgccgagggctctgtccattatccgcgggggagtcagtgctggcaacgtttagaggtcttccgttccgtggggtgggggatatgcgaatcagggttccagcgacaatagcgaacttcgggccgggtttcgacgtcttcggcgtagggataggggaaccctacgatgagctcaagttcgtggaatctgacgaatgggagattgaggtggagggttacgacgtccctaccgacgggaggaacgtggcggtcgttgcggcaagggccctcgctacgcttgtcggtgaggaactttacctacggatgaagctcagaaaggagataaggccaaggagcgggctcggtagttcgggggcatcatccctagcaggagcgttggcggcggcaagggttctgggcatcgaggatgatgggctgataataaaggcggcactcgcgggagaggaagctgcctcgggaagtgctcacggggacaacgtggttccggcttactatggagacttcacgataatcgagtcccttaaccccttgagggttcatagaataccagttgattttccgctggtggttgttctgcctcagattgaggttccaactagagaagccagaaggattctgcccgagagggttccgatgggcgacgcggtaagaaatgtggcactcgcaggggccctggttaaggccttaacgagcggagacgtccaaaccgtggggaggcttcttgaagacaggatagcccttccctacaggctgaggctaatgccgtggttcgcaagggtctggaaagccgcccttgatgcaggtgcctacggggcctttgtgtctggctcggggcccgctatcttcgcgctgggtgaagatcttcacgccattgggaaagcgattgccgaggcctttctggagatcggcgtcgatgccgaggtttacattacccgcgcaggggttggtgcgttttggctttaagctttggaggtgtcgaaatgagggttgccgttctcggtgccacgggaatggtcgggagaactttcgtgaggcttcttgctggccatccctggttcagagttgagaaactggttgcctctgagaggagtgccggaaggaagtacggagagctggtcgatgattcgccagaggagttcagagatgtggaggtgacttccctccctgaatttctcagagacccggacgttgacattgtcttcaacgccctcccagcatcgatctcaagggaggtggagggggagctagctcaaagccttcctgtgttcaccaacgcgaggagccaccgctacgatcctgacgtgcccatattagttcccgaggtaaatctggagcaccttgagctgatagaggttcagagggagaggaggggctgggaaggcttcatagtgacgaacccgaactgctcgacggccatactcacggtctcgctcgcggcgctccgcggtttcggaatcagggaggtcaaagtggcgacgatgcaggcaataagcggggcaggttattctggcctctctgccctggcaatccaggacaacgtgattccctccatcccaggggaggagtggaagatcgaaaacgagagcaggaagatcctcggcgagctcgacggagtggaggtaaagcccgccgaattcagaataagcgcaatggctacccgcgttccagtgctacacgggcacactgaggctgtctttgtcaagcttgaagagggaagcctagaggaggtcagggaggccttcgaatccttcgacccgcttggagagctcggccttccaagctacgagaggcccctcgtctactccgatgttccccagccgcggctccacagggacaggggaaggggcctaaccgttacggtcgggaggcttgaggggagcagcgggagcttcaagtacgtggtaacgggccacaacctcgtcaggggtgccgctggaggttcggttctcaacgccgagctggcttataagctcggctatctgaagtagccccttcttttttctaatggctctgtaaaggaaaaaaggaaggagctaaatcagtagttatccagggccgggaagtgctccggctcgtagtcctcaagctttccatccagatagtcctcgtagcccttaaggtcgaggaagccgtgcccgctgaggttgaagagtatgacctcttcacgtccttcccgcttttgcctccagggcgcggtctatggcccctttgatggcgtgggcgctctctggagctggaactatcccctcagtcttcgcgaagaggtgagccgcctggaagacctcgttctggtggtaggcaacgggcttaactatcccgtggtttatcaggacgctgagagtcggagcaagtccgtgatagcgcaggccgccagcgtgaatcggcgggacgtagtatgtgtggccgagggtgtgcatcttcattttcggcgtgtatcctccggaatcaccgtagtcgtacttgtaaactcccctcgtcatcgagggagcggccttaggctcaaccgctatgaactcatattcagcctctcctttcagaacgtctctgacgaacggataagccaagcctgcgaagttgcttcctccgcctacacagccgattataacgtcgggctcttcgaactccttcatctgctcctgggcctcaagacctatgacggtctggtgcatgaggacgtggttgaggacgcttcccagggcgtagcgggccttttcgtcccttaaaacgtcttcgatggcctcgcttatcgctataccgagacctccggggtggtttggatcctcggccaggaactttctgcctatctctgttctatcgcttggactcggatagatttcagcaccatacaagcgcattatggtcttcctgtagggcttctgctggtagctcgccctcgccatgtacacccttacattgagaccaagaagtgccccggcgaggcttagggcagttccccactggcctgctccagtctcggttacgagcctttctattccctgcctcttggcgtagtaagcctgagctagggcggtgtttatcttgtggcttcccgttaccgttgccccctcatacttgaagtatatcctcgctggagtgccgagggctctctcaaggtttgtggcgcggaagagaggggttgggcggcctattttggagtagatctctctgacttctttcgggatttcaatgtacctatccgtgctcatttcctgtttcaccagctcctccgcgaaaatccttaggagcttctccggctccataggctcgtctgtctcggggtcgagcggtggcgccagcggttcagggaggtcgggcaggatgttgtaccacctctttggtatcttcgaatcgggcagaacggctttcattctaacgcctccagagtttttgagctaaactccgctttggaaagaacaaatcccaaaaacgagggaataatgagcgtgaaagctgtgaagacgaagaacgttaatgctaagctagaagttttggtaccttcacagcagaggccaaaagcaggcccccctaatcactccaaaaacgatcccgcccgtcagttttcaggctaaccatcttgagaaggggcaaactcctaacaccaaaaacaatcactcctggctgtcattgggcatcgaagctctgaagagttcgagctttatatgtcttttgctcgcgtattggtaaaaatgacagaaaaagacaaaagcgagactaaaattttggcgtttcatctaactggcggaccttggagtgccgtctccacggcttttacgtcggctttcctgcctttcaaagctattaacaccctgtaatcctcggcatcaccactgagaaagtgcaggcccctgtcctcctttttcataatgtattcagcgtattttacttggtcttcgcttgagtacaggagcatcaacacgtcgacgccgtcgcctacgttaaccctgaagtttatcttcgataggtaccaatcgggcatcggtccagcccaggttcccgcccctactgagatgttattctccataagcctgtttgccacgtacatcgcttgccttagaagtatcgtctctggagttggggcatttatcgggctcgaatccaatggtctgccacagagccactgcctttcagtggcgttgatgacatcgtttggcccacccctgatggagagaaatctggtgccgttgtatgccaggtagtaagctctttcccctcttgtccaaaggctccactggcaggtggtactgctccagtttccggagtttattgagtaccccaggagtttcaactgcttcaatgaatctccgtaaactctagaggccaatgacatggtcgtgtttgctatctcaacgtttccctctgcaacccacgttaagttctcaagaactggggggtcggagaggccccaaagtgggggttttggcacgggttctattctgtaatattttaagtaccaaacggcacttagaaccaccaaaacggctagtataatcccagcgatttttgaaagcctgctcatttccaccaccctaagcgacctcggtctgttcgtatggactctcacccttcctgtgctttaggaggagggagtacataaactccctcaagtcagaactcatgccatcatcgagcaggatatcggccttcccaccgtagaacttctccgccttcgttgtcagcagtgctatctttggggttagatactccaggagggcctttcctatttccgcgaactcttcgtcactgagttcttcgtccgtttcaaaggcgatgtaaacaacgaagtccttcatttgaacggcgagaacgctctcggtctcggttacctcgaagaacgaaaagttgtacgtgcttgatttaactctcgccaggagcaggccctttatggagacagtgattgggttcccatccaactcgaagattaagtcctccgcgaattctcccttggctatctgatagagctcttcgactcccattcctacccccggcggaactattcttcgaacacctttttaacttctgcgagaacaccgtaaaggtggtggcatgaagatcataagatttggtgtgtccgtgcctgaagaactccttgagaagttcgatcagataatagcggagaagggctacgttaacaggagcgaggcgataagggacctcatgagggacttcatagtgcggcacgaatgggaagcgggcgataaagaggtggccggaacgataacgatgctctacaaccatgatgaagctgacgttgttaaggagctcctcgatctccagcatgactatctcaacgagataatctcaagcattcacgtccatatggacgaacacaactgccttgaggttgttatagtcaaggggaaggccaagaggataaaagaaatcgcggacaggctcctgagcctcaagggagtgaagcacggcaaactcgtcatgacgggaaccgggaaggagctcgtctaacccaccacttccactatctctccccctcccggcgggaggatggcgttcaggtcttcttcccttacctcatagccccacttcttgaggattccgcggagcttcttcactagctctcccttcttcattgagccgggccttatgacaatgtatttgtcggtgtgggccttaatcgcttcaaccggcgcgcagactacgtattcttcgccatcatagtttatcacacccacagctagcttgagcggaaggccgtgcatccagttcctctttccgtagaccatgaaggcgcccttgccgaggtactcgccgctcggggcctgcttcgttacctggttggggtaggcccagtaggcatccgctgaatagaggccctggctccaggccctgctcatggaaacggcaaactggcaggcctcgaatatggtcttctccccggctttctgtccgtcctttatgacgacgtgcggagcgccgtaaacgtccgcgtggcagtagaggtcgttatcctccatatgtttcttgacgagaacctcgttggtgctcgcgtcctttccagccagaaccagaaagccctcgctcgagacgaaccagcggaacttctcgaaccacttcctctttctcctctctagcttcttcacgttcagttccttcttctgctcttcctcgatgagcttctcaatctcctccagcttcctcttcgtgtcctcgtaggcctttaaggctccttcatacttgtgcctgaacttcttggccttctcgtagtagatttcagcgttctcgcccaggctcttctcaaggtagagctttaccttcttgccgtcgagctctatcgttacggccttctcctttgggtctatgcctttaaccatgagcgcgaccttgtttcccgttttcttgccctcatctatccgccgcctgaattcgtcccagccgagggtttcggtggccttcctgaactcttccagaaggcgctcgattagggtgtagttggcgtagattaaatcgcctatctcctggttctctctcatggccttttcaaagcccttgagcatttcctcctgcttcctgagggtggccatcagccccctcttcttctcttcgagctttttggtctgctctattttggccttctcgagcgttatcttcccgaagtactcatccagagcctcgctgaaggtggggaagtagcgcttctcaaacccctcgtagattttcagctctatcgggacgacgtcgtgcataaccccgtccttgaagacgatgttcggcttgggctcgtcgttgaaggttcttatcatctcgtcatagaccctcttcaggtcttcgtcgctcagctccttgaccggcgtcgtcttctcgaagcccgccctcagggaaatctcctccgcatacatcccgcccatgttgagcttcctcgccaaagccctgacgagctcaagctcaggctcttccctcatcagatcgaggaacctctcaaaggagacctcaagggggttctctctggcaggagggaacttgtactccgccttcggctttatcgccctgtccttgtactcctcgtagcggagcgcggcgactattttgttttcggaatccacgaggattatgttgcccctcctgaagagctcaccgatgagtgtgtagtttcctattctgatcttaactatcctgtcgaactggtgctgctctatggcgtctatgaagcctcctccaaggtgcttcctcaggagcatcgtgaagctcgatggctgtttcggggcctcttttatgtagctcgtgaggtgaaatctctttcccgcctccaggatgaggtctgctctcccctccttcgtcctcagcttgaacctcacctcgtcgccgtcgtggtaaaccttgtcaacgcgagaaccgaccagccactgaagttcgcgcacgatatagcgtatgtcaacgctgctcatctcttccttcattctctcacccgggaaaagttgaggaaagaagtttataaggacttatctctcggagaattaccacgcaaatgccacaaggatagcggcggctattgccagaatggcccggtatatgtcggattcagaactttcaatggcttcgtcaagaaatacccatgccagcccagcaacgcctatgtcgaagataactcccccaagctttagggcagcgctgacgggcattgcgagggtctttattattgcccccagcaggagcactccaacgatgcccatcagaatgcccgaaccggcttccttttttaaggactccatcgggctcaccttttaatgtttagcgagtgatgttaaattaacttttccccaacgttgttgatgtacatctttttgccgaggcccaactgaggacacgctaacgttaaatattcagctgtgtaaccactccaggtgatactatgaagggttacctgacttttgtccttcacactcacatcccctacgttaggaagcacggaaagtggcctttcggggaggagtgggtctttgaggcaataagcgaaacatacatccccctgctcatggagtttgagaggctcagggactcgggagtaaagttcggcatagtgataaacgttacgccagtgctggcagaacagctaaccgacgagtacatgaagaaggcgtttgaggagtacatggaaagaaagctgaaggcaatggaggaagacctgaagtccgggaagtacgacgaaaaagcggtttcatacatgctcaactacttccggaaggtttacgactactggaaggccataaacggagatataataggcaagctcagggagctccaggatcagggctacgtcgaggttattacctcagccgcgacccacggctacctcccgctcctcggaagggacgaggcgataagggcccagatagccaacggtgttgcaacctatgagaagcactttggaatgaagccgaaggggatatggcttcctgaatgtgcctacagacctgccggtgagtgggagcttcccggcgggaggaaagtaaagagacagggtatagaaaagttccttgaggagttcgggctgaggtacttcttcgtggagagcaggctcatcgatgagggtccggcgagcaatgtctatggggaggttctcatcgccgatacagagaagaccaccttgaggccctactggataaagggctcaaacgtcgctgtattcgcccgcaacagagagactggccaccaggtctggagtgcccactacggctatcctggcgacttctggtacagggagttccacaaaaaggccccgaagagcggcgggcagtactggaggataacgagcaaggaagtcggccttggggagaaggagttctacgacccggacaaggcgatggagcgcgtggaagagcacgccaggcacttcgtctcgctagttgagagactcctgagagagcacgaggagaagttcggcgagaagggcatcatagtagctccctacgacaccgagctcttcggccactggtggttcgagggtgttaaatggcttggtagggttttagagctcctctatcagaggggagttgagacaccgacgctctcaaggttccttgaggagtactcaggagaaaagcacgagatagagcttccagaaggttcatggggagccaactccgaccactcaacttggtggaacgaggagactgagtggacatggccgcacatctaccgcgcggaggacaggatggtggctatagtgagccgcttccgcggaagggatgagctcacgaacagggtgatagagcagctggcgagggagcttttgatactggaggcaagcgactggcagttcctaataacgactggacaggcaaaggagtacgccaagaggagggttctcattcacagcagagacttccacaggcttgccaacgaactggtgaggtacgtcaagatcggcgagttcgacgttaagctcctcgaagagcttgaggagcgtgacaacccgttcaggcccgtcgttgtcgggccctacgtcagcgaaaacccgccggagcttgaggagtacgttgaacctccagaagttccgccagagaaggaggaaactgaggaaaagcccaaggttctcacggagaaggcaacttcccttgcactggccgtgaagaaggtcaagccggtaaaggaagagaccagggaagttaagaaaaaggccgtcgaagcctcaaagagggggaagagaaagtcctcaaagtcaaaaaggctaccccgaaaagtaagtaagaaagctccttcaaaagggccttcagacttgctgtccataaagggcatcggtccgaagaccttccaaaagctcaagagggctggcgttgaaactatcgaagacctgaagaacgccaacatagaagacctcgccagaaagaccggcatatctaccaagagattgaaaaagttcatagctcaagtggagtgagcttttccttttcgaaacctttttggcaactttttccaaattattctggtggtatcatgaagaaggttgaggcagttctcaggcccgaagactttgagaccgtcaagaaggcgctgaagagtgcaggctacgtttctctgacggcctatcccgtccaggggcgcggcgttcagggtggtattccgccctacgacctcctgccgaagatgaagatcgagatcgttgtcccagacaaggatgttgacgatgtcattgggataatagtgcggcatgccaggagaggaatccctggggacggcaagatattcgtgcttccggtatacgatgtcgtgagaataagaaccggagaaaggggagaagaggccctccactaaaggaaagcgtgcctgtgcctgtaaagctccaccgctgcgctgatcaggaggtagagctctaccgcggcgaggagcgttaggacgacgaggtatccctgcgcgaaggtagtgctcttgttaaggtgtcccgctatctccgcgatctttgctggatcgttgagggccctgattccgtagcttgccgccattgcgccgactatcagcggtattggtatggctgaatatgccagcagaagcccgaggtagcccctcctctggagggacagcatcgagagtattatcggtatcgcaaggattagcgccgtcaccgccaggaattgattcaagtagattcccgtcagtatgaagaacgacgtcattccgaagatgtacttacgatagactcttttcagctcggcgagcttttctggcttgaagtcgtactcagctgaacgggagtagagttcaatcctgttaaccagttttagatattctttcttccccatctcctcgattttcttatcaacgctcgccagcttcagctccttcgccttcttcaggaagaactcagccagttcctcgttgtccttctcagcttcctcggccagctttttgaaattcgccgcagcgttttttagtttggttttaacggcctccttctctttctccgagagcaccttgagcctgtcgattttatcgagtgtggactcaagaacctcggctgtctccagaagaatatccctgcttttcacgagaacacccccaaatcaaaaagggaaagaagggatttaataccttacccctttgcttccttctcggcgctcaggagcttgctaacgctccagtacaccatgccgagaattactgcccatgctatcaacatgtagattacccagctctccattgtcatcacctcagaccttgatgattacctcgttcttgtcgagttcctctttgtacttcttcttgattgcgtagtagctctcgatggcaccgaggatccacatgaggattattgccagtctagccggccactcaagggtcgtctgaaccagcggcttgaagtagccgatcataggtatcaggagcagtagcggtgcgatgtagagggtgacccacttgtagaactctggaaccttgatccaggctccctcgtgaagctccctccagaagttgtctggcttgaagaggtacactgcaatgattatgtcaaagaacgccagcagggttaactggaagcttacccacgcgtcgacctggtccatgtagccgtcgatgtagatgacggggagacccgctatgaggtacacgaggaatatcacccaggtgcccactgacctcttgatgtgcatgtcctcttcaagcattgcgacgaggtagttgtacatagctatggctgatgtgaagcccgcgaaccacagcaggaggaaccagagggcgccgaagagccttccgatgtcgcccatgctgacgaagacgttcgggaggctggtgtaggagaagccaaggccgaacttctgtcctatccattcgagtgctgcggtcttgccctgctggaggacatcgggcggaactatcttcggagcgtaggcagttgcgagcggtatggctattgaaccaccgagaacaacctcggcgaactcgttgagtgaaactgttgctataccagagagggcgacgtcgtccttcgggccgaggtagcttgcgtagttctggatgatactcataccgagggacagcgtgaagaatatctgtccagtcgcggccagcattacctgccagaggtggtcgccgaggtagctccagttcggagtccagatgaagcggaagccatctatggtgctccagttcgggtcaactggggagccgagggtgaatatgtatattatcattaggattgcgaagacgtacaggagtggcatcataaccttgacccagcgctcgatacccttgctgacaccctggccaactgcgattgcgagcaggattactgttatgccccagaagagcatgacctggccgtggttgcttaggtagttgctgaagaactctcctgtgggctgtccgaagtaggaacccgccgcgctgaagtatgtgtaagcggccgaccatccgatcaggtgcaggtagtagctgttgaggagcactgtcagcgagaacgccagcattccggatatcacaccgaaccagaacgcgctcctgggcttgaggctctccctcgccatgaggtagtacgtcgggccgagggtaccgtggccatacttgccaccgtagcgaccggcaacccactcaacccacatcactggaataccgaggaagaacagcgctatgaagtacggcaccatgaaggcgccgccaccgttctgggcaacctgagtcgggaaccttacgaagttaccgagaccgactgcgtttccagccattgctaaaatcaaaccgagcttggtcgcccattgatccctttgggcttccattatatcccacctccgattccgttggtatttaatcgggctgaagtgcccacagtacgggcactctgtatatattcggtcgtggtataaaaagcttttgaacggtagttttcgacaaaagacgatttacttgggcataaaataatcaatatccaatttttgtcactttttcaaatctatcttggctcgttaggtgattttagacatcccggcaattttgagatgagtggaaaataattttaaacacggcctccctatggcccgttgcccgatgattggaaagagagtgagctgagagatgatgaccgacttctcgctgagggcatttcatcatttttatgaactttgatgaacgtaaaagtcctttggtgtataaaaattcctcgatgtacatcgctccttttggcgaaatctccgagaattggcctttgttcttttggaaatttcactatttaactttttgttcaaaacagactgttttccagcctgtttatcgaaaggtttatatatgcaaacgcctaagttaacctcgcagattaccgaaatgaggtggtatgaatggtcgagattgacccgtttgagatggccgtccagcagcttgagagggctgcccagttcatggacataagcgaagaggcccttgagtggctcaagaggcccatgaggattgttgaggttagcgttcccgtcgagatggacgacggttctgtcaaggttttcaccggtttccgtgtccagcacaactgggcccgcggtccgaccaagggtggtataaggtggcacccggccgagaccctcagcaccgttaaggcccttgccacctggatgacctggaaggttgccgtcgttgacctcccctacggtggaggtaagggtggcatcatcgttgacccgaagaagctctccgagagggagcaggagaggctcgctaggagctacataagggccgtctacgacgtcatcggcccgtggacagacatcccggccctgacgtttacaccaacccgaagatcatggcctggatgatggacgagtacgagaccataatgaggagaaagggcccggccttcggtgtcatcaccggaaagccgccgggagttggcggtatcgtcgccagaatggacgccaccgctcgcggtgctgccttcactatcagggaagccgctaaggccctcggctgggacgacctcaagggcaagaccatagccatccagggctacggtaacgccggctactacctccacaagataatgagtgaggagttcggtatgaaggtcgttgccgtcagcgacagcaagggcggcatctacaacccggacgggctcccgccggctgacgaggtactcaagtggaagaaggagcacggctcagtcaaggacatgcccggaacccagaacatcaccaacgaggagctcctcgagcttgaagtcgacatccttgccccgagcgccatcgagggcgtcataaccaaagagaacgccgacaacgtcaaggccaagatcgtcgccgaggtagccaacggtccggtcaccccggaggccgacgagatactccacgagaagggcatcctccagatcccggacttcctctgtaacgccggtggtgtcaccgtcagctacttcgagtgggtccagaacataaacggcttctactggacggtcgaggagaccaggaagaggctcgacgacaagatgaccaaggcattctgggacgtcttcaacacccacaaggagaagaacatccacatgagggacgctgcctacgtcgttgccgtcagcagggtctacgaggcaatgaagcaccgcggatgggtgaagaagtgatttcttctcccttttctcttgtccttacttttctgacgttctgatggttctctaagattaaaaaaccaacttgccgctattcaaaaaactaaataaaaacgaaacagaagtttaagccttcgtccagtactccttttcttccaccatcgcccttatcatctcgtcctcgtccttgaacatcgttctcctcgaggggttctgcatgccgtagaactccatgaacgggctgggtctcctcttgaacgggtagtaaaggtatatcgctgctaaagtcctataagcctctgccatctcgctgataacaccagccgaaacgccctcggcgtagtgataaaccgctatcgccttactcacatcaacgaggttgaagtccctctcgacgagctgtctcctgagtatgtcagtcgcctgctctatatcctccctctcaagctcctcaacaacgtcaccatcgaggaggtgtttgattttaatcctcttgatgttcgggttctggttgacctggttgtcgtattcggcaactacccaccagtcgtccagcgctccaggatcaagaaccgtgaagtgctcgctgagcttctcgtagaatcccctgacgcggtggtagtactcctcttcgtgacccgtcatcggatagcttaggtaaacaagaggcttttcgttctcccggaatattaggtcgagaaagacttcgtgggggtgtcttataccgaactgaaggacgtagcggacgtttattccctcctttttcagctcgtggacgagggtcttgacgtggtttatcgcgtcctcacgccacataaccaacgtggtcagcttgatgttctcggggttttcaccgaagcgttcgaaccactctgggtcgtttattattcttctcctgacagaaaggacgtcatcgaggattatgatgaccctatcgggtcctagaagcttcagattgctcagcgtgaatccgatgacacttccacttccccagcggaagagacttggagttgatacgaggtgaactctcttatcgctctcgtcaatttcctttcttatcctctcaaaggcctcgtcccttatctcgttcatcatgtctgggtggcttatcgcaaagtcaagaacgttcttccgggtaatcctaaccccgcgttcctttcccacctcgcgaatgtagtcaaagacgtggtagtaggcgtagctctctccgtttgccctttcgagggcttcacctatgtactcatccctgccgttgagcggtggtccggtgaggagtattacttcccttctcatttcagcacacccctccagaatttggcgaaacctttaaatactctttccctaaaggcccttcagaggttcttctattctaaaaaccaaatccaggggtgttgtagtttgactgagaagctaaagggtaccaccaccgtcggtattgtatgtaaggacggcgtagtgctagcggccgacaggagggcatcgctcggcaacatggtgctctctgaaagggtaacgaaggtgttccagatagacgaccacctggcgatagccggagctggaacggtcggggatatcctcagcctcgtcagactgctcagggctgaggcaaaactctaccgtgcaaaggtcagcagggagatgagcgttaaggcacttgcgacccttacatcgaacatactccacagcggcaggggtttcgcctatatggcgtggttcctcgtcggtggctatgactccgccccgaggctgtactccatagatgctgcgggtggtgtaactgaagaccgctttacagctgctgttctggtatggagtttgcgttctccgttctggaggagaactatcgtgatggtattccccttgaggaaggtgttaagctcgctctcagggccatcaaggccgccacaaaaagggatgttttcacgggtggtggcgttactctcgtaacgataactgaggagggctaccgtgagtggagtgaggaggagctgaagtctcttcttgagtgaggtggttctatgatacgccgtgaaacttttgttgacgatattctcaaggaaatcagggagataatagtccaaatggtcccaagggaagcagggattaccgacgttgagttcgaagggccggagcttgtcatatacgtcaagaaccctgaggccatgatgaaggacggtgagctgattaaaaacctcgccaaagtcctcaaaaagcgcataagcgtccgcccggatcccgacattctactgcctccagagaaggccgaggaactgataaagcagcttgttccaccggaggcagagataaccaacataagctttgatccgtctgttggtgaagtcctcattgaggccaggaaacccggtctcgtaattggaaagaacggagagaccctcaggctcatcacccagaaagttcactgggcaccgagggttgtgaggacacctccaatacagagccagaccatatactcgataaggagtatcctccagactgagagcaaggacagaaggaagttcctgaggcaggtcggaaggaacatctacaggaagtccgagtacaagagcagatggataagaataacgggtctcggaggcttccgagaggtaggtagaagtgctctcctcgtccagaccgacgagagctacgttctggtggatttcggtgttaatattgccgccctcaaggatccgacaaaggcttatccacactttgacgctccagagttcaggtacgttcttgacgagggccttcttgatgcaataattatcacccacgcccacctcgaccacagcggaatgctgccgtatctcttccgctacaagctcttcgacgggccgatatacacaacgcctccaaccagggacctgatgaccctcctccagcaggatttcatcgagatacagcacatgaacggcgttgagcctctctacaggccgaaggacatcaaggaggtcataaagcacacgataacccttgactacggcgaggtcagggacatagcgcccgacataagactcaccctccacaacgcgggtcacattctgggttcatcgatagttcacctccacataggcaacggcctccacaacatagccataaccggcgacttcaagttcataccgacgaggctctttgaaccggcggtgagcaggttcccgcgcctggagacccttgtcatggagtcaacctacggtggaagcaacgactaccagatgccgcgtgaggaagctgagaagaggcttatagaggtaattcaccagacgctgaagcgcggaggtaaggtgctcatcccggcgatggcggttggtagggcgcaggagataatgatggtcctcgaggagtacgcccgcgtcggtggaatagaagttcctatttacctcgacggaatgatctgggaggcaacggcaatccacactgcctatccggagtacctcagcaagcacatccgcgagcagatattccacgaaggctacaacccgttcctgaacccgatattcaagagtgtcgccaacagcagggagaggcaggacataatagactcaggagagccggccataatcatagcgacctctggtatgctcgtcggcgggccgagcgttgagtacttcaagcagctcgcaccggacccgaagaacagcataatcttcgtcagctaccaggccgagggaaccctcggaaggcaggttcagaggggacttcgcgagatacccatagtcggcgaggacggcagaaccgaggttatcaacgtcaacatggaagtccacacgatagacggcttctcgggccacgccgacaggagggagctcatgagctacgtggcaagggtgaggccaaggccggagaggataataaccgtccacggagaggcccacaagtgcctcgacctcagttccagcatccacaagaagttcggtatctcaacacgcgctcccaacaacctagatgccataaggctcaagtgattcctcttctttttctcttcgggaaaggttttaaagcccacccaagacaattggctttaggtgagagagagtgaagctgacggtcgagcacaagttttcgctaactgtttacctgtggggagcaatcactggggtagtcagcggtctgctcgcttattacaatgatgccggctggctgctgggctttctcctgtacgttctggttgataagttcgtgatggcagtcgtgaaggagcttccggaggacatccccgagccgaggatgatactcagaaaggccttctggggctggttcctgttctggctcttcttcacgatgatgacctacaccctcgtgacggacttccagccagtctgctattcaaaccagagcctgctctacaaaatggttgaaagtggaaacgcttcaataaagtgcgtcttcaacattacggggtgattttatgaacgttgaagaaatgaaaaaggccgtagccaaggaggccctcaagttcattgaggatgagatggtagttgggcttgggaccggctcaacgaccgcctactttatcaattacctcggaaagctcctcatggaaggggagcttgaggacgtttacggcgttccaacttctcaccaggccagacttcttgcccttgaggcgggaattcccgttgtgagccttgacgaagtggatgcaatagacatagccgtggacggggccgatgaagttgacccgcacatgaacctgataaaggggcgcggcgctgccctcactatggaaaaaatcatcgagtatagggccgggatgttcatcgtcctggtcgatgagagcaagctcgttgagtacctgggccagaagatgcccgtgccgattgaggtcatacctgccgcgtggagggcaatcgctgaggaacttgaggtcttcaacgcgacagcggagctcagaatggcggtgaaaaaggacggcccggtcgttactgacaacggcaacttcatactggacgccaagttcgcccgcatcgaggatccgctcgacctcgaaatcgagcttaacacaatacccggtgtggttgagaacggaatattcgccgacatcgccgacataatcctcgttgggactccagaaggcgttaagagaatggagaggtgaactttcttttttgccagctgggttaaatttataagttccacaattttcgttctatcgggcagtgcgggggtagccgagcctggccaaaggcgcgggatttagggtcccgtcccgcaggggttccggggttcaaatccccgcccccgcaccacagcagccctttctcacgaaagcgctggcggaaagttggtatgctcttttaaacaggctcgttttatgaggggtttactttcaattggctgattcaaaaggattttatcaccgtatagtgcccaaggggcactaaaaacgaagttaaaaaaatcacaatcgacagggaactttgaggttaaatccgcgtgaacttgctttctggaagagcatacgctcctcaataagcaaagttcgagaagaagggcaaatttttggtcaagctttttccaaaagcttgaagggcaaagtttcattaaagttagtggttcttgtttatgatgcccatttgagaggattttctttagagaactgtcttctagttgtgaattctgcttttattgggtttgttatccgtgagtttgctttttaatcgacgcctgtagggcgtcaaggcgagaaaaactcctttctatttaccatgtttgaaaaattcactaacgctttggcttgcatatcgtgaaaatcctcgtagaaaggcaaatttggaaggaaccacgaaccttgatcaaacttcgcgcaggaatcttttgggaaaagcttcaccaaaagatcgaatgtctttgagaattggcttgattcggttttattctcttggtagataggcagagaagtgtgggttttcttctttttttaacgcccgaagggcgttatactgtgagcaaaccccttgaaaactgctaattgatactgggaatcactggaaaacagggcgctcaaaaggacattccctctttgatgaaactttgcccagcaaagtttctatggtggggccgccgggatttgaacccgggtcacgggctcccaaagcccgcaggatagaccaagctaccccacggccccccaggacggcggtgctgattatggcctgtacttcttaagcttttcgcttgtcccgtgaagaaccttaagaacagcaggagtttcatcttagatcctcaaaaatgtcgtgttagagtatgtccccagaaaagctgttgtggagccccgggcggggtttgaacccgcgacctgccgcttaccaagcggccgctccaccaggctgagccaccggggcgtcgttgatacgatgacgaagagcctttataaatttttcccttcgagcttctcaacgagtccctcgagaacctccctgaacacggatgagtccacccattttatccccatcttctgtgcccaggtgagtatcccaacgtccgctgacactatggtggcgtcgagctccatcgccaggagtataagctcaaagtcctccttgctgtcaacgattccttccctcaacgccctccggtagttcctcctcagcttttgaattatgttgtccacgttgtcggtgtccagtacgctctccctcacggccttttctgccactctgagccccttgtctatcctccgccggatatcctctataagctcgtaaacaacgaaggccggtatcttcaactcgtggacgtttgggggctttttgatgatgtacagctctattgcgggccttagctcttcgctgtcgacgaaatgcatgacctccctgtatatccctggtggcatgtagaactcgaccttaccgaagagcttctcggcatagctcaggaaggtcttcatggcctctgtgggattatccccgaagttctttctgacctcgggattcacgaatatgctggtatcgaggacgaacttcatgcccaccacaactttatttaaggtgctctcccttaaaaatctgggtgattcgatgaaggtcggtctcgtttttggagtcagtgaactcgcaagccctgaggcttttagagaagaggcggcgaactttgttagagtacttgagcaagattttgatgttgttggtggggaaataatccagtcaaggagcgacttcagaaagctgaaagagaagataaacttcaacgatgttgacgctctggttctgttccctctgacgggtgggacggagggatttctcaaggagttttccgtgtttaggcgtccaactgtattttacgggaaccctttcaacaactcccttgcagccgcaatcgaactcagggagtacttcagggacaggctaattccctccaccgttgtgaagagttcggaggagcttaaagctgctctccttgcgtatgatgatatgaaagatgttctcgacaggtttcttagagccagaataggccttatagggagggtttccccctggctgataaacgagaagctggacataccttacacccacataagcctcaaaaagttctatgagtactatgagaagacaaccgctgaggaaggctgggaggccgttaaggaaatcgttgaaaacgctgaggaaattaaggagccagatagggagtctcttgcaaaggctggacgggtgtacgttgccataaagcgcattcttgaagactatcatcttaagggctttacagttgggtgctttgaccttatcgggaagattggaactacaccctgccttgcccttgccatgttcaatgcccagggcatccccgctgcatgcgagggtgaactcaacgccctgattggcatgatgataatccggaagttctttgatgaacctgcatttatgggtaatctcgcagatttcgacgaaaaccacgtggtcatcgcccactgtacggcacccctggtgtcaaagtacgtccttagaactcactttgagagcggcaggggagtcggtgttgctgttgagttccctcctggcaaggctacccttttcaagatacgcgggagacatgcggttgttgctggagttgaagttgagggcaacgagttccttgagtcgcggtgcaggacgcaagtaaggctgaaacttgaggacgctccagaattcgttgatggcacgctcgggaatcaccatctcttagcctatgttgacccggaggagctttcagacctgctgagtgaacttggcttcgaggtaatgctgtactagttgattgagttatttacttgggtttttataccaaagggttatatattcctaccccattttatttatgtggggtgagtaaaatgatgagacgcgcacagggagccttggaatacctattcatggtcgcattggcccttattatggtcacgattactatcaggtacgttcatgaagttgcacagaacgtggcagtacaaatcaaccagactactaaggaaatatcggagatcctcaagaatatgacgtcatctggacgttgaaggaaacgctattaaacaggttccctcttctttttgaggtgttttgaaaatgaaagttgtgatgactacaaaagtagatctcgcgtcaatgaacatcagggagaagctcatcgagaactttggttttaaagaggatgaactcctctttgatggcaatccagtgtaccagaaggatgatgtagtgatactgacaaccaatcaggagatgatttactatgatggcctcgatagggctatcgagcgtcagactggaataaagcccgagattatagcatttgcctccaggcactccagcaaacagaaactcccagcccttacgacccacgtgacaggaaactggggaggagccctttacggcgggaaggatgaaagccttgcaatagcacagccaagtgctatgaagcttgctctgcttaagatgaatgaactgaatgaccttggatggactgtctgctacgaggcaacccaccacgggccaagcgagcttgatgtgccaagctttttcatagagatcggttcgagcgaggaagaatgggtcaacgatagggccggcgagattgtagccgaaaccataatatacgtccttgagaactatcagaattcgaagttcaaggtcgccgttggtattggcggggggcactatgcaccgaagcagacaaagagggcacttcagacagatctggcgtttgggcacatagccccaaaatatgcacatcccctcagcaaggagctcctcctaaaggccatcgagagaacagccgagcgcgttgatgcaatctacgttgactggaagggtagcaaaggggagacccgacagatggcgagggcagttgcggaggagctgggacttgagttcatcagggattaaggccgaaacatttaaaggatatactggccatttacccttcagtttgggttagctatgtttatataccactctccctcaaaaattgagggaattaaactgtttggagggtgaacccatgttaaagctgattgaagatgcgattgaaaggacctccgccgctccgcaggccagcgctcctgaggttagaactcaatccgatattgacgaggagcttaagaagctccttgagcagattcaggcgaagatatatgtcgtcggtgttggcggtgcgggctgcaacacgataaacaggatgatgcaggttggaatccagggtgccaagataatcgctatgaacaccgatgcccaggatttgttaaaggttagggctcacaaaaagatcctcctcggtaaagagcttaccagagggcttggtgctggaaacaacccaaagatcggtgaggaggcagccaaagagagtgagagagaaattagagaggctctcgagggcgctgacatggtctttattacctgcggtctcggcggcggaaccggtactggagccgccccggtcgttgcggagatcgcaaagaagatgggagctttgacggtggcagtcgttacccttccgttcaccgtcgagggcataaggagaatcaagaacgccgagtacggccttgaaaggctcaagaagaacaccgacaccgtcatagtaatcccgaacgacaagctcatggaggttgctccgaacctgccgatccacatggccttcaaggtcgccgacgagatactcgtccaggcggtcaagggcataaccgagctcatcaccaagcctggcctcgtcaacctcgacttcaacgacgttagggccgttatgaaggacggcggcgttgcaatgatcggtatcggtgagagtgacagcgagaagcgtgctcttgaagccgctcagcaggccctcaacagtccgctcctcgacgttgacatcagcggtgccaagggcgctctcataagcatcagcggaagcgacgtcaagcttgaggaggcccagcagatcatagagctcgtcaccagcaagctcgatccagaggctcaggtcatctggggtatccagcttgacgaagagctcggcaagatgataaggatcctcctcgtcgtcacaggtgtcagttcaccttattcagttgccgaggaagaggaggagtcatactttggtgaggaggagagaaggccgataaagctcgacctcgacgagctttaattcatgaaatctttttaaggaggggtaaggatggcagagttcaccgaaaaggtcaagtccttcctggcggagtccaagagggtactgctcgttacaaagaagccaggaatgaaggagttcaagcttgctgctaagataactggcatcggtatgatccttattggaaccattggcatgataataagaataataggctacctcgtgacgggctcctaacggctctaaaaggtgaatacacatggcagagggaaagatattcacagtgagcgtaaccgttggtcaggagacaaccacggccaatctcatctatagcaaggccaagacttacaacctgcccctttatgctatcctctctccaagcaaggttaaaggctacatcttcatcgaggctcccaacaagagtgccgttgaggaagcaatcaggggcatcaggcatgcaaagcgcgttctgccaggggagatacccttcagtgagatagagcacttcctcgaggagaagccggcagtcagcggattcgagccaggagacatcgtcgagctcattgcaggtcccttcaagggtgagaaagccaaggttgtccgcgttgacgagagtaaggatgaaatagtcgtcgaactcgtcagctctgtggtgccaatccccgtgactgttaggggagaatacgttagacttataagcaaacgccagaaggagtgacgggcaacaggactaagtttgagaggtgagataaatggcacaggttgttgaagttcttgtcgaaggtggaaaggcatcccccggaccgccccttggtccggctatcggtccgctcggactcaacgtcaagcaggtcgttgacgagatcaacaaggctaccaaagagttcgagggaatgcaggttcccgtcaagattatcgttgaggaccccaagaagaagaccttccgcatcgaggtcggtatcccgccgacgagccagcttatcaagaaggagctcggcattccgaagggctcaagcgaagccggccacactcccgcgggcaaccttacaatggagcaggtcatcaagatagccaagatgaagatcgaccagatgctcgcaccgaaccttaaggctgccgccaaggaggtcatcggaactgcgctcagcatgggcgttaccgttgagggcaaggatcccagggaagttcagagagagatcgacgagggtgtctatgacgagctctttgcaaaggctgaggaggcccagtgaggcctctttttcccttcccgtttggggaaaactttaaaaacacattcctaaaggcatctttgattctccgtttggctgtttaaatcaacgaaaatgagagggagggctgtaaagtggccttcgacaggcagaaactcgtggaagcggtgaaggaggcgaaggcccgggctaagccgcgcaacttcacacagaccgtcgagatggcagtcaacctcaaggatgtggatctccgcaagccggagaacaggtttaagcttgaggttgtgctgccccacggtcgtgggaaggagccaaagatcgcggtcatcgctgatggtgccgtggccgaggcggctaaaaagctcgggcttgatgtgattagtggtgaggagctggaggagctggctaagagcccacgccaggccagaaaactcgctaaaaaatacgacttcttcatagcagcggctccgctgatgccgaagatcggtaggtacctgggtaggtacctcggtccgaggaacaagatgccagtggttgtcccgccgacaatgaccaacctcgagcctatcgttgagaagctcaaaaagaccgtcaggatacagctcaagaacaaccctgtagttcatgccccaataggaaccgaggacatggacgacgagaagcttgccgagaacgccgaggcggtgctcaacgccatcatcaacaagcttgagcgcggtgaaaaccaggtgaagtcagtgtacatcaagaccacaatgggcccggccgttaaggttgagaggtgagggagatggctcacgtggcagagtggaagaagaaggaagttgaagagcttgccaacatcatcaagagctacccagtgatagcgctcgttgacgtggccggtgtcccagcgtacccgctcagcaagatgcgtgacaagctccgcggtaaggcccttctcagggtcagcagaaacactctcatagagctcgccataaagagggctgcccaggagcttggacagccggagcttgagaagctcatcgaccacattcagggcggtgctgcaatactcgccaccgaaatgaacccgttcaagctctacaagctccttgaggagagcaagaccccggctcctgctaaagccggtgcagtcgttccaaaggatgttgtaattcccgctgggccgacgtcactagccccaggcccgctcgttggtgagatgcaggcccttggcattccggcgaggattgagaagggtaaggtcagcatccagaaggactacaccgtccttaaggcaggtgaagtcataaccgagcagctcgcgaggatcctcaacgccctcggcatcgagccgctcgaagtcggtctcaacctgctcgctgcttacgaggacgggattgtctacaccccagacgtccttgcaatcgacgagagcgagtacatcaacatgctccagaaggcttacatgcacgcgttcaacctgtcagtcaacatagcctacccgaccaagcagacaatcgaggccatcctccagaaagcctatctcggagcgaagaacgttgcagtcgaggctggctacatcaccaaggacactgtggaggatatctttggcagggctatacgtgccgtcctgctcatagcacagaacctgcctgaggatctgctcgacgagaagaccaaagaacttttaaacgctcaggcacaaatggcagttgccgccgctcctcagccgaccgaggagaaggttgaggaggcggaggaagaagaggaagaggaggaagcctctgaggaggacgcgctcgctggactgggcgcgctcttcggctgatttcctttcccatgtatccctcaacccgtgataaaagaaaaaaggatgaagatgattggaggtgcgaaagatggagtacgtgtatgccgctctgctgctccacgccgctggtaaggagataactgaggagaacctcaaggcagtccttgaggccgctggtgttaccccggatgaggccaggataaaggctctcgttgccgctctcgagggcgtcaacatcgacgaggtcatcgagaaggcagctatgccggtcgccgctccggttgcagttgccgccgctccggccgccgagggcggtgccgctgaggctgcccaggaggaggaagaggaagaagaggaggaggccagcgaggaggaggccctcgccggtctcggcgccctcttcggctgaagtcctcttcccctattttctctatattcttggatgagaattcttcactgggtttctggaaagcttcgtcttgaagttgattaagggttctcgcgttcaagaacagccgtttgttgagagaatcatagtgaattgacattctggaaaagagctacgaaccttgatcaaactcaatgggactatcgtcccgtgcattgaagcggagcttcaacgtcgcacagcaagcttttgggaaaagcttgaccaaagaaactttgcaaggcaaagtttgtggttcttgtctgacgggtcattttgagaggatttccttgtagaagggcaatttcaaaaggaaccacaaaccttcatcaaacttcgcgcaggaagcttttgaaaaaagcttcaccaaaagcttgaatgtccttgaaaattggctgtggattgggggattctcgcaatgaataggcagagaagtgtgggttttttatttttaacgccctttgggcgttatactgtgagtaaccccttgaggatttccaatttatggtgagaatcactgaaaagctgggcactcaaaaggacattcgatttttgatgaaactttgcccagcaaagtttctatggcgggccgggcgggattcgaacccgcgaccttcggctccggaggccgacgccccgtccagactaggccaccggcccatcccgcctcagatgtggtggccctcagcacaggtcagtgccgggccaaaccgctcatcctcggccgtgcggtttttatagttctcacttatatagctctttcggtggtctaaatgatgcttcccgattggaagattagaaaggaaattttgatcgagcctttcagtgaagaatccctgcagcctgcaggatatgacctaagggttggaggcgaagcttacgtaaatggtaaaatactcgacgttaaggattcagggggagttacaatacccccaaagacttacgccttggttttgactctcgagaggatcaagcttccggatgatgtaatgggcgacatgaagcttaggagcagtctagccagagagggcttaatcggttcttttgcctgggttgaccctggatgggatggaaatctcactctagccctgttcaacgcttccaacgagtctgtggaactcaaatacggcgagcgctttgttcagatagcgtttatccggctggaggggcctgctaaaaacccctatcgtggaaattaccagggaagcaaacatctagcgctctcaaaaaggaaacggtaaccgacgttggtaatcagctgtttgttcgttttcattgttttttctggcccgattataatccactccgcttagaatggttgtctttggttttttactttttaaacacctttaaatccaattaaaccacttcacctgggtaagccctttgatagggtttagtttccctctcctgaattgaggtcatgattaaattattagtagcactcatctctgaaaattggatgtatctaagggttcattcgttgttagaccctgagaaatagctccgtttaccgaaatctttatatatctccaattgcctaaagcttaatgaaaagccctttaaggaggtgttgtgaatggccgagcttccgattgccccggttgacaggcttataaggaaggctggcgctgagagggtcagtgaggatgccgccaaggttctcgccgagtaccttgaggagtacgccatcgagctcagcaagaaggccgtcgatttcgccaggcacgctggcaggaagaccgtcaaggctgaggacatcaagcttgccatcaaggcctgaaggcctttttggcccttttccgcttttgctcttctcgtttccctaccgttatcattttaagacccttttactgttctgaacccatgccggagatagccgtaaggatgactaagaggaaccacaacgcgttcgttcaccttctcggtgccctggagagtcagggctttgatctaggagagctcctgatcaccaaggatttcaatgaaatactcagagctaaacctaaagttgtcctgtactctttcttcaccgaggagatctggggctcgttgagggatgaaatcagacttttaaaggaacggggggctctattagttgcggggggctatcatgcgatagccatgccaaaacatacgttaaatgtgctcggttttgacatagcggtcattggtgagggggaagaggttctctaccagctcctcacgactctaaagaagacgggctacagaatcacaaaagagctcgccaacattacgggtcttgcgttctacttaaacggggattttgtgtttactggctttgcaaaggtcgagaacttctggcgcttcccgccttaccccgagagcgttcgcctgatttcgccgatagaaatcacccgcggatgtcccttcggctgctactactgtcagacaccctacattaagggtttccgcatgaggcacaggccgatagaccagatcgttaagtactcgaagagaatgaaggacatgcgttacataacgccgaacgcctttgcttacggaagcccgggtgcaatcttaaaactcgacaaacttgaggcccttttaaaggcccttcagccgctgaggaaggagggcaggagactgttctacgggacgtttccgagcgaagtaaggccggagtttgttctacctgaaaccctcgaacttctcatagactacgccgacaacaggagactggccataggtgcacagagcggtgacgacgccatgctaaaggcgatgcacagacttcatagggtcgagcatgtccagagggctgttgagtatatgcttgaatacggctttgagcctgttgttgacttcattgttggactgccaaacgagaccagggaaagccagagaaagagcatcgagctgatgaagtggattatggcaaagggtggaaaggtacgggcgcactacttcatgccccttccgggaactccatggtcgaggtgcaggccatcacctctaagcgatgagatgaagaagttcctcggcagaatggccgcgaagggaaagattgagggctcctggggcaagcagattgagctgtctaggaggcttcagaggctcatagaggagttctacgaggagcctatggcgtatcacgggagagttagggaggtctgttagatacacatagacccaaaaccttataactccagtgagtatctacctgcgagggtctcatgtaccccgaaaactataaaaggttcctggagcttatagacaaactgcgagagtttgagggtgccctcatagtggagggcctgcgagacgaggtggctctaaggaatctgggggtcagagcggagataataaggctctcacgccttcccctgtccgaggtggcgctcattgcatcatcccacaaagaggtcatgatactcacagactttgataagaagggggaagagctggccaaaaaactcctcaactatctggccggctatccctgcagtgtggacatagagacgtggaaggagctcaggaagctcgtcagaaaggacataaagggcgttgaagacctgtacggcctctaccttcgggttgtctccgtttctgaccccctgctggagggaatccaatgaagaggaagaaaaccgtgctccagcagattttgtccgaaaaacgaaaaaaggtcaaggaaggtgatagtatgtccggaaaggacgagttcggaacgaccaagtacgtcatttacgctgagtttgaggcaaacggtgtcgttgaaaggcccgacgtcgttggtgcaatcttcggtcagaccgaaggtcttcttggagacgacctcgacctgagggaactccagaaaaccggaaggatcggcagaataagggttgaggttcacaacaaggctggcaagacatacggaacaataacggttccgtcgagcctggatagggtcgaaaccgcggttctagccgctgctttggagaccattgacagggttggaccagcagaggccaggataaaggttctccgcattgaggacgtcagggctacaaagagaaagtacatcattgagagggcgaaggagatacttgaaaccctgatggagcaggagataccagagactcaggagataaccgaagaggttaagaaggccgtccgtgccaaggagctgatcgagtacggcccggagaagctgccagctggcccgcacgtgccgttctccgactcaatcatcgtcgttgagggaagggctgacgttctcaacctgctcaagcacggcataaagaacgccatagccgtcgagggaacttcaatacccgagacgataatcaagctcagcaaggagagaatagttacggccttcacagacggagaccgcggcggtgagctcatcctcaaggagcttctccaggtggcggatgttgactacgttgccagggcacctgagggcaaggaagttgaagagctcaccaagaaggagatcgtgaaggcccttaggagcaaggtaccggctgagcaggtcatcaacgagatgttcaacaagggcagaagtttctacgagctgatcagggagagggagagcgagggtgagaggcagccaaggcaggtgaccaagcccgaacctgaagtcgttaaggctcagcccaaggctgaaactcccgaagaaaagagggagccagctaccgtcgttaggccttcggccgagaagatagtaaagcccattgaaacgtcgaagagtgcacctgagcttgaagagttcagggagtttatagagagggtaaagaaggacggcattgcgctgctcctcgacgagaacaagaacgtaatagccgagatcccagtgagggagctgacgaaccagctgaaagagcgcaaggacgtctacgctgttgtcttcaacggtgtgataacccagaggctcattgatactgtcagtgaaagcggagttaagtatatcgtaggcgctcgcaagtacaacgtcgttagaaggcccgtcagcctcaagatcatcactttcgctgagtgattccttttctaattttcttcacaatatttttaacttttgaaggtaaactttcttctggggatgtcataatgagggttgatgtgttgctctttgcgattggagtgctgctctgggccatcctgctgacgctctttcagtttggactgctcggacttctctttgggatcgtcgggtttgtgatcctgctccatgagggctggaaagaactagaagagaaaattgaagaaacacctaaatacggggaacactaggactaaactttataacgtccccacctcttcttttcccggtggtcaaagatggaggaaattagggagcttgtcctgaagtacgcgctcatcaacgcctacacgcacaggggaaaggcaaacccgaaggcggtcatcggcaaagtcctcggtgagaacccagagcttagaaagagggcaaaggagataattccccttgtgaacgaggtcgttaatgaagtgaactccctctcacttgaggagcaggaggcaaagcttagagaaatctatccagagttctttgaagagaagaatgagaaaaaagaggaaaagaagggtcttcccccgctcccgaaggccgagaggggtaaggtcgttacccgctttgccccgaaccccgacggtgctttccacctcgggaacgctagggcagcgatccttagccatgagtacgccaggatgtacgacggcaagttcattctccgcttcgatgacacagaccccaaggtcaagaggcctgagccgatattctacgagtggataaaggaggacctcgaatggctcggcttcaggatagatgagatccacatagcgagcgacaggcttgaaatctactacgactacgctgagaagctcataaagatgggcaaggcctacgtctgcacctgcccgcccgagaagttccgcgagctcagggataaggggatagcctgcccccacagggaggagccagttgaagtccagctcgaacgctggaggaagatgctcaacggcgaatacagagagggcgaggcggtggtgaggataaagaccgacctcaaccacccgaatcctgccgtaagggactggccagccctcagaataatagacaacccgaaccatccgaggactggaaacaagtaccgcgtctggccgctctacaacttcgcctctgccattgacgaccacgagcttggggtcacccacatcttccgcggacaggagcatgcagagaacgagacgaggcagaggtatgtctatgagtattttggctgggagtatcccgttaccgtccaccacggaaggctttcaatcgagggcgtgatcctcagcaaatccaagacgagaaagggaatcgaagaaggcaagtacctcggctgggacgacccgcgccttggaacaataagggcccttagacggcgcggcataaaacctgaagccataagggagctcatcatagaggtcggcctcaagaggagcgacaccactataagctgggacaacctcgcggcgataaacaggaagataatcgagccgatagccaatcgctacttcttcgttgccgatccgattccgatgtacgttgaaggtgctcaggagttcacggctgagatacccctccatccagattacccggagaggggagttaggaggctcaagtttgagccagataagccggtctacgtctcaaaggacgacatggagctgttcaagcctggaaacttcgtccgcctcaaggatctcttcaacgttgaaatcatggaagtgaacgagaacggcattagggccaggttccacagctttgaatacgaagtcgcgagggagaaccgctggaggatggttcactgggtcacggaaggaaaggcctgtgaggtttgggttcccgagggagacgagctgatcatcagggaggggcttcttgagagcgacgcggacgttaaggtggacgacatcgtccagttcgagcgcttcggcttcgttagaatcgacgacgtcaggccagagaaagttgttgcgatttttgcccacaagtgaaaagataaaagccccctcactcgggggcttccgtaacccatattttgtcgcctaatataccaaacagaattattatcagggcgatcactggagagaggaggtacaagtctcccttttttgctgctgtgtacattgagtaaaggccctcgactatgaagaacgtaatggccactgcagcaactcccatttcaagcggcgacagctttgagttcagaatcttaagcgccctgctggatattactgggtacagctcatatattgccatgaagaacgtggctatggtaactgctcttagcatcatatcggctacggatggaaccgaatctggaatgccgaggagcagtgatgctgctatgagatacgtggccgcttttgttctggaaattctgaacacggacgctattatctgaactccaacctcagctgtgggcagtatgcttgtaagccctgcgaagaatatggagagccctattaggattagtaggtaggaatatccagatagtatgtctggtaagtcctttataagttggagagcgtcttcttctcccccatatgcgtagaagaaaagcctctcgggactgctgggggctattgcgtagataattgtcagggtagccaaaaggctcactaccacctgcattaggataccgactcctatgatcgtcttagcgttgaagcgctcgtttatgaaactgccaagcattatgtagaagccgaagccaagtccaacgccgtaaagtgccctctcggcggctgctctaatcagtgagaggcttaaaggctgccagctgtaggccatgtgctttgcagttgcaaggaaggccgccgttgggggtattttgactttgaaaaggatggcagtaatgatagcaaccgctatgaagaacagcgatccaagggacatgattgtgaaagttttttcctttgccctcgttattatcacgaatatcagcgccagcattatgatcttcgctacgagcctgccgatggtttcagtaccaacgtacggaccaagaagaattagcataacgtttgccgtgtagtaagataggaatgctattatagttactgcgatggcgagtatcatcgctggtctctgaaggacttttctgtacagctctacgaagtagtagccagacttcattaccctttctgtttcaaatatggccaccaaagtgaacaccagcaggaatccgaggtgcactaccaggccagtcagcccgtagtggagccagaactgtgggaacaggccgaggctcccaattcccgttgcgaatccagccacgaggaatatcagatacatcgtccacttctgtgtctgatccattttatcacccccattattatatcgggaagtttaccgaagtaatccttaaaactattgcccttgttaattttgggctaatctataacttcggtactaatttatttgtatttggtggggaaaaagaacgaattgttatattggaaaagggaaggaatcagtcaagtcccttccacttgaccagacccaacaggaacctgtgcggaagcttttcatggtgcgggtgaaccctgaccgcgtagtgccagcacgggtctcccaggtgtctgagggcgtttccttcgtaggtgtatagccattcaccctctcccacctgctctgggtgtctgagctcaacgatgtggggcttttcaatctcgtagccctgcgccctgacgccgtagtagagctcaacctcaacgtcctccggcttgagaccatcgaggtaaacccttacctcaagcctgttgccctcggccttggcgtcccttatctccactttgtcccacgaggccctaaccctgtccttccacgccgctatctcctttgcgccgctgtagttttcccttgtgagccagatgtagttgctcatggccttggaatagaacctgtccatgtactccttgaccatcctgtgggtgctgaagcgcggggctatgctctttatgctctccttcatcatgtatatccactttgccctgttctcgtagtaggttggtatgacttcctcctcaagcagggtgtagaggctctcagcgtccttcgggtcgtccgcttccgtttcaggttcggtagtttcttctccaatgacccagccgttctttccgttgtagccctcgacccaccagccgtcgtagatgctgacgttcagaacgccgttcagcccggccttcattccgctcgtcccgctggcttccataggcctgcgcgggttgttgagccagacatcgacgcctgccaccatgagcctcgcgctgcccatgtcgtagttctccatcacgaatatcttacccctgaactcgggcatcttggagacctcgtatactctcctgaggaactcctttcctccatcgtccctcgggtgggccttgccgccgaagactatgtaaacgggcctctccgggttgttcacaatcttcttcagcctctcgaggtccgtgaggagaagtgtagcgcgcttgtaggtcgcgaacctcctcgcgaatcctattatgagggcgttctcgtctatgtttggtatggggtcgtctaccccgagcctcttgtttctctctatggccttccttctcaggaggtctataaactccctctttgcctggaggtgggcttcccacagttcctcgtcaggaatcctctcgacggcgtaccagatgccctcaaggttcgtgtgttccctccagaccttgccgatgtacctgtcaaagagctttctcatctcgttgtgcacccatgtcatggtgtggacgccgttcgtgattccttctatcggtatctcgttgagcggaacgcccggccagagatccttccacatcctcttgcttacctcagcgtggagctggctgacgccgttaacgtagctggatgttcttatggcaagaagggtcatgttgagctgatctccctctcttccgagttcaaggagttcctctcttccttcaaggaactttgcgagtctcttcttgacttcttcgatcgggaacctgtcgtggcctgctggaaccggcgtgtgggttgtaaagactgtcgttcccctcacgatgctcagggcctcggtgaaggtcagaccctcttccatgtaccaggctatcctctggaggttcgcaaaggctgggtgcccctcgttgaggtgaatgaccccaggctcgatttcaagggccttgagaagcctcatcccgccgattccaaggaggatttcctgctttatcctcttgtccatctcggcgttgtagaggtagtcgcagatcgtcctgtcgtcggggctgttctctgggacgtcggtgtcgaggaggtagagcttcaccctgccgacgtttacctcaaaggcccttgcatagacaatcccctccccaatcggaacctcaatgcggagcggctttccttccctgtcgaggacgggctttatcggcatctcctcgggcttgtactcggggaatatctcaacctgcctgccgtctttgtcgatctcctgcctgaagtagccgtgcttgtagaggaggcctatggctatgaagggaagtccaaggtcgctcgcggtcttcacgtggtctccggcgaggattccaagaccgccagaataaattggcaggctcttgcttatgccgtactccatacagagatagactatgggcttgtcccacttggggtagttggtggagaaccaggtcgagcgcgggttcatataggcgtggaattgatccatcaccagctcgtagaggttcatgaagtcgtcgtcgcggacgagctccttaaaccgctcctctggagtgtcgaggagcagctttactgggttcttgtactccctccagtgctcagggtcaatgtactcccagagcttcgtggccctcctgttccagctccaccagtagttgtaggccagatcggcgaggtctccaagcggatacgggagcttcttccttatttcatcctcaacggcattggaaacgttcaccatagccatcacccgtgtatcatcttcggtgatacccaataggagtgggacttaaaaagtcttgccgctcgtcgaatgacgaaaaaaggagaaaaggctcactcgccctcaagggcgaaggggcttatgtagtccccgtatttctccctggcctcaaggagcctctgtctctcctcttcaagaactttgaacagctcctcagggacgttgtctagctttctgtaaatctcctcgattctgtctatcttcgccagtaactctggaacccttatcttgaactgcctctcgtagtcctcctttgtgtactccttgttaaggacgtccttgaacagcttggctaggtccttgtacttcggaatgtagccgatgggggtttctatggcctcaacgtcgccgtgtacgcggagctccatccacttgagccagacggctttgtcgagcttgtggttgagccagacgccgttctcgcggaggaagtagttcacggcgaatatctttggagtcttcttgagcttcctgccgaactcaaggtagttcctgaggtagtcgcctaggtggacgctcatgaagtcgaggatggccattggattgaaggccctgactccctccttaccgagggtcgccgcggtggtctcgctctcaagtgaggcacccatcgttatgacgccgtgctcccagttgaaggcttccctgaccggcggccaggtatctgcgtccctgccgccgaatatcatgccgccgacttccacgccgcacgggttctcaagggcctccatatcgacgttcggaaagtgttcgagcgaaacggtaaagcgcgcgttcttgtggctcggcggtatctcgttgccctcagcgtctttctttccgcgccaccactttccgctgtggttctcgccttcgtctggaatctctatgcccatgtcgttccagtagggctttccgtccttgacgaggacgttggagaagattatctcgaccggagagtggagaacctgccagattattgggtcgtcctctgggtttacaccctggattataccgaagacacccttttcgacgttcgctccccttgcgattccgtttactggcaggatgaaagtcaggtcgtcgccgacgatgttctcccagggtatcatggccgtagaggtttttccgcacatgctcggataggccccggtgaagtatgtcttcctgccgtgcgggccgttcacgcgcatcaggaacatgtgctcgctcagccagccctcttcaacggccctcttgattgtgagcctgaaggcgagcttcttgaggcctatcgtgttcccgccgtactgggtgttgacggaatagaccgtctcgtcttcgagatcgatgtatattctcctcttgtcgaggttcttgctggtttttctctcgtcgagctcaccagcactgtgaacgaacctgaagaagcgcgcactcctacccaagcgcttgaactcctcgtagcctttcctgtaaaggatgaactccgagtgggcaacgtaggccgaatcagtgagctgaactgctggaattgtgaatatcgagttcttaggcccaaggacgaagaagcacacgaataactccttgcccttcatgattcccttcatcagctcgcgtatctccttcaggccttcgtctctgtccttggtattgatgtatgggagcttcttgcctccagggagaaggatagcggtgttggccttgtcccttgcctggtcgtaatagttgtcgtagtgaacggtgtgattgggggtctcgagcatcctttcctcgccgtaatagagggccttccaacgaacgtacccctcgtcctcggggctgtcggtacagacgaaaactttgtccggttcgagccactcaatccattccgccagaaattcgtggagttctgggttgtctatggcctttaccttctcaaactgctccttatcaaggagcttttcaagccgttcaagagcgttcatgataccgcctccagaggtgatgctccgatgtattaaaatagtttgtcggtaagtttaagtactctaacgaataaacacggacatcgaaagctaccgataacctcaaaaatgggatggttttaaacactcacggtgatacaaggaggtgaaaagaagtggagttatactactctgaaaagttcaaccccgaagagcttgcccttctgggaagggccattggtaccgtggcccaggggacggtaatagtcggcagagacggcagggcgatatcgaggtatggaaagcgtgccatggttgtgggcatagtcagtacaggctcaacgataatggatgttaggcttatcccgctgatagcgctgaaggactttgcccacagcaaagggatgcccttagcttacgtttactaccacgggggcgttagggtcgaggtgaacggcctggacgttgatgaggttgaggcaatcctgaagagcaggagcttcatagaggcccatccgaacgatataggtgccaccgtttattatccaaacgccctcgatgacttccttcacgaccttttcaagcgctacaactttaagatcggcggaaaggcccttgtggacgctatgaacactcctgcggtgctctttttccccaggctcagcgagcacttcggctttgaggctgagcttataaacgacatgatgaccagctacatcccgccgaaaccgaaggaggtcttcctccacaagctgaacaagggtgactacaccttcggactgcgcttcaggccggacgggatagccgagttctacaaggacggcgaggaaaagacgtttacgagcatgtggtctctctttgattacctcaagagggtcttcaagtgagggcggcagttttataagagctgctcctctctattatctgtcctattttgggggtggcactgatgttcatcgtactcgagggaatagacggcgccggcaagtccacgcaggcaaaactcctggcagaatggtttgaaaacagaggatacgaagttgttctaacgaaagaaccaacggacactccttttggtaaactcataaggcggctcgttcttacgggcggtaaagaaggaataatagacggtgctaaaataagccatgaggctgaggcacttctcttcgcagccgacagggctgagcacgttgacaagctgattaagccttcccttgaggccggaaaagtcgttatatccgaccgctacttctattcgtccctcgcgtatcagtgggcgaggggccttgaccttgagtggctcatagacctcaaccgcttcgccgtaaagcccgacatagtttttctcctcgaccttccggtaaaggagagcatgaacagaataagaagcaggaaggtgaagagcgagttcgacaagatattcgagcttcagagaaaggtcagggagaactacctaaagctggccgagatgttccctgaaatgaagataatcaacgcgatggaggacgttgaaacagttcacaaccagataatcgcgctcattgagacgctccttggagaagagtgaaggggtcggccagtgccagtctcttcatccggtagctaatcagaccggtaaacgctcttcatcccccgtcttattttccggttgctttttaaaagagttctccctaactctcctcggccgatgacgagcgttagccacgctgactgatgaggaaaagagggttagccgaggccacgattcattcttttcaagaatccttggatttttcttgaattcaacgttcgtggttgggagagttcctttcaacggcgaaggagaggaactccctcagaaacttgagtcctgccccatagtttacggcctttgggtgaattgataagtagaaggtgcccctgcatctcgtatagtcatgttttgctcttttcaatgtgaggctgaacttagcacttgaattcgaaaggtaccaggtgtactccctgttcatgattttgtatgaagttccttggggagtgtacaatgtgtccttggttataacgctcagattgtgggatagcactaccttcagggcatcttcagatatggcgtagttgggaggtacgaagtagctgggcgaaaagttcagtgccctcaactcttccaggccaagctccagcttcttgcgcgcagttcccgcgtcgcagtcgaactctctgtattcatgcatgtagccatggagctctatatggtaacctttagcttgggactctttcaggaaatttacaaaatcgggatccttatctatgggatgctttcccgcgtggtttgggatcacaaagaagtacgtgttgttggccatgccgtattcgtcgattatctcggttatttccttaagctctttgaggtaaaccgggcttacatcgtggacgaggataacaagccgacaggagctaggaaatgtgctggatgtgttggcgtgactctctgacacactatcgttctgggttatggacaaatccggagagtaatattcccgattctcatacagaaagatgcccgccccgattgccaggataagtgccgttgttattaccagcaattttttcataggggtagtgatgtagtttccttttaaaagtgttgctacaaaaaatcaaaaaagggtaattcatgggttgttgaaggctctgttaaaaaactccctgactcttgccttccactcctctgggtggaacttgagggttctaacgtggggtgcatcggtaacccacagctcaatgtccgggttgatcttcctgttcctctcgtagaactccctgacttcttccaccttaacgagcgggtctttttccccggctattatgagaagtggtttcttgaccctgtccgcgtactcgatgggatgtatctcctttccgccgctgaagagcttcgtaaatggcttgacaaagacgtagagccactctggaaggttagcgaagtacttcagaccccttgccccggttttgtccagatacattggcggactgtcggcgacgccgcagcagacgtcttcaatctctgcgagcgaccttatggtgaccatagcccccattgagaagccgatgagtccaatcttgcctgccctctccgggtgggtctttttcagccactccacggcggccttaacgtccaagagctctttgtcgccaaccgttgtgtaattccctccgctctttccgtgggcgcggaagtcaaagacgaggacgttgtagccctcctttaggaggaactcgacggtcggcttcatgtaaagggagtaccacctgctcgcagtgtagccgtggagcggaattacagtcttattgctcccgttgtcaacccaccagccgctgagtttaacgccgtcttccgttgtgaactcgacgtcttcgtagtcaaagcccaagtcctttggcgtccagtcctcaaccagcctcgggggtttgaccatcttgtagccgacgaaggccacaaacgcgagaaaaacaatgactgcaaggacaaaaatggaaaggagcaatcccattactccttccctccctcgacgtcaaggttcttcatcatccacaccatcggtagcgcgaggagtacgaggagggcacctatcgggaaaagcaccctgtagttctcgcccgcgaggtcaacgattgccccaccgatcgttcctgcgaggagcaccgggagggagcgggtggcttcgaagaagccgtagtatctgcccgtgaacgcttccctctcgaacttggtcagaaggtcgccgattactgggtacgatgccgccatgaggattccccagcctatgcccgctattcctaaggctatcgttatctgggccttggtcgttatgaaccatccccatatctgtggaattgcaaagatcaggcctccaaggactatgctcagccttctgccgagcttgtcgtagatgattcctcctggcagggcaccgagaagaacggcgacgttgaagagcgccatcaggtaaaggccgagggatgttaccgccttgatgttctcctccgttgctgaaccgtagagtatgaacgcgaggattccgtagaggaaaaccgcgatgaactcaaagctcatccaccagagagtctgagccgcgtagaacttgaggaagtccctgttcctgacgatgctccagaggtactctccaaggctctcgttctcctcgatgtcgggtgcctcgggttctctgacaatgaggtagacaaagactgctgcaccaataaggaagaacgccgtgacgaggaagggtatcttgaggtaaggcgtctgggtgagtgcctttattccctcactctccccagtcatgtccacggccttagcgattaggtagccggccagtccgaagaggaagaggttaccggcccactccagcaaggttataacgccgctcgcagttccacgctttccgctctcaactgtatcgggcataagggccctgaactgggccgtgtagagatgcattgagagatagaagaacgccagcgtcagggcgaagccgatcagcggaacactcatggcgtaggcggtgtatatcattatagctgctatgcccgccagaaggcctccaatcataatgaaaggtcttctcctcccgtgcttcgacttcagggtatcgctgtaatagccgaggagcggtgggacaagtattccgatcaatccctcgagggccagtatcgtacctttaacaaacgccgactgggtatagctcgacaacagcgggaaggacagccccttgtttagagcccatccaacgctcctgctgaaaccgagcagggcgagaccaaggacaagaccccagctgaagcccttcctcacaacaccctggttcgattcggattccatgttaacaccccctaattttcccattgtttcgctggatgtatccagactaaacaaaattctggttgtcgtgactttttacacttttggatttccaaagacaaaaacagcaaagaaggaaaggaagcttcagtccatatcggggacgtactcgtaaacgtcctcggcgccacccttgacatcacccctcctgacgaactgcatcgctatcagtgccagcaggaagaacgccattgcaaacggcaggagggtttcgtagcctatcagatcaagcagtgcacctgcgaaaggcggtgccaccaggttggccgcctggctgaagaagtagtagagtcctgtgtagccgccgactttctcgtccacggtcatgtcaacgaccattggtagcgagttgacgttaatcatggcccagcctattcccccgacgaagaacaggcccatgaacttcatgataacggggtctgtgagtgcaacttcctgtggctttgatgtttcgccgatgaagaacgccgcaaggattatcgcgattatcgttaggagaccgagggttatcgttttcctccttcctattctcgctccaaggaatcctgcgggtattgcaaagatcatgaagctgaggctgaacattccaagcatgaaggcacccgtgctttctattttcctcgttatctccgtttcagccgctccaacgggaattccatagaggtggtacttgacgtagcttgtgaagaacgtctcaagggagttaaaagctataaaccagaagaatatcgccaggagtattgcaagaaggctcctctcgtggctggcgaagacgtccttgaggttctccttgagctcgccgaagcttttgcgtgaggtctctgagaggagttctctcaagtttatctttttacccggaacgcggtattcctcgggctcaggaacaaagagcacaaccagcagatttgcaaggagcataataagggcgcccgcgtagaacgggtaggcgtagctcatgtcgtagagcactttgccgccgaagtatgctaaaagggctccgaggccgcccatgaagttgattataccattagcctggctcctcttttcgctgggggttatatcgggcatgaacgcaacgaccggtgagcggaagagcgccatgaagaagttcatgaagattattgtgcccatgaaaagagcaaggttgccatgttccctcgccacgggaatgagcgcgaacatcagcgcggctgaaggtgcgccgagcaggatgtacggctttctccttccgagccttgtcctcgtcatgtcgctgagcgcgcccaggaagggcagaagcaggactgcaaagaggttgtctatcgtcattatgaatccagttatcgtcctgttcatgtggaacgtgtcttggagaaatagcggtatgtatgcgttgtaaagagcccatattatgcttataccgaagaaaccgaagccgagcaggaaaatcctgctgtatttgaactccgccacttccatcaccccttgttttattgtcgtttatagtctccaaatctatggaagaagcatttttaagggttttttgaacataatcgggcaggatgagagtgctcacgttgggacacaggggttgcagggggaagattgagaacaccattccagccttcaaaagggccctcagatgggctgacggtgttgagatggacgtcagggttactggggatggtaagattatagtccaccatgatgagggcttctggagcgatggggagtattattgcgtctctgaattaacctttgctgaaataaagcgccttcaccctcttggaaagctcgttcccagtgttgaggaagtgatcaggagtgtttcaggatttttcgatttcgatgtcaaagagcctgaagccgtggaaccgcttttgaacctggttgagaagaactctctttttgcatcttcggtgttttctgcagataatcctgatatcgtaaggaaactgatttctgagtgtccggactgcagggtgggcttctcaataatcggatattcaaacgccctcctccttccaactttaaaggggctctactccgttcacgttccaatagatgcagtttcatacattggcttcaggaacctaactgcaattctccgggctgcccggaaaagggggctcaagatattcctctggaactacaggatggacgaggtgaggtgggttccaagacttctgccatttgttgatgcagtaatttccgacgaccccgcccgcctgagaaaagcttttatgaacggtgcgtattgaacgcgaggcggttgttatgtgggagcgtgatagggttatcgtcctcggacacagggggtacatgagcaactaccctgaaaacactctccttgccttcaggaaggcggttgaggcaggtgcagacggcatagagctggacgtctggcttacaaaggacgggcgcgtagtggtgatgcacgacgagaccatagacaggacgagcaacatgaagggcaggcagaaggacatgaccctcgaagagctcaagaaggcggacgttgggcagggtgagaggatcccgacgcttgaagaggtctttgaggccattccaaggaatgcacttgtgaacgttgagctgaaggacagagacgccgcccgcgaagttgctgaaatcgtagcagagaacaaccctgaacgggtaatgatatcctcctttgatatagatgccctccgcgagtacagaaagtacgacgatgagaccacgatgggcctcctcatagaccgtgaggaagtggtgcctttaatcccgaagctcaaggatgagctcaacctctggtcggtgaacgtccccatggaggcgataccgctcatagggcttgaaaagaccctccaggcccttcactgggtccgctccctgggcctgaaggttgttctgtggactgaaaacgacgttctcttctacaaggacgataacctcgccaagctcaaggggctctttgaagtggttatagcgaacgacgtggtgaggatgatagagtaccttaaaaagctcgggctgagatgagcaagtctaataagttctctttcctctaatttttcttaggtgattgcagatggaaaagttcgttctttctcttgacgagggtacaacttccgccagggcaataatcttcgacagggagagcaacatccacggaataggccagtatgagttcccccagcactatccaaggccgggatgggtcgagcacaatcccgaggagatatgggacgcccagctcagggcgataaaagatgccatccagagcgctagaatagagccgaatcagatagcggcgataggagttaccaaccagcgcgagacgacgcttgtatgggacaaagatggtaagccgctctacaacgcaatagtctggcagtgcagaagaacggctgaaatggttgaggagataaagcgtgagtacgggacgatgataaaggagaagaccggcctcgtccccgatgcctacttttctgcctcgaagctcaagtggctccttgacaacgttccaggtttaagggagaaggccgagaaaggcgaggtgatgttcggaacggtcgataccttcctcatctaccgccttacaggagagcacgttacggactattccaatgcctcaaggacgatgctcttcaacattaagaagctcgactgggacgatgagctccttgagctcttcgacattcctgagagcgttttacctgaggtcagggagtctagtgaagtttacggctacacaaagaaggagcttctcggggctgagattcccgtaagcggcgatgcaggtgaccagcaggcggccctcttcggacaggcggcgttcgaggcgggaatggtgaaggccacctatggtacggggagctttatcctcgtgaacacggacaagatggtgctctattcggacaacctgctcacgacgatagcatggggcctaaatggaagggtcagctacgccctcgaggggagcattttcgtaactggagcggcagtccagtggctcagagacggaataaaaatcataaagcatgcctctgagacagaggaactcgccacaaagcttgagagcaacgaaggcgtttatttcgttcccgccttcgttggtctaggggctccctactgggatcagtttgccaggggcattataatcggcataacgcgcggcacgggcagggagcatctcgcgagggcgacgcttgaggcgatagcataccttaccagggatgttgttgacgagatggaaaagctcgtccagatcaaggagctccgcgtcgatggtggcgccaccgcaaacgactttctcatgcagttccaggcggacatcttgaacagaaaggtgataaggcccgtcgtgaaggagacaacggctcttggcgccgcttacctcgcggggcttgccgttgattattgggcggacacgagagaaatagccgagctgtggaaggctgaaagaattttcgagccgaagatggatgagaaaactagggagagactctacaaaggctggaaagaagcagtaaagagggctatggggtgggcaaaggtcgttgatagtgcaaaatcaaattgatataccctacaatcgtgatatcttttcaactattctttccagtattttaagagaggcatcgcgggataacctgtctttgatgtcatttggtggataataccatagttcaatgaatcgtctcatgggggtataattctttaaatcctttccactaatgacaagattttctcgttttagtttactaaacaacaccccccaatttttctcacctaagtcgttttttattacgtcttctaaatttttgttaaagactgcgaaattcttcctcacaataggggaagtaggtgtccttttagttttgtactgtactgcactaaacaattttttgttcatttcatcgggatacaggtctagatcccatatagggtacgttggaatattaaatccattaaacattaaatatgccgtaagtatgttccccttcccgcctacggggattattgaaatattgttgccattgaggtcaacaccgttatgttcagcaacgacctctagagcggctctgtcactttctccctcaactaatactactttatccgcgaagaatccttcactcatcacaggatttactgtagtcgtgaattttttaacgtgttttgatggggagtctatcccgtagcgttttaggtctttctgaagttcctgttgtggataccaataaattttggtctctcttagtttacgtgatttttgggttttaattttcttgaatactctcaggctatcaaatgtgtcagtactaattaaaaaaggagaatgagtggagtacattacctgtatattaaatccaccaaaagtattcccagcaagatccttgaataatttgtgcagatgcttttgacgctgagggtgttgatataactctagttcttcaataaccaaaagtagagttaatttctgatctttttcatctgaatctctacccacatttttcattttattgagttcatgtctttttgcagtcatatactgcaataaagagaacaaaagagccctttgcgtaccatgaccaactcgttcggcactcgtttcgaaaccgtcttctgtaactaacacagttgggactggtagtgggatcttgaaatcatctagattaccccaactgatgttggcttgtgtatttggtgcaaatttttctaggatttgtgttagctcgttgctaagttcagagaatagcttatcctttcctgtttttctgtgtgcctctagacttttaagtaagtgtttatacctcttttctagacgattaaactcaggaattgaccttatatgttcttctattatcaattgggtaagttctgtaataatactcccctttttgtattcagtctcttcagagacacttttaactgcgggcactaataagaactttataaacttgtcaatctttccatgaccgacttctttatatccaaaaaactggtcttcttgcagtgtttcttcccatttctcaggatgcgagtttttgtactcttcaagtgcttcaagaatctttttcttagtaggcttactccctaaatggggtaaatcgggaaattctttctgtagccctttgtatctttctattaagtcctctttcctcgaaggtaagtttgaaaactggggaatactcttgacaactccatggtaagactggttggattttgatgctggaaatttcataatcttcacgacttttatatagtcatgatcattgtcttcatttatcacatatttttgaaattcctcacgttctttatcgttctcaagtctaaatttaatggcaattcgtatgggtttgctcgtatctctgttatagaagtcttcctcggaatacttggcatttgggttaaaaaacaaatctaatgcctgcaatagcgatgattttccagctccatttctcccgatcaacactgtaagttcatcgaggggcatttttacagctcttagtgacctgaaattattaacctcaatttcgactatcctcatttttagtatctcttgttatgatgtttataacaaaatatttaaaactatttctcaacaaagtttttctggtgatggtaatgggaaaatacactattcaatccaggtatcaaaaatttagaagaataataaaaaagcactggggagaaattcttatattttcagaaaacagctggcggtacgcattttcacatgtaagaaatcatcctcgccctagtgaaccaacttatgtaggagcatatctaagatatggtctcgaatatctaaacaatgttctccctaattctaaacctggaaacaaacttgataaagagggttttcaactaaagtttgggggaatctttgtccatcaaagtcccatagtagaattggatcccaatcaccctcgtgtccgtgggctatccaaaaagagatgcgaaataggtgatctcctcgttatattcacgtttgttgatcagaacaaccttcctctaataaacagggcgtttctgtctcaagccaagattggtaataacccagtggaggatgcccaatatgtattatacgaagagaatgttagatttaggttttctagaccggacgaatgtaatattaaaaataactcctgcagtattactacacaaaactgtggacacagaacacaaggaaaccaaaacccccaaacttattctcgtagattcccttggagaagacctagatcacggggtttaaaatacctcagaatttatccggaatgtgaaacaacaagacttgaatttttagacagtgacaagtcatactattgccccccatggatctgttatttcccatggtgttgttgccataattatccatttggatgttctatttatggaatgatgataggttatgacgggtgggcgttttccacaaatcttagtctttctagctcccgtcagtgtggatggaatcatatcatccatgatcttctaagtgatactgcccatagagtttcaacattgggagggctaaaaaagaagaacaagctacaaagagggatgtacttaagctacttagtttctcagttcaatagatttgacaatactgatgaatacttcattggtttgaatccatttgataatccatctgggcctgaattccctaaggatcctgagcatccagagggatccgttgggataaacaccctactaataatggttaaagatacagaaatggagaatgaagcagaggaatactaaatagggcatggacatgttcatacatttgaggcatgttctcctctgttctccctttttgtgcccaaaatcgttctttaatctccgttaagccaaactaaaggttaaagaaagctttaaaactggagaatcagttcttccttttagtttggaggtgtggacatgaagaccaaggttgccatcatcggtgctgggataagcggtgcgagtatagcgcgcgtcttgagcaaatatgagaatctggaagttcatctaatagagaaagctcccgacgttggctggggcgtcagtaaagccaacactgccctcatccacggcggctacgatgatgaccctgagaagtatccgatgagggcaaagctctgcatcaggggaaaccgcctctggcaccagtgggttaaggagcttcaaattcctcatgtgtggaacggcgctctgatagtcgccacgaaggaagaggacttcgacgagctggagaagcttctggagcgcgggcggagaaacggcgtccccgaaatgaggatcgttgatagggatgagctcttccaccttgagccgggcctcacgagggaggcgataggtgctctatgggttccgatagttggccagatcggcccgattccagcggttatagccctggttgagaacgccgtggctaacggcgtcaaaacccaccttgagacggaagttaggggcataaggttgagaacggcgaggttaagggcgtcgagaccaacaacggcttcatcgaggcggacatcgttataaacgccgcaggcctctacgccgatgagattgctagaatggccggaatagactacttcgagatacacccgaggaagggtgaatactacctctttgacgacgatgttcccggcccgaggagggttctcttcccgacgccgacgccgataagcaagggtatcgttgttacaacggaaataagcggccacctcatgatagggccgaacgcccaggaccttccgcccgaggagaaggacaacctcgccactacggaggaggggctaagggaggtctgggagggtgctaaaaagctctggccgaacctcccgccgaagagcaaggtgataaggactttcgccgggctgaggcctgaacccaccggcggggacttcataatcaaggctgaggaagaggtatggggcttcataaacgtcgcgggaatacgctctccgggtttaactagcgctccagccatagcctacgaggtcagggacataatccagcgcgatctaggaattaatctcgtggagaaggaaaagtggaacccgtacaggaaggatataacccacttcttcatgctcccgccagagaaggcgaacgagctgataaagaagaacccctcttacggaaagatagtgtgcaggtgcaaccacgtgagcgagggcgatatccttgaggccattgagaggatgaagttcataggagttaagaccccgagcgttgattccgtaaagttcaggacgaaggcaacaacgggaacctgccagggaagcttctgcaggcccaagattgtccagcttttggccagggaatacggcgtcgagccctgggaggtaaccctcaagggaaggggaagcgagattggaataggcgacgttaaggcccttctcaggggggaggaagcatgatggagccgatgccgcagataccgatgctctcctacgacgtcgttgtcatcggcggtggcccggctggaatggcggccgcggcaaaggccaaggagcttgggctcaacgtactcctcctcgatgagaacgattatttaggcggaatcctcccgcagtgcatacacccaggctttggtctccactactttaaggaggagcttacaggcccggagttcgcgtcgaggctcgctaagcgcctggtggagctcggcgttgagtacaggacagccgcgagggtgctggagataaagaactactccgaccttgagaaggtggtgatattcacctcgcccgccggagtttatcaggtctgggcgaaggccatcatctacgcggccggagcaagagagaggcacgcctttgagatcggcatcgtaggagaccgtgtcgctggaatctatacggcaggagaggcccaaaccctcatggacatttacggcgtcctcccgggcaaagaggtcgtcatcgtcggctctggagatgtggggttaataatggcgcgcaggttcgcccttgagggtgcaaaggtgaaggcggtcgttgagctcatgccctatcctggcggtcttgcgaggaacgtcatgatacttcgcgatttcaacattcccctctatttgagccacaaggtcgttgaagtccgcggaaagggaagggttcagagggttagggtagtcaaggttgacgagaacttcaacgagattcctggaagcgagttctggatcgaggtcgatacgctggttatctccgctggattaattccgagcgtcaagaagctcaagaagataggcgtcgagatagaccctgccactgggggtccggtcgtgaatgaccgtcttgaaaccagcgttcctggaatcttcgttgccggaaactctctcctcataaacgacctcgttgactacgtggccgagcagggagagttagcggctaagagtgccaaggagttcatagagaatggcggaatagagagcaggaagtgggtgaaagttgagaagggccagaacgtccgcctgattgctccgcactacctcggcggcgaccgcgacgtttatctctacctccgcgtcgccaggccgatggagaacgttgagctaaggattcccgagattggaaagaagctcagactcccggttgttaaacccgccgagatgatacggctgaagctgagggcagaggagattcagaaagccagcgaaaggctcacagttgaggtggtgagagcatgatataccgcttcacgtgcattgtctgccccctcggatgctccattgaagttgacgtcgaaaacggtaaggtcaaggaagtaaagggttgtaaatgccctaggggaatggagtgggcaattcaggaagttaccagtccaaaaagggtcgtcatgagcgttgtcccagttgagggcggtgccctcccgacggtgagcgttaaaacagcggagcccgttccaaaggaaaagataccagagctgatgaagttcctggcaaaacttaagctcaaggcaccggtgagcgttggccaagtggttgcggagtgggaagggataaaaatagtggccacgaggggcgcttagcccctcacccaaatacttcctcaaagtctcctgcgctttctattccctctggaattgttatgttggtgggcttgtttatgtctgaaaagaccgttgaatcgtggattgtctcgtggatggttacgggttcttgcaggaattcatcagggattattattgttaagtctatgtaggtctcaataaacgttggagtcccgtcgtctctgaagtggacctcgacccagccagcgttcgtgttgaccgttatgttgtcggagagcgggccccacgcctcgttgaggtatgtggtctggttagtagcgttgacgaactcccagaaagttacgttaacgcggaaggcgtagacatcgcctagttttttgaaagtcacgtttttctccctgaggagcttctctatatagtccacatttagagaggctctggctctgttgtggaggtcattgttggatgggacgaagtaccatttgccgtcgatattaaagtatacgtcggagccgttggtgaaatacggccagttcatatttatgtccatccccatcatgcgggttgttaagttcatattgcctgcttcaatgcccgcgctcttgttgaagactccggctatgctgcctgacatcgtcacgttgaccgtcttgttggtgttcggatcaaatatgttcatgctcatggagaagctttcattgtagcgggcagtctctatgttctggatagccgttagaaccttctccttggtgagtccagcattttctccaatacagccgctcataactactattatagctaggaggaatgttgttaggatttttctcatattattacctccgtatgttgtttcataataaaccttgaatatgagtttaaatactttttggaatactgagttattgcaattagtttgatatttaaacatgcgaaaacactagattgggaaaaggtgagataatgtaatggtctttgacaatccagaagaaactatggggatagttctttgagccatttgggctgtacacagttctcttttattgctgcgataattgttctattttcactctgtcttccctgtgtccacacttccacgttgaatataagtttggtgacccttccaccatcccagaggacggtaacagtgccgttcattttgaagtctgtgctcggtgacagagttatctcaaaggcgtatgtaattttgtccttattcttttccacaagttttcccaccccgacggcctgaagacccattttaactggatcaaccgataagaacatggccctttcgtcctttgagagagtgatgttaacgtccttcgtggtcccgtttgtcatgatacgctccttcagcgtgttgttgatgacaacggcgtaccagtgcagtccggagcgctggccctcaaagtagtacgtcccgtttatcctgctcccatttattgaggactcaatggtttcgtccccgatgattgtggtgatgttttcatgataggaatagcagtccaaaccgccgagataggctaaaatctgtgctctactggtgtctacttgaggcgagtggtcactggccctctgggtgtagaggtagcccccaaggacaactaatccaattatgagagcccctagaaccgctcgtgagcccttcatttgggctcacctccgttcatccgcttatcaacgccgtaaatttctgaaggaatattttgaggtcagtcttgaacggctcctttgccctctccatttcctcattgagaagctcgatgaagttcttttcatcagtggcctcttcccacagtttttcaactagctctttaagccgatcccagtactcgacgtaaggcctcgcctcgaagagtgcttcatctaggacttccttccccttcaccgcatacccctcctgaacaggtagtaccagagtttgcttctctcctccatctcggctagcatgaggaagtagcgcagtattgcagcgttgagcaggataaggaatataagtactagattgtaggcagggattccagcgctgaggaacgcgaaatagtcccagatcgcgtgcaggaacattgccaggatcagaaagcttcccgttgaatacgcttttccctcggacaccagcccgtaccccacgcctactatggcactccacgtggcgtgagcaaatggtgttaagaaagccctcgctattgtgactcccactccccagccgagtccgtagaggaagttctcagtggcggcgaacccaaggcctgccgcgacaccgtagacaagcccgtccataatgccgtctatctggcccgccgcgaaggggtaccttattgcgagtgcctttgcgggctcttctacaatccccgccactagcgcaacgtaaaaggccgttgcaggtaggatcggctttattatcccccctatagtgagcacgctttcaagaatatatgagattccgactgacagagtggctccgagtaggaacgttgccactacgtatctctttggctctggctcatatttgtccttgtggtaaaagtaccatagtatggcgagtgtcggggcgtaggcgaagaacgcgatatacgttatgagactcatcttcgcgacctccattttattctgcccttcgatgtttaaaccttttgctacagcctttttagggcttcctgaagttttgatagagttccaaagtcgagaacctccctgcccacaggtactaaaactctaaagtcctctcgtctgtacttcaaaaaaggggacacgatctccctcaaaacatcgttgccgtaggcccaagggctgaacgctggcaggactatcagatgtttccccattagaaacgcaggcactttgataacggccccaacctcgtccctcagtcttattgcggggtgttcgtgcccgattatgaagttctcaccctccacgagtttgtgcccatgaacgagcttccatcttccaatttcaagttcatccacaatctcaaccccaagttccttcagccaaagaacgccaacgtcgtggttgcccctcactaagactatctctgataccaggggagacacctcttcgagaaaagttctgagctctgttttttcccgccactcaggaacaaatgagtgcttgaagtccccgtttattatcagccccttcggcttttccctttgtatgatgtttttcaaattcctaacaacgtcgtgaaagaccctggggagatagaacccctctttggccatcgctatttcgtagccgaggtgaacgtcggctatgataacgttctttcccagttttagtgctttctctggtagaggttttggtttcatggtagaaagtttgtgctttggcttttaagttttgttaggggaaccgaaaaggttttaacttctgaccagtatttcacaggggtgagtaaagatggcctacattgggttcgctcgaagtccttacaatccttcaaaaacttatgagacgatacttgaggaactgagaaggcgggggtttgaagtgggtttttcaaagcatcactggatgggtgacgccccgtttggacttatcattgctgagacaaacaagggggacgttgctataagatggtcgctgggtaaggagtttcgtctgagacttgaggaaactgaaaaagaagattatgacgagtttgttgaagacactctggagtacctcagcggcgattgaccacgtgaatcccggtcgagttcgttatttttcccagttctttgatgggcatcagcatgtagttgttgcttagggagggagctttatatccaacgtatgagccgtttatgaacatccagtcgccaatctggcggaagtatatgtacccatcgtttgttgaggttgttccgacccaaacgtctatggttaacgtttcaggaagtttcgtgaagttcgcagtgaggtatccatatatcagctctcccttgcactcggacgaaggtatttcttcggaggggttaattactttgagtgctttagaatccagctcataaacaacaagcttcccagggggggtgtagttgtaaacgtaagccactacacagtcagtcagtaccctatcctctactttgaactgccacgttccgttgggggctgtggttccaatgtaaacggctgttacatttggttccgctgatcttatgctctctgatatcttgttcatccagggggttgttgatagtactgtaatcaccacgaacagcaccagcaggaggatcaataccctgttttttagaggattggtcatgggcatctcctaggaataagtaggaaaaagagaataaaatactttatgctttttctttggcacttctcctctgcctctcgacgtttttgattacatcgaacagactccacagatcccttatcacgtggaggtggggtattagagccagcatctctcgcttcttctccacgaacttcgccgtaatggggaagtagtaccagacgtattccgtgttctcatcgccgtgccctatgaagcgccacggcttgtcgtcaacccagataaagatatcgtcgccatacttctcgcgcaccagcttgaatgcctcctctatcgtcaaatcccttccgaatacaatgacgtcatcaaagaggtcgtatatccccatcgccttcagccttttgaccttcattccgtcaatgaagtcttcggccgagaaggaaattacagtgtgaccctgctccttaagcttcttcaggagttccggtgcgtcgtcaatcggcttgctaagcttggccctttcctcaaaccaggtctcaaagaacttcgttctcatgaagaatggggacttaattttgcccttgtgctttccaaaggttggcctctcgaactgaaactctattttggtgagcagcttcgcccagagggcttttccggggagccagcggtagcgcttttctagagcacgcttaaaagcatcttcgatgcatgaataagtatcggcaagagtcccgtcgaagtcgaaggcgattatcatttcccatcctcctccagcgttacgtaaatgtgacctgcttttatgtgcatcgattgaaagtcgtctgtcggcccgtaggcccagatgatcctgaaagactcttctgtgggtataacgtagtcatacccgtcaccagtattcaacggtcttgagaactcaacaacggttccgttctcgtcctcgcgtccgccgtaagatagtatgtcggtgtgtcccccaaggaacgtgtcgggattatgcggtccagagaagcccgtcgagtacgagtcgcttatttcaccagtcccgttggggagaacatatgctatcactatgtctgtgttcctcattccaggtccgccgccgaaaccaattgccacccagccatgggtttccgcggaaattccgacgtagagtgtgtcgttctcaacgcggaagtgaagggacatttcaccaacgttcttttctactgtgtattcgcctctgcttattttgccatcagctatccactgtacttgttcagtctggggatgagggttgtttttggaagttcccaggcatcccaaggaaagatgggctattgttaggataagactaactatcgcgatcacggtgaccctcttcctgttcataacatcttggaagggccagccacttttaaaagtatttcgagcgccgttaattttttaggcctatctcctgtatccgccatgcataaaatctcgaggtgataaaatgaaggccgttaaagccctggcggttctggctttactcctcggtaatctaggctttgtaagtgcgtggccgaccaacggcccaaccctcgacgacccgatgaacgtccaccagaagctgacatacaaggccatcgaggcggtctatgcagacaacccggggctcggcgctatcctcatgcagtacaaggatcagctcctctacggcgcctacgacgaggactggcgcggtgggaacataacgttcaacgggaaagtgtacaccctccagagccagtaccacttcttggatcctatggatcacgccgagctgataaccgttgacctctttggcgacggaaagtcttccgccgccgacatggcccagcagctctacgatcaggccgttcagctctggaagcagggaaagaaggaagaggccatgctctacctcggaagggccgtccacatccttgaggacatgagcatgctcatagcccatactactccgcacctctttgagaccctcgacgagttcagctacgcggaagaggcccacgacttcgttgaaaacgatatttctccgacggtcgccgatgacatccttaacaaccgcgttcccctcgacctcacgcccataaagtggtggcagataccccaggagaagcagaggtttataatcggtgaggacatctacgttgcagacaacgagaacggtcatatggatctttcccacggcgtcgcctgggcctacgcggacatgatagcccacaacgcctggcgctacatgctctattccacagggaaggacatcaatctctggagcgagcgcggccatctcggaagctacttctggacgaaggagcttaagaagggtgattggagcatactcaagctccagttccttggagcgagttcgataaccattgtcttcaaggacatagacatgcagaacgcctacttcaagaccctcggctacgtcgagatatacgacaagaactggaacctcatagcgcgctacgctcaggatccaaacccgctggtggatacgagcgtcaccgttccaggggataccgtctatatctacacccacgttgataaggacgactggcttgacgacgacgttgacggctgggccatcaggaacatcgaactccatgccaacttcgacgtcaacgctccgagcggcttcaagaccctcgacggaagggagtacagcaaggttcagtgggcggtttacgagaccatgcagtacgacatcagggccgtcgctggtctcatggagaagttcttcgaggacgttggtgtcagcgggtgatctttcgattttgatttaacttttttgaaactattttggtgtggatagggtaatgttgatgtcgctttttgtccatatccctaattcagtccatcatgccacaaagcatatattatcctgcaccaactttcaatgagcatttaaaagcttagaaggtgataagtatgggcaaacactacatcccgaactcagcccataaagatgaaatgctgaaggaaatcggcttttcctcgattgaagacctgttctcggacgttccaaaaggaatggtaaaggagttcaaccttcccgagggtaagagcgagtacgaggttttcacggagctcaatgagacgctgagcaaaaacaagacagtccttgagatgccgagcttccttggagcgggaacatacttccactatgtcccggcccacgtgaagtaccttatcgagagaagcgagttcctcaccgcttatactccctaccagccggagataagccagggtatgcttcaggccctctttgagtaccagagcctcatagctgaactcgtcggccttcccattgttaactcctcgatgtacgattggggaacagcaatggctgaagccgccctgatgtcagcccgcgtgacgaagaggaacaagttcgtcgttccgaagcacctcagccccgagaagaagcttgtcctcaagacctacaccgccggcccgggccttgagacggttgaggttccctgggacgagagggggcagatggatatcgagaagctcaaggaagcggttgaaggtgccgccggcgtttacatcgagatgccgaacttcttcggcctgcttgaggagaacataagggaaatcggtgagatagcccacgatgctggcgctttgttcgtggttggcgttgaccccacgatcctcggaattgtcgaggcacctggagagcttggggctgatatagtcgttggcgaggctgcttacttcggcaacccgatgaacttcggaggcccgagggctggaatttttgcggtcagaaacgacaggaagctgattaggcagatgccaggaaggataataggcatgacaaaggacgcggacggaaagagggctttcgtgatgaccctccagacgagggagcagcacataaggcgcgctaaggccacctccaatatctgttccaacgaggccctcgttgccgtcgcagcggccatacacctcgctacacttggcccgaagggcgttagggagctcggcgaggtcatactcaagaacactgcctacctgaagaagcgcctggctgaggtcggggagatagtctttgacggagtgaacttcaaggacgtgccggtaaggtttgaggttccgtacagcgtgatccacgagaggctccttgagaggaacattcacggcggttactacatcggaaaacacttccaggagcttggggagaccgctctcttcgccgctaccgaaaccacgaggaaggaatgggtcgatggtctcgttgatgcccttcgggagataataggagaggccgagctgtgaggtgatgaagatgttccaccaggcaaaatgggatgaacctactatatttgagctttcccgtcccggaaggattggatacaccctacccaagcccatcgaggacgttgatgtcgatattcctgagaagctgaggaggaagagcccactcaacctcccggagctgagcgagcccgaggttgttaaacactacaccagactgagcgagatgaactacggcgttgattcaggtatctacccgctcggttcgtgcaccatgaagtacaaccccaagatcaatgaagagatagcctcccatccaggtgttgcctatgtgcacccgtatcaggacgaaggaaccgtccagggagcgctcaagataatgtgggagcttgagcagtggcttaaggaaataactggaatggaccgcttcaccctccagccggctgccggagcgaacggcgagttcactggagtttccataatccgcgcctatcacattgaccgcggtgagacccagaggacggagatgctcgttcctgattccgcccacggaacgaaccctgcaagcgcagccatggccggcttcaaggtcatagagataccctcaaacgagaacggaacggttgaccttgaggcccttgagaacgccgtcagcgagaggacggcagggttaatgctaacgaacccgaacacattgggcatcttcgaggacgagatacttgagatagcgaagatagtccacaaagcaggtggtctgctctactacgacggtgccaaccttaacgccgtcctcggaaagataaggccgggggacatgggcttcgacgtcgttcacctcaaccttcacaaaaccttctcgactccccacggtggcggcggcccgggaagcgggcccgttggagtgaaggacttcctcaaggactacctccccgtcccgctcgtaagctacgatgcagagaacgaccgctactacctcgactacaacgttccgaggagcataggcaaggtaaaggagctctacggcaactttgcggttattgttagggccctgacctacctcaagataatgggaagggaggggctcaaagaggtcagtgaagtcgccgttctcaacgccaactaccttacccagaagctcaagggaactcgcggttacgaactcccaggcaaagagcttagaaagcacgagactgtcttttcagcagagccgatgaagaaggagacgggcgttaaggcccttgacgttgcgaagaggctactcgacttctgcatgcacgcgccgaccatctacttcccgctgatagtccatgaagcgcttatgatagagccgactgagaccgtcagcaaggaggagcttgatgcatacgttgaggctctcaagaggatcagcgaggaggcatacagcaatccggaagttgtcacgagcgcaccccacaacaccgccgtcaggagagttgatgacgttttggctgcaaagaagcccgtgatcacctggaggatgtacagagagctgaaggagaggggagagatagactactgagcttttcgttttagttttatctttctctttgaatttgcctctcttgtaagcgtatgctcccctagaaagcaggttcgcgtgtgggtttgctcttaaaaatctctcgttaattgtgatttcgaactttctttttagcgctcttcgagcgctatacggtgagaaaatcctgtaagtctggcaactcgataagtaaacccactcaaaagtcagctcgctaaaaacgcatactactcttccgccatccttcaaggacgcttgaacgacagtgaaagcggcgctgaaactttgcaaagcaaagtttcatcaaagttcgtggttcttgattagaaggcggttctggggagattttcattcaggagctcgctgtatgagtgcgaattcgattttagtaagagttctcggtgtgagtttgctttttaatcgacgcccgtagggcgtcagggtgttagaaactccttcccagttggcatgtctgaagaattcactcacttttagctcttatattgtgaaaatccttgtagtggggcaattctaaaagaaaccacaaaccttgatcaaacttcgcgcaggcgaacaagcttttggaaaaagcttgaccaaaagtgttccctttctttgtgaagagcaaaaagccagttgtgccctattcaaggggcaagtttcgatgggttttatcttaaaatcatccctcttcaattagtttcaactttattattggcgcccgaaggcgccttagacagtgaaacactcactaaagaagcaagcgggtaaaaaacccttttagaatctgaaccttgtatgggaggcacgtaattttccgccagcgctgaagcttttagaaaaagcttcaccaaaagattgaatgtctttgtgaaattggttgagaagtagattctcctgatgaacaagcaaagaaatactggttttcttcttttttaacgccctttgggcgttatattgtgagcaaaccccttgagaattgccaattggcaattgagaatcactgaaactcagcagtttaaaaaggacattcactctttgatgaaactttgcactgcaaagtttctgtggtgcgggggcggggatttgaaccccggaacccctgcgggagtggatcttgagtccaccgcctttgaccaggctcggcaacccccgcacccaaaggcgaattcaccaccaaagcgccgctcctaataagcgtaaccgccgtcacgacctcctcaaccgtcaaatcctcagacaaagccacctcaagcaagctcgcaaccacgcggctcacgttatcccagcgctccttggccttccagtatatctctggcggtagcgtaatgtgcagacgcggtgaaaggcgcctcggcttcctccgcttccgcgctccagcctgctcccgctccccagcataggagtgtccagacacaccagacgattttaccatgacgaaaacacccaccagactttataaatttttagcctaaaagccttacgaattgaacaactttaacccgacacccgtcgtaaagtacagaaaagaacaccaaaaaagcccgctcgtgccttctttttgtcctggtcctgcagcagctcggcagcaggacctccgaccaggaacgacacatgacgaaaagaacgtgaaacccaccgccagaacaaccccattacctacccaaatgaaccttcacaaactcgaaaaacccgccaaccgactgctcctgagacctactcgcaggaaccttcctcccaccaaaatgcttgtgaaaaggccaactcccagcctcagaatgatacggcttattgtcccaccgaaccaaaatagaagcaccctccttctccgaaaaagcacgattaaacttaacagacctaaactccctccccaaatccctcacattcctaagcaccctacgcgtcttctcatgaggagaaacccacgaaaaactaacatcacaaaacacaatcttccccaagcttacatcctcaaccataaaactcacacgaagagcgaaaacagtcccatcccgaaaaacacccctcacatccaacataccatcagcactaacaatccaataatccctcacaacaccactacgcttaaacatctccacatcagcaacaatctccctaaccttcccccgaatccaagaggacacatcctcatctgactctaacggccgagaatgaacctcaaaaacagaatccatagctcatcccttgagcgcgtggtacatcctcagatcccaaacatgctcctcaagccacaaatcctcgctttccatagccatcttctcaagctcctcaagatcggcagtcccatacatctcacgaatatcctcaaccaaagactcatagaactcaagagcatcctcacgagaaagagtcttctccttaatcaacttatccacctcctcaggagaaggccgaggaccagaaataacaatctcaaccgacgtagtacgctgaaccgtaatcgtccccatacccggaacactcggatgaacagcagcaggaacaacagcacgcttcttcctcttccccacttctcccaccaataaaaactcaacaaagaacattaaaaatctgtcgaaaataaaaaattactgcaaacctaaccccccaccagaacaactctcaagtcttagaccccttcccaaaacacctgtacccaactaacattcccacagcatacatcgccaagagaagtacatcttcatcccccggccggtattttcccaacaaatacttcaacctcatgaattcattacaagtcaaggcctcaggaccataccgcctaaactttcgaagaagctcttccaactccctacgctcaggatcgttctcaggcctttcctcctttacagacctaaccacatcttgaatgctggattgaacactagaaaccttttcccttgcaatccctctcgttctcttatttaagaatctcacggcctcctcctcgaagggaggcgtcaagaaaaacaacagagcaccagcaacaaggactgaaacccagaagttcccagtcagcatccacaaagacgctcccaccgctcccgagatgacaccaggcaatgagaccattcccacaagttcaagaacccaccacctctcttgccaatacgagactataccaaccacaattcatcacctcgccaaaattcattgagaattcttggataaaagtttttcttaagaagcaccaaataatgaacggtgccaaaaatgacgacaataaacattgacatctcccaaatagcaaacacagttctcggcataataatctccttcctgatcatacgggtttaccagctcggagaacgctcagcaaggaacgaagagaaaataaaagaaaacaccgaacaattcgacaaaatgaacaagacaatagaaaacataaacaagaacatcctcgacctaaaagaaagaatgagcaaagtagaaaaaggcttagacgacctccccaccctaattctcacaaccctcgaaaaagaattggcaaacctcgaaaaccgcatcataagaggtgagcatcatgactaaactaacactcgaagaagtccaaagaagaagagaactaaccgaaaaactccgagcaggaaccataaccagagacgaagccatagaactcgcacaaatcctcgaaaaagaaaagaaaatcgccgaagaacaaaaagacttcaacgcactcctcgcgataatcctcctcctcggcctactctacgcactcacaaaagaaaaataaacctaaccctccaccggaacaacctcaagactttggcctcatcgcttcttcttgttgtttgatcctgttttagcagattttggcacttttatgacttctgtgatcaccagcctcacaaagtctccatcttctatgttcaaaagatcccggatatccttcgggattacaaccctcccattcgcgctgacccttccaacaatctcgacgttgtccaccttcgccacgagcaccacctaagacattttgccatttttgacataaatacctaacggttttgtatttttgacatatatgacattatgacatcaaaaacaatgacgacatttttaccacaaaccttatttgcgatgacattaatgacatttttgacaaaaatgtcaaggtgtcgccaatgcgcgttgtctcggtgtttgagttgagggagcttcccctcgaggaagccatgaagaagctcgacgaagccgactgggtcctggacgaggacagcctcttctacccggccgacctgtacagggaattcatccccgccaacaactggagaaatctcccgaaacgggagaaaactgcctcacaccctaagaggccgcgcaactactacaggagggtgagaccatgaggcgtgaggaggttctggagttgatgaaggatctacaccgctacctcggtgatatgggtctgactccctgcgttggcaacaactactggcctgctgacgacagctacgtgctgagggtacatgcctcaaagctgtaccgggaggacctggaaagaatcctcacattcgcaaaggagcgcaacctggaggtcctcatcgacataaggcacggactcctcgaaatcgagttctacgacacaaaacacgtcggtggggactggtgaggaggtgagggcatgactgctgaccttgaggaaaagctcaggaaactcttgcaatcgcaaaaggctgagcttgaggagtggctgagggaagccagggaattcgttgcagacgtggctatagaggaagggaagtatggctacaatgacactatgtaccctccggagctgtttgaagacgccctcaaggcggaggtgcttgatgaagagattgaagatgtgaaagagctggtcaggatgataacggccattctcgaggaggtgagaccatgagcaggcgcgggagaaaacccgttctcaaggcatggcttgtgagaatacacgggagagaaaaccgcgagataataatccaagccaagacgcgggaggaagccgagagaacggctcgcttcatcgtcaaacagagctttcctttttcgagctactctctcaaaaacctcgggagggtgagggaatgagctggctggcggttctcggcaggttcgcggaggagtttgagatcaggctcgtagatctctctgaagttcaacagatcgtcatcatgaacagcctctacggcggcggagaacacatcgaggtggatcttctcctcaggggtggggagaaggttcacgtgagagatcttccgacctctgccgacatcgagaagatcgtcagggacctcaacctcgaggtcaggaggagtaaggctggaaagagtgatttaagcattctcgcggttgaggagactggagtgaggcgcttcagcttctcagagcttgaacagctcaggaactttccagaagaaacaggggtgagagcatgacccgcgccgttctctattttgatgtttcccagctctcggaattctccaaggctctccagagaatcgaggagcttagaatcatcgtccccgttgaagtcgagaaaatcactacaatcgaggacgacatcgcggtcatcctcaacgtccccgaggactccatcgagcttgtcaaaaatgctctcccgtcggcggtggtggtagcatgacggagtgggttgtcatcagatacaagttcaacgaaataacaaagtgctgggagtacgacggagtgacaatcctcggttctgatgagctacttttagagtatctccgctcgcaggctggtagcgtactacattaccggtacgaaatcacgaccatgctcaggccggaaaggagggatgtcgaatgaccaacgacggcgacaggaggaaccttatcacgaccagcagagagatcaggaaagtaaggaggcagaccataagcgccatcttcaaccagcttcagggattcagcgcacacgaagagttctcagacctcgtccaggaggccaaggagaagtatggcatcaccaggatcggcgtcttcgacgtggacatgatcatctgggacttcaagaacgccatgccaatagcgctcctcgaagtcaaaaaccgccaccagctccaggagagcgacggctacgccatctttgatgagcctcaatacaccttcctcgaggacctcggcaactacctcggcgttcccgtcttctacgtggtcaagacgcgggtgaagtggctcgtctggaaggtcgagagaggcctcgccgtgaggagaaagctcgccgacgggaggaagatagttctccttccactggacaaggccgaacgctacaaccacggcgagatggttcacaggtttctgaagaggctgatggagaggtgagagaatggacgacatcaaaaaggtaggcctcggcctcttgctcgggattctgatagagaaatatgctccaggagccgttgaggccacaggaaaggccgtcaaaactactatcctaactccaataaaggtgatagagagatgcctagaggaactgtgaatcactcctcagctcgcttctccctcacaaccccgccgctgataagcccgccaaggatgctgaacaggtacccagctatagtgccaagaagaaacgaaacaccctcgttactcagaaccttctcattaccaaggtacagaaccccactaatcagagttatcgcaagaattgataaagtgataaccgtcctgctccagtatcggtacttctccagctcaagctcctttcgggaggtaatatctttctccctaacatcaaaatacctgtccccaagccgctcaacagcctttatcgccttattcaaagtctccagtaactccctatcaacggcctttggagactccttgggagtctcaggtatctcaaaatcaaccttatcctcggccattctaccacccgacaccctttcggtttttgcggacttaaccctttcggaggtgatagggtatggactgggtgttcttcctcttcggcttcatgctcgggagcatgatagggatctccttcgggatcctgctcagggacgagatgaagaggtcctgaccatgctttcttttctttgcaaaaatctttcaaaatcatgcgggagggagagagaatgagtgagagagagagggtgagatgttaacaaaagttacagacgttacaggcgagatttcggaaaataaagacaattctggcgttacaaatgagatgtatcggaatgtaactgaggtaaccgaaaagtatcggaatgtaatcgagtttctaaacctaatccagaaagcgtttaatctacaaagaactgttgaagccctaccctattatgttctctggaccaatgggagactcagcttaacaaagttgaaggagataatggaagaatacaacagccatttacctaagccatatactcacagttccttaaaagtagctttatccgttcttcgccgtgataagaccaacgtcctcgaggtgaaggacaaggagctcggcattacctactatgagctgaagcctgaggcagtggaggagattctgaatgttcttcaggttgaggctaagctcagggagctggaggaggccaaggctaaggatcatgaggacttggtgaatctcgctcgtgagttcttcagggagttttacagggataggatcgcggaggctttgacgggttcgagggatcggtttattgttgtggactggatggagcttaatgctgtcctgcctcagctggcggaggccgttgtcgagcgtcctgttgttgccatcaaggccttcaacgatgccttgaggcggttcgttgaggaggacctgatggtcgaggtcaggggggagtggtcggttcacttcacgaatcttagggataagctgaagcctgaggatgttagggcggagcatgttgggaagctggttgagatcaagggtctagttactggggtgagtaatgtccggtcgttttacaggaaggcggtgttcgtgtgtttggactgtggcgcgaggatggcgaggctgcagcagcctttgaagcctctggtaaggccgaagaggtgtgaggcctgtggttcgaggaacgttgaactgctcgaggaggagagtgataagctggacttccagtttttcaaagtgcaggattcgcctgaggatttgagtggtggtgagccgtcggagaggctggcttacgtgattggtcctcaggctgggattctgaagggtggtatgcgggttcggttgagcgctattgttcgggagcgtgtttacaagaaggatgatcttccggtctatgagcgggttctggaggtgaatcatgtggaggttctggacaaggccatgtcggttgaggagctgagcgaggaggacctgaggagggtcagggagctggcgagggtgcatggggataagctgccttttgtggtggcttcttcgattgcgccgaatctctacggcttggagagggagaagttgggtgcggctgtgtctattgttggtggcgtcccgactcaggcgaagccgaggggtcatattcacctcttgctcgttggtgatcctgggtgtggtaagactgagctgttgggggccgtggagagggttgcgcctaaggcgatctttacctctggtcccgggtcgagtggcgttggccttacggcgacggttaagaggaacgaggtcagtaagggggactggatgatcgttggcggtgcgctggtcctggcgagtgggggagtatgccttattgatgagctggagaagatgaaagaggatgagcggaaggctttacacacggccatggagcagcagcttatcccgatcaataaggctgggattaacgtggtcctcaagattgacacgacgatcatggcgactgctaacccaaagggtgggaagtttgaccgggataagacggtgattgagcagattgactttccgccgacgcttcttaatcgctttgacctggcttttgtcgtcctggacgattaccaggagggggatgatgtcctggactacgtgatggaggtgaacgatgctggagcagcgggacctatacctgaggacctgctgaggaagttctttgtttatgcgaggagtttgaggccgaggttctcggaggaggctaaggaggccattaaggctggcttcaaggagttaaggaagaagtataagagcgggaaaatcgcgctgaatctgcgttatttcaatggccttatgaggatcgcggaggcctttgctaagctgaggttgagtgagacggtggagcctgttgatgttgagagagcggtgaacctctttgagtcttcgatcaggatgattgcgtatgatcctgagacggatcagtatgacttggccatcctcgaggttggggtgccgagtgatgtgctggaccttcaggagagggtgattggttttctgagggaagcctcttcttggttcccgaatggggttccttgggggactgtggtggatgctatggtggagaagggttatccaaaggagaaggtggtgcaggtcctacgggatcttatgactcatgggagagttgcggaggttgaggctaatagattgaagttggtggggtgatctcccgtttcgggagatttctccatttttctggttcagtgtttaaatcaccagggtgaaaatgggtgattgagggggattcacccaggatccccgggtgaaaaagggtgaatccctcaaaatcccccggtgaaattgggggattctggtggtgagaccggtgggtgatggcgagaggaagtactacatctgtttgaggtgtggtcataggttctggagcagggctaagaagcctcagtgctcggtttgcaggtctaagagggtcatgctttacgaggactttctgaagcttcctgaagaggagaagcagaagcttcttggaggctttaaggttcagcaggtacatggggatgagcagggagaaagggtgaaatcgggggattctcagggtgattctaaggtggtttcgggggatgttgaggggaatccctcagaatccccgggtgaaagtgggggagatagggtgaaaatgggtgaatcccccgaaatcaccaagaatccccaggtgaaaaagggtgattcacccaaaatcccccaggtgaactcgggggatacgaaaggggagaaggtgaagggtgaaagggtgaagcggttttctctgccgaggcctaagctgtcgtggaaggtttacgctattggcattggcctggcttttgcgtactatctctataaggttggctggttcgatgagctgttcaggcacttgaagaggcttggagcgttgaaggacgctaaggaggatgaggaggacaagccggtcgtccggtcgagtcctgttctggggaagattgaggagaacctgaggaggggttgagggtgtttgataaggcgaaacttgccatggcgatggcaaaccctgttactgccgtgaaagtgaagaggctcagtgattgggttgattccctggtggaagcgttggatgagactgacgttgaaccgccggagagcgaggactttcaggatgccgtcatgactctcctcagcaaggcgaaggtgaaacacctggaggaccggaattccctggtgattgagctgggtaagaagaggaagcttaggcttgttgcgagctttaaggtgattggtgatgagtgatttgcgggtgattgtaacgatttctgagacaggggactgtgtgtttgaagtcattggacaggctgaggctacgttacggcagattgggttggcggttctttaccttgagaaagctaagcggtatctcctcgaccttgaggaggccattgaacctgatatgaaaatggtcattaagggtgagggtgatgagtgaggaagccgttgctcaagaggtcgtcctggacgagaaggacattacctctctcgtcgaggatgttgataaggacctcgaggaggttgaggagctactgaatgagggggaggccgaggttgaagaggttgccgggacttcaggcttaatgactgaggaggagttcaacgcgaggattgatgagttccaggagaaggatcacagccttaccatctttgccaatttttacgtgaagaaccttgagaggaaggcgagggagcaggggttggatgtggacttttccctgtggtgggacgttggccggccttcgttcaatgctggcctctggtacatggagaaggtcgagggtcagagtctccaggtgagcgggaagtttggccttctagtcggtgctgggagtttgcttctcctgacgtggatgtataggagtgctttgaagaagaagggtaaagagaaggccgataagggtccggctgctgggggtgagaagaggacgggtgagcctgagaagccggttaagactgaggccgaggccttgagggagaaggcgaagccgaaggagcctgagcctcctaaaagcgagcttttgaataagattcagaagaaccttggttcttgatttctctttttggaggtgggatcgtggcgattctggacgtggatattccgccgtggagcattgatttaatctatgggaacacggggagcgggaagagctttttcgctgggtggcttattgagcaggcttatgagaggggtaggaggttcatcgtgctggatacgaaggttaagaaccacatcggtctggttacccttcctggggttaagctgctcaaggtaaaggtgggtgcgaggtacaactggaaaaagctcattgattttgatcaggtcctcgtggtccctacgagggggactatcagcaggattggcgtggacggccttgtggagcagtactataagcctcttctggatgagctgttcaggcgggatcgagataggattattgtggtggaggaggctcataggtataatccgtcctcgaggaggccggggaaggagttggagcagttgtttagggagggtcgtgatgggaggctctacacggtggcgattactcagtcgatagcggattttccaaagctcctctttcgtcaggcgcagcggcattttatcttccagcactacgttccgaatgacatcatttacctcaacaggatgattccggggttttctgagttgaacgatcagttgagaaagcacgatttggtggagtttgttccgccggataaggtgagggtgatcaagcgcgaattggtcatcaggaggacgaggcactacgggtgatgctatggcgagggagtacctgtttgatgactggcgttcggtgttccatgctctccttggctttgcttcggcgttccttttggcatggagcttagtagttttggttatgttcactctgtatgagatcagtgaatcggagaaaccggctgctactctaggggacgtggtcgagttcctggtcggctacatttatgggttggctgtcgtggtctggctggcgttagggttttatgtctaaacatcgataagtgggtggtgagaccggtgggggtttaccttgaccaagaggcgagggagattgtgttgagggttcgtgagaggctggcgagagagcttggcgtttctccacgggacgtgtcggtgagcatggtgatcaagcacctctatcacaggagctataagctggagaaaacggtttaatcgaactgtttttcccgtttcgggagatttctccatttttttggttcagtacttaaaagtcattgagccttattctccctcgaggccgttaggcctcaaaagtgcgagaggtggtaggtatggaggactggaagaagataatgagtgtggactttgccatgaacgttctgggtgttataatcggcctgatagtttacaacaagttcctgaaggggaagttctgaaggcggggtagtgaaatcagggaggtgtgaaccgtgtataaggtgaaagaaacccttgatgacgttcttaacctgacggttaagagcgttgatattccccgcaacggggttattgacagcatagcgcttcttacaaagcttacgctttccaacagcggagcttctgacactaacgttactatggaggacgtacttaaggcgattaatgaaataagagttgttagcaacggtaatgttgttcactacgcacttaagggaactgacatcggttacctgaacatttacgacactcacgggaaggcgcttagcctcaacgatacggttagcgttccggctggtgggactcaggatgtccagttcctcatggttctcgatgctgggaagattcacgcactcataaaagaccagcttcagattaaggccgagtggaacaccagcgtagccactaacgttagccttagcgatgcagaggttaagataactctcgataaggaggtttatgagagcgggagtgaatacgtcgccgtctattcggcgggtgattacggcgagatattcatcgaagagccgaaagtttacgctatcgagaaggcgtttaaccagctcggagagcttacggaagtctttgagcttccggttggttcagtccttaagcgtgcgcttatggtcttctacgacgacaccggagcgagagctgacatcgtagataagtacgcactcgttaggactaggccggctaggattcagctttacaagattgactacaacaccagccgtgagctggacaaggtacagtataagctttccagcgtcccgaccggtatgactatgtttgattacgaccgtgaggtcgtcatcggtggactcgacctccgtgaggagagttcgggaactttcaagattgcgcttaagaccactagcgccggaaagctgaggtacattagtcacgaaatagttccgcaggtcataagcctttaaatcagaggcttaaatcagtctttcttttctctctattctctgagaacttaacgaggtgggtaaaatggttcaggtcgtaacttttgatattggaggcggccacaaagccgtttatacggttaaagatggtcgggagtttgaagaggttaggaatcgccttctcaagaagtacgggaaagcggacataaagccaccggacgtgaacgatgttctaaggaagtatggcctctctgaggatgaattaaagaggctcgtttctgagtccaaatcccagccggagcttataatgaagttgaggaaaaagctaacaggttctacaaagtacgacccaaaattccacgacgttgaggttcttgctacaaagatgttcgaggctaaggagttcaagggagcgcctttcgagggtgatattcagagacagcttgagagccttaaaaagagccttgtcgtgcggaatgaaaaaggctgggttgtcgagaatggacagttaaagccaaagcttgagatgaataccgggattaagaccgttccagcacctaagccacccgaaaagccaccgattaagccggtgagtgttccaaagccacagcctgaaccggtgattaaggccaccagcgttgaacccacaaagaggggtattaacaagggtcttttggttctcggccttttggtcggcgctggggttctctattacttcacgaggaagaggtgaggggaatgacagttccagcggtcgtgatggtaaagaacagggataacatcgggtcaattcttcaaataatcctttacttcttagcgttcattatgataatctacactctctataaactgttcgggatgttcaaggactggggagagaagatagagaaaaagctaaaacaggctggggagtacttgaacccttctgatttctcagaaaaggcaaaaacgaacgttgaggcaacaaagacgattataaaaggagtgctggagggtaaaacggactctccagaatataatgaggctatgaacatattacactatggtggggatgagtggacgccggggactgcaccgccggtgaacccgaataatccagttctggggaggtatggccagcaggtaaaaccgggggagtctaagacttttcacggagggtactacactgagacggacgtaaacaacatggtgaaagacccttggggaggttatgcaacgagggaagacgctttagcgcataagtatggtttcgtgagttatgcgaactttaaggcatggttggagggtgttaaggcggcgctgaaagcggaggggaaagacccgaacgctatgactctcgaccagttagttaagtatggtcgggagcttgagcggaagaagagggagtgggagaagcagaaccccgagaaggcaacgccaacgctggacgtttggaagccggacgttcctgaccatttgaaaccctatgaagctgatgacgagctttacaggaagctgaacgactggataactggaggtcgtacggaggttataccaaagcgcaaagaccttccaaagccgattcctcttccgaaaccccgcactcccgaaccaatagcgattccaatttgagaggtggtgaatgatgaagctggataaggacacgatagttcaggcgcttatcctttttgtgttgtgggtcgcttttcaaatccagttcaaaaagtggctagacagggtgaggtgagatgctggagtatgagattctcagcgctggggttacggcgttgtttactgctatttcaacagcttacgtaacctctaaagtcaatcagaagcagttgagcattatttcaaagaagttagacgagatggagaagcgtctttacaatcacgaaaataggctttcgagaatcgaggggaagcttaacgggagtgtgaggatatgacggcgaaatataagtatctgggaaggcgtgttaaggacaggggacagaaggggttagacagcgcacgggagttttacgacattatcaaggccattctacgtgattacaaggcggggaggattacggggaagacggcacggggaaggttgcttttactgtacaggctttcgtttaagaagaacaattcaaagattcgccatttgtctaattcaacgcttcagaggattagaaggaggataaagaaagctatggaggaagttaaggggtgataaaagatggtgtttgccaagcctggaattatcaggctcgacccgagagagaaatacgggtttgagccagatgacttggtaattcgtccatttaagccgggaattccgctggataagatgagactaatctccaagttgagagaacagagagctaagcaggacaaaaccaaacctacccctatgctaaatccaatctcaaagccaaagagcgaatcattaccgaaaccacagccaaaacaggacagcggacaggtcgagggtgtgaacctcattgactttgagatgacggcacttccgggagctggagggggagcgaaaaagaccgaacatgaaacaaaaagagttggcgggtataagctgattgtccccaaaaagcctgaagagaaggagatcaagaggatcgagaacgctacgaaaacacagccggacacggacggacttctgaagttcgttaggatggtgggaattctagcggtcgttatcgtcctaatcgggttgttcataggggggaggaagaaatgacgggagaagtccgagttaatgcgtattttgaacccgccgataatataccgattgaactcacagccgacgagccttcaaaggaatgggattttggaacaccggttaggctttgcgctattacggtttcacacggaaatgatgactatgttatcgttagactctaccgtttcggtgatactaaaccgttctgggagcataagtttatgccgggattgaacggacaggtgtttattcaaccgattccaaaagagccggttagaaaaattgttgtcgagatcgagccgaaagcggggactacggcgtcggatagcgttttgataaacattagctatatttgaggtgaggattatgaccttgttaatgaaggggactggtggaagtcgtgtgcttaaacataacttagtgagcataacacccagcgggaacatagagtcagggataatgtttattgaaaacgcctcaggaggtacgacctcgggagctattctttatctactcgtaattggggagggtggtgattatgtatcagcttaacacgggtatggtaaagtatcataatgaaaaggtagattcatacgaagtcccggttagattcagtatagcaaacccaaaaccaaaaacaatttatgcacaggtagaaatcattgacgccgggaatctaaactttacttttgcagacgggacaacagtaaagcagtactcaataaacgcaaatactacatttgtagtttctgaaaatttactgccgggaactaacccatctgggacaatgaaagattcagtaactcttaaagttagctattattcaaactcaaattacaccgggttatttgggactgatacaatacaaataaccgttaattattatatccagaattcagatttaacatgggttagtagcgattacccagacgacagcgcatttatcgttgattactgggacaatacgtgcttttccacaagtacaggccagcctgctaccggaaaactcggaaatctcacacttacaatgaattcaacaaaaaaagagagtgatacacagggtattgtttcatctcttgcaccacaactattactttccgtgggatggtaccacaccagtaagggtagtaaaacttggaatgtaagtgtacctctgtccggagctgaagcaaacaatgttttcctcgctggaattattaattggacttcgagggactggtcaggtgggaatactccaacgacgagaatatacgctgaattcacaggtgcaggtgctttttattctacaactaccgtcccttctgtctttaagttagtgtggttcccatcagagttcgagaaacgtcttagattctacatatatatctactcgtcatattcgtatgaagtaacggatgtttacatacgctatatcctagacgggttaatagcgtttaatccgcttccgtgattctttcttttttgcaatataatccacgctatatccaaatttcggtggttgtcttatggcgtcgagagttaatcttaagagcaagaagacaaaggtaaggatggtgggaaaagtggccacaagcattaggtttagattcctctcgggtgaggaggttgcaactgatctcatcactctaatagcgaataaaattcatgaaaagcctgaagatgtagcgtggtttatcgaggtcaaagcagtaatggataaacttggaaccggcgagttctccaagaatgcaaaaccagaacccttaaaaacttcaaagagcgttcgagagctgatggatgaagttaggaagtcatacaagaagtttaagcggattgaagccaaaatgaaaaaggccggactggtgtagtccatgccgaggggtaaaatcaggacagtatttgatacgtctattttggtgagtgctcttaaatccagatccccctcaaagagtccagcctggttctgtctcacgtgccttaaggaaaagttccttgagaactacgtttccagtgagattattgaagaaatgaagtttacccttgccatcattgccatagaagtggcttcaaaaacgaaccgaaaaggcgtcttagctcttgctgacgagcttatagaacttatacagcggaattctaagaagatcgtgcctaaggtggacttctcacgggatcagtcggttatcaggattattaaggatgagtcggatattaagttcctcaatgttgtttactctgcaaaggcgaagtttctcctcacccagaacaccggccactttggaaattttgttgtatcgggaggtaagacgggtaaggcaaagatacggcaacattacttcaatgttatgactgcaagggaattccagagttatttaagctcagcatacccaaagatcgcagagaaatgcaagaaaaagagaaagaagagttagttggggaaaatatgcctatcacagttccaaaatccccagctcttcttttaatctgtccaccatgtagtagtagatcctcaccgcattcctgacgttccagcggtaattcctgcctccaaccgtctttggtgctcttccctggaggaattctatcaagtgaaaagcatcggccggcgggtttggaaccgtgctcatcacgttgtcgttcatgaagttctgccagaacttcctcaacaaggcgaggtccttcacctttgtataatccctgaaaagcttgtgtttgtcggaattatcggccgtcagtttatagcctgtgctagcgaaccactctagctctctaactagctccgcagggaacaccgccacgtatcccctcttagttccatgccttctggtcggaagtttgaccctctccatgtcgtaaactgctatcttcttcctccactcctcgggtaggccaaaggctttgaaggtctcttcgacaacccttggatcaaactggttcatcagctctctaacctcatcaccgcggaggcctgtaaaggcgagaagcttgaggtagagttttcgtgctctcagaatcgtctcattcttcccctttaactggctgaacatctccctgatgtcttcggaggttatcaccttggccgactcggctcttgcgttggtcttgatgttcgggatgactgccttgaagtcaatagcctcgctctttctgattcttcctgtatctacaaggaagtttatgtagctccttattgcgaggtaggcgtgccggttgggattgcctttctttgttggtggtattgactcaattattttcctcagttcttcaggagtgttagctttctttccccaaaggtatttgtccagtagagggatatactttttagccatgctcggcgtgcgcctcttcacccattcagcgtacttctgtctatcacgaccatagtggatcttggccgttgagtccaccaaagcctttcttgtaaaaatgttatcggtgttcggctcttctttgttgtcattctgactggagaggccttcatttggcgaaagaagagcatcttgagtccaccgcctttgaccaggctcggcaacccccgctccgtcttactcttctccgatgggatttaaaaattttggggaaaagtttataatgatgtaaaggaagctttacgtaaagggaactttacatcggtgatgtggatgaaggttcgctactggcttggctggggagtgatatttgccattgttctcggactgttcattgcggcctctaaccggggcagtgtgactctgggtgttggaagcatcttcattggtgtgctaattgccacggcctacgaacgctacctcgaaagaatcggagaggtaatcgttgatgagagaatagaacgcattagtgagaagagctacgccctgagcatgcgtgtcctcggctttacaatagccctcaccttcgtctcaacgagtatcatctcccagcgcgacccattctggaagagtgcctccattgtcagcggcctcttcatgttcgtctacgccctcctcccgctcttcgcgagggcgcactacgaggaggtgatgtgatgctgaagtacgaagagctgctcgtggttttggtaaccggtattgtgatcggcttggcctattccgtgaagtccgggaagggcttgcttgcggttgggatattcctcctaggcatcctgctgacctacgcccttaactggtactacaattcccgtgtggagaggatagaggacgagagaactgagatgataaacgccaggagcacgaggaacgcctacgccctgatgagcccctcctctttgccgaatacctctgggagtacagcaacgggaacactggaacagcaactatgctcctcatccccctggtcgtgggtgcattcgtgctccttgtctcccagcactggtacgaacgggtgatgtgagtgaagaaccgcctccgcgagctgagggaggaaaggggcctgacccaggaggagctcgcaaaggccctcggcgtcacgagacaaacgataatcgccattgaaaagggaaagtacgacccatccctcaagctcgcctttaagatagcaaggttttttgggctcaatattgaggacatattcatttacgaaggtgattagaatgaatgtcagcgagaaactggctggaggggtgctctacactctagctttggttctttcagttatccggcctccagtagataggttggcctgcacggtgctccccagtggagaggcttgcacgacgatcaatcctttctttttcgcactctacatagggcttgtgatgtttgggtctctcctgattgctctcggccactccttcaaaaatgcccgcacacggaacggctggcttggagtctcaagcgggctcggcatcgccataatcggaggtttttcgggactgaatgaggttgtcatattcggcgctttgctcgcgactcttggtctgctcctttacaaactggggggatccaaatgaaggcagtcctcgttgagggccttgaaaaggactacggaaaggtcaaggccctgaaggggataagtttcgagattaaagaaggggaaatattcggactcataggcccaaacggcgctgggaagagcaccacgctcaagatacttgccacacttctccgccccaccggtggaaaagcggaagtctttggccacgacgtcgttgaggaagcggaggaagtaagggcgctgataagctacctgcccgaggaggcgggagcctacaagaacctgaccggacttgagtacctccgctttatggcgaggctctacgcgaaggacgagaagaaagcggaagagatggtcaagcgtggagtccagatagcaggcctcggagacagactcagggacaaggtctcgacgtactccaagggaatgacgaggaagcttctcctcgcgagagcgctcatggtcatgccgaagttggccatcctcgacgagccagcgagcggcctagacatagtcaacgcctacacgataaggaagacgataaagagcttcgccagggaggagggcgttaccttccttgtctcaagccacaatatgctcgaagtcgagttcctctgcgacagagtcgccctgataaacgagggaaggatagtcgagtcaggaactccagccgagctgaaggagaagtacgacgccgagaacctcgaggaggtcttcatgagggcagttggcgtcgagattccagagccagttggaggtgaaggttcatgagcgacttctgggtgctggctaagaaggagataatgaacctcatcagggacaagaagctcctcttcggcctaatcattgttcccctcgtgctttatcctgctctaggaaaaatgatgcaggttgggatagaacaggctcagaaggaaacccacgtcgcgatagccaacttcgacgacggaaagtacggcgagctcttgatacgggccctcaacgttactccaaacgtgacggtcaccgttataagcgcgtcctcgccagaagaagccctcgaaaaagcctcggccatggaacaaaacgtccttgtcgttatcccacacaacttcagcacggcgatagaaaacaaccagaaggctgaggtggagatatacggcatattcaacaccatcggaacgggaatcagagagagcgtcagcgaggctaggataaaggttgtccttgacgtgctttcagaagagcttgcaaagataaaaataaagaacgcgggctttgagaaccccgatgccgttttgaagcccattgaagccgtcagcaggtcggttattcgcggcagggtggtggacgtttcaccctcactcgtttcgtccgtcctcgcctcccagtccaccagccttccactcatagtgttcctgatggtcacaataaccgcccagatgtcggctggagcggtggcggccgagaaggagaacaaaaccttggagactctgctgacccttccggtgaagagaacaacgatagtggcgtcgaagataactgggacggcggttatgggcctcattgcggctttagcttacatggtcggtttgagaagctatctcggaaccttccagaccgagacggggataagcctaagcgaccttggccttggggttactcccgaagggatgctcctattcgctctcgtggtgttcctaacgatagtcttcgcgctctctctagctatgctactagctgtttacgctgaggacgttcagagcgccaacacggttgtaagttcggttatcctgccgctggcctttccggccttcctgctgatgttcgttgacctctcccagcttccggtctttgcccgctacgggctgctggcgattccgttcacccacccgatagcggcctacaggtacgccataaccggcgagtacgccccaatgctattcagcgtcgcttaccttgcagtggtggcactcataaccctctacctgacggcgagggtcttctcaagcgaaaaggttctgacggcaaagataagctgggggaagaagaggaggtaatctctttctttttcactctatcggaacgccatccttagtcctcggcgcgagccacttcataagcctctgcgggtctttcgtccttatgattatcgttatcgggccgagcgggctttcctcgttgaagttcacgacacctgcataagcggcctgcttgttcaccttgatgataatctcctcgccgaagtagccctcctcaaggaagctcctcgcagtatcaagtatcgcctgccccctgaagagttcatagagcctgctgagggccttcctgctcctagtcttcgcggtgaggattatatagtcccccctgtcaaaggcctcgaactccaaatctgggataaggttcagcatcgccttcttaactttctcaatatcctccgtcgggtaaacataagcctcaacctcaacttcctcaaacagctcgctcatggtctcaccctgcctggattggggaaggggattaaaaagcttctcaaagcttcgagataatttcatcaacgagctttttcacttcagcttcgtactcttctctggagccgttgttcaccagcatgtagtcggccatcgctataactcctccgatgccaaagcggagctccttccagtccctctcctcaaagtcctcccaggtctgcgggtcgtcgtgtctgcccctagctttgagcctctcaaagcgctgcctcggtggtgtgtggactgcaactataatgatgttctcttccggaaaagcccccctaaaggtccccacctcatcaagggagcggacgccgtctataacgacgacctgcgaaccttttaaaagcgctctcactttctcgacggcgagctttgcaacggcgttctgcccgagttcctgcctcaaccgtatgctgaccttggcaacgttctccttggtaagctcaagaccgcgctttagggtttcctccctgacgatgtccccgagagaaacgcttggaaaacctctcttctcaaactcctttacgattttactctttccagaaccaggcattccagtgactatgactatcatcgcgcccacccgaagtagctggaaacccgcttaaaaacctgatgggtagttaggtggacaaaattttttaaggttcagtttaaaaactggaaaggtggtatctatgaacatgatatggttcattgctggcctgataattacgttcctcgtaaacatcccgttcggcttctggaggacacacgcgaagagaagtggaagcaggctggagtgggcgctggcagtgcatctccccgtcccacttgtgatagtcttgagaaggctcgcggggctgagctggaatgcctcgggaattccgttcatcctcatctttgtcctggcctatttcctaggccagagaacaggaggaaagctatacaacagggcagtcgagaacggttttgaacccgggaggaacattttcaatctgctcgccattaggggaaaagaaggagaggctatttgaggaagtcgtagaggtttcccttcctcttctttggcttctccttttctgagatagtgtactcgacaccgaggtgtctgtaaatcccctcaatgattttcagaccgattccctcaacctggaggagatccttcggcttagccctcagtatgtcctcaacgctcctgaaaccggcgttgtagagcgccctcgcccttctccgtccaatgttgggcagcttaaccagctcaaggagctcctcccttacaccgtgcctcaggcggaggtggaggtcgcggaggtactgaaggacgtcttcctttggctcgaagagcttgtagagctcgatgagggagtacatcagccagtccgcaagctcaaggattctgtagagatcgccggggtctatgttgtaggtctcgtatatcctagcctctgggacttcgtttatccagtcgagaaggactttagccgttttcacttgccccaggaacccctggaagcgagagtcctcgtagtaggggatgcttgagtacagatgctcttccatttcgtaggccagatcgagatagtcctccatctcccgccttctggccgttagagtggccatgtccggggttgatgcgaggagctggaatatgccgaaggggttcggatttctctcgatagctggaaaagcatctttgaacttcttcgccgtgagtggatctatgtagagctgggaagttctccttccgaaggggagggctatgaagcggttctccacatccatgtctatgaactcgttctctatgaggaagtagacgatgtccttggccttgtactcgagcgatgaagtatcacccctctggtgggcgtagaaagtccttgaaaggaagtcaaccagctctctaaagtcctcgacgccgaagttggttatcaaagctaaaacctggctcctgaaggcctgctcgttggccagcatcgagaagagcttctcgggttttccatggatgtacctgtcaattaacttcttggggtcttcggttctcgcgacgatgatggcctcaccgaccttgtcgtacttcggccttccggcccttcccatcatctgctgtatctctaaaacgggaatgtcagtccagccgaagttggcgtatctcttcgtatcgcggattattacgcggaatgcagggagatttatcccagccgagttgtgaacgatgaagccgacgctgtagctctcgtccccttcaacctcaaggttgtagacgtctccttcgtactcttcttcttcaatggagcggacttttaagaggaggtagttcttccaagtcctgttgacgttgtacgtcctgtttcccctttgggggacttcgaacccaagctcttcaaggagggagtagtagctttttccgctgacctttacgtcgtagattggtttcctggtcttgcctatgccctcagttcttatgctcctgtggatcgaggaagtgtatccaagtgatgccacaaggagctggagctggtaggcgagggaaggggagacagtggagtatgatatgtagttggctctcctctgggactctctcctcacgtatccatcgccctcaattagccccctaagaagccccaaccttacctctctgttcttgttcaaaaggaggagtggcggtattgacttgttgtccgccccatgtcctatattctcgcgaagccactctgcaaagcgcttgttgcagaacctcacagtccgccggtttctttcgtggtctttgacaactattttggcgtgagggaaatatttccgtatcgttccggttatgaactctgtaagatcttcctcgttggagctgatgtcgaactttatcacaccattctttgaggtagaaccctcggctatccacaggccgattaggcgggcagtttcaaagttcagtgggaggtattcgggcgtcctctttacggaaggatggagcttgtccgtttttccgtgctggttgacaacgtagacttcctttctcaggggaattttgtccgcatcaacagagggctctggaatcggctggagaagcatgtaggaaacctttgggtcagtctcagattcaagcctctccttcagctcctgggcggtcatccactcgggcccctcgaactcccaccatataacctgccttccgtcggagtagtgggacttgtgccgtatctgttttaccacccagaccatgtgctcaggagtgatcttaactggaactgtcccgtaggcctttataacaaggagtcttcccttgtgctcccttctcagaggttggatcaccttcttaaacgtcccagtgtgcgtcaagacttcgtcgccttcagtcagctctgagaccttttttgcaccgcttttggtgaccacatatgtatcgggatgcatgcagagcgtcggcgtcgccgttatcacctttatcaagccgttcctgaaggcgtcctctatcagcgtcctctctgccctactcaggccggcgtgatggaaggcaaccccgcccttcagcgccctcttgagcttttcagtggttgggttgtcctctatggaggagatcagctcctcaagccttctggtctcgggttttgtgaggagctttgaaactttggatgaaagcgagattgcctccttctcggcactcctgcgcgtgttgacgaaaactaaggcctgctttcccttctttacggcgtccagtacgagactttcccagttctcggggtagtggtcgattttcccatcttcccagaagagctggccgaggtggaagacacctttcctcagctccaccgggcgccaatcgctcacaacaagagaagcgtccagccactccgcgagctcttcagcatttccgacggtggcacttaaggccaaaatctgggcctttccaagcatgtgggtgagtatcatctcaagcgtcgcgcccctgtcgtaggagcctatgaggtggacttcatcggcaactaccagcttaacgtccttgatccagctcgccccgtgcctcaagagggagtcgaacttctcggctgtggccactattatgtcgtaccttccgagccattcgtcggttgaatcgtagtctcctgtcgttgcagcaaccctgaggccaagaacttcccactccttgaactcacggtatttctcttccgccagtgccttaaggggaaccagatagacggctttcccaccctcgctcagaagtttgttaaccatcactatctcgctcacgagggtctttccgctcgccgttggaatagctaacactagattcttcccctcaagaacgccgctcttcagcgcctctgcctggggtgggtaaagctcctcgatccctctctcctttatgacgcgttttatcctctcgtcaatgggaagctcatcaaccttcatctcctctcacatcccgatggagtgaggaaagtggttttatatgcctaccgcctgagcgttctatttggaggtccgttgacgtttgcctgaagaaccagaagtcaatgcttaattcggaattattagttctatgttgggggactttagaaaacccgaccggaactttgtacgaaaagcttaaattaacgcccgttgaaataatatcgtaaaactccgaggtggttcccatggttagggcctacgtgttgcttactgttgaaattggaaaggtcgagagcgttatagaggctctcaggaagatgccgggagttacgaaggcagacgccgtcaccggcccctacgatgcgatagtccacatcgaggccaaggacctcggcgagctgaccagaaagatactccacgacatacacaacattgacggcgttatcgacacaaccactgcaatagtagtggagacagaagaggagtgattacctcttctttctcttgccgtgggctttgcgcttctttgccctgagttctctgattttctcacaaatcattctgagacttttgcccttggggtatgggctctcgatccgtagcattccctttgtcctgagctcctcatcgatgcccgacagtctgggattcagcttttcaggttcgaactcaatgaccttcataccgagaatttcagcggcatcgcgtatttcctctggggtgggggcttcaagggcgacctcttttttaactagcctgccgtattttcgaggcaaccgcgaatctatctcgctcggccacactacgaacttcattcctttcacccggcaagatttaaaagttgagccgttaaaaacccttctggtgataaataatgtctaatgaaggagcacttcatgactttatcagggctatagtgccgggtgacattgttttaatcaagtactcttccaatgcacccgtggagaaaatagcgtggggtgagataataccttccatccacgaccacggaatcgtgtcaatagatttctggggtattggtgacatactcatgagaaagtttgcaaagaccagcggggttgagtatacgaaaatcctcgacgttataagggaaataaagatcattaaaatcggacctggagcagcctcgtacggtgaagtgcttgaggacatagtccccacgtatgagccgcagaacttcttaaggaattaccattccatactcagcagaatttccagacttcctcggaagcccaagtacgcagtggtctttggactctcccattacatatacttcaatcctgaaaaagccctgaaatcaatattgactgcagttggtacaataccggcgggagatcttgccattatcagcttcgttaacaccagcatactaaacgaggcacacattggaatcctcgaagagcttagcacaaaagttgccgaggtttctggggggaagattatcgtggccggaggagagagaatatgatatcagtcggagatagagttcttctcgttgatccacgggggaaacggtatcttgtgaaagttgaggataaagagttccacactgaccttggcatcttgaacttgggcgagcttataggaaagccctacggcgctaaaattcagagccacagaggggagactttcacggctctcaagccggacatcaacgacatcatagcaaaaatgagaagaggtccccagatagtccaccctaaggacgctggaataatcatagcctacgctggaatttcaccgggcgacacggtcatcgaggcaggggcaggaagcggagcgctcacaatattcttggcaaacgctgttgggccgacgggaaaggtaataagctacgaggtgagaaaggacttctacgagatagcaaagaagaacgtggagttagcaggcttttccgatcgggtagtcctgaaaaataagagcatttacgacgggatagatgagaaagaagccgaccacatagtccttgaccttccccagcctgagaacgtcctgccgcatgcagttgatgtcctcagaccgggaggatattttgttgcctataccccatgcatgaaccaggtgcaccgctttttcagggcgcttgaagagttcaaaggagagttcatgaggccaagggttgtggaagtcctcgttagggagcaggaagtcaaaagagagtgcatgaggccgaagacgacgatgctggcacacacgggctacataaccttcctcaggaagctgtgaagtcggcactcttctcttcttcctcaaatagaacgtatgccagaacccagaagataaccgatattccaagcgatttcaggagcgggttctcacccaggagcctctggagggctggcactgcaccatagatcagcggaaggaacatgccaaaggcggccattattacagcgaaagtgtaggcaaccttcttcatacgtacccccagcccacttctcatggtcaattaaaaacgtttcttccattatccttccgtcgggctgaaaaaccttcgccgtcctaaacctttggttaacaacaggtttataagcacttaaagttgtgaacctttagatgtccaagtttggactcatgtacggaggtgttcattatgccttacaagatactcgacaaaaaggagctggccatgaatgaggtgtggtacaagatacacgctccccacgtcgctaaaaaggttcagcccggccagtttgttatcgtcagggcatttcccaacggagagaggatccccctaactcccgtcacatgggacagggaggagggctggataaccctcattacctttgtccgcggaaaaacgaccatgaggatggccaacgagctcaagcccggagatgagatcctcaacgtcgccggtccgctcggaaaccccgccccgatggagaagttcggaagggttttggctataggtctcataacgggtatcgttgaagttttcccgatagccagggcctggcaggagataggaaacgaggttaccactcttcacgtctccccgaacccaatggtaatcctgagggaagagtttgagcagagcgtctccaggcacatcgtcgagggctttgaccttcagcccggctgggggatgaacgagatagcgcaggagcttgtgaagagagccacagccaaggtcagggagctccttgagaacgagcactttgatatggtgctcaccgtcggccctgctggcggccagaaggcgatattcaacgtcgttaaggagtatggaatcccgatgcacgccgaccttcacccaatcatggttgatgcaaccggaatgtgcggagcatgccgtgttaccgttggaggagaggtgaagttcgcctgcatcgacgggcctgggttcgacgcctataaggtcgactgggacgagctgatacacaggacgggtttctacgccccgcttgagaggctcgcccttgagcactatctaaagcaactccaggcccagggaggtgagcagtgatgccgagaaggaagctcatcaaggagagggttccgacccccgagaggcccccggaggagaggattaaggacttcaaggaagtaaacctcggctacaccttcgaactggccgttaaggaagccgagcgctgtctgcagtgcccctacgagtatgcaccctgtatcaagggctgtccggttcacatcaacattcctggattcataagcaagctcgttgagtaccgcgacgatcctgacaaggccgttaaggaagccctcaacgtcatctgggcctgcaactcactcccagctacgaccggtcgtgtctgcccgcaggaagaccagtgtgaaatgaactgtgtcatgggcaaggtcggcgacaagataaacatcggcaagcttgagcgctttgttgctgactacgcccgcgagaagggcattgatgaggagcttctctttgagataatcccgaagatcgagaagaagggccagaaggtcgctatcatcggagctgggccagctggcctcaccgccgccggagagctggcgaagctcggctacgatgttaccatctacgaggccctccacgagcccggaggagtcctgatgtacggtatccccgagttcagacttccgaaggagattgtgaacaaggagattgagaagctcagaaagctcggcgtcaagatactcaccgaccacgttgttggcaggacagttaccatcgaagagctcctccaagagtacgatgctgtcttcattggttccggtgctggaactccgaggctaatcaacgccccgggaatcaacctcaacggaatctacaccgccaacgagttcctcacgagggtcaacctcatgaaggcctatctcttccctgaatacgacacaccggtttacgttggcaagaaggtcatcgttatcggcgctggaaacaccgcaatggacgccgctaggagcgccaggcgcttcggtgcagaggtgaccatagcctaccgccgcggtgaggaggacgtctcggccagggaggaagaggtcgagcacgccaaggaggagggcatcaagttcgtctacttcgtcaacccggtcgagttcataggcgacgagaatggcagggtcaaggcagtcaagttcgagaagatgaaggctctcgatgagagggacgccaggggcaagaggaagatagtcggtaccggcgagtacgtaaccctcgaagcggacaccgtcattatcgccattggaaagcacccgaacaggctcatcatcaacacacctggcctcaaggtcgagcgcggaaagatcgtcgttgatgagaacctcatgaccagcattccgggcgttttcgccggtggagatgccataaggggagaggcaaccgtcatcctggcgatgggtgatgggaggaaggccgcgaaggccatccacgagtacctcacgaagaagaggcaggaaaaggcgaacgcctgatttcttttcttcccctttgtggtaccgtatgctttttatgtctggaaaacctggcggtgaaaagacttataatgtcctattttgggagctattgagtgataccatggcatctgtttcagctgttataaggaatttccggccgcttgagggccgggcatacatcggtctcattggtctggcgatactgatgaatgcaaagtgggttagtcgtgatgaggcgttgctggcctttatagctggggtgttcttcgtttggtacgcattctcaataaacaactgcttcgacgtggacaccgactcactgaacccagataaggttaagaggaatccaatagccagcggggagctcagtttttgggaaggcgtggcaatctctgtggttcttgccctgcttggaacggctatcgcctccagaacgaacaccctaatgttcatcttttaccttctcatgactctcctcgcgaccatctactccgcaccgccgaggctgaaggcgaggccggtggttgatgtgctctctcatggcctctttttcggcgggcttcccttcctctacggcgcttcaatggacgggagaatctcaggcatcgaggcgcttatagcactcagcgttaccctctactcctttgccctcgagctcaggaaccacctcggcgactatgagagcgaccttaaggcgggcctcaaaacgacgccgatagcgcttggaaaaaaggcctctgaaacgcttgttgtggtattctcttgggcctcaattgtcctgctggtggtgggatttaccccccttggagcacttggggcagtggcagtgaagcttaggataaactaccggacgttggacgctctcatgctggctttattggttgcacacaccgccaggttggtgctcggtggatgatgtcttaggggtgcaggaaaatgaaaatagccctcgtcagcgactggtactacccaaagatcggcggcgtcgccactcatatgcaccagcttgcaatctatctgaaaaagctcggccacgacgtttcaatagtgactaatgatctaaaaacgggaaaggaaaaagagcttgaagagctgggggtaggattggttaaagtcccgggtgtcatcagtccggtgctcgggataaacataacctacgggctgaagtcgaacagagaactaggcgagtttctcgtggattttgatgttgtccacgcccaccacgccttcactccactctcgctgaaggcggttaaggccgggagaactctcgaaaaggcaacactcctcacaacccacagcatatccttctcccacgagtcttccctatggaaggcccttgggttgacttttccactcctcaaccactatctaaaatacccccatgaaataatagccgttagcaaggctgcgaaggcgttcgtagaacacttcacggattctccagttagagttattccgaacggcgtcgatgacgagcgcttcagaccactgagcaataaagagagagaactggtgagagaagagcttggaataaacggagacttaattctctacgttagcaggatgtccttcaggaaagggccccacgtgctcctcaacgccttccagaacatagcaagggaaaaggaagatgtcacacttgttatggtcggctctggcgagatgcttcccttcctgaaagcgcaggcaaaattcctgggcattgaagaccacgtgaggtttatgggctatgtccctgatggacttcttccgaagctctatgcttccgcagatgtttttgtcctgtcatcaacaacggcagaggcctttgggatagtagtgcttgaggcgatggcctctggaattccagttgtcacgacaacggttggtgggatccctgaagtcgttaaagaaagtgaaagcggcatactcgtcccccctggcgacgaagcggcacttgccgaggcagtcttaaagctcctctccgacaaagggcttgccaaaaagtttggagaagccgggagaaaagccgttgaaacgtgctactcctggaaggttgttgcgggcgagatagaaaaagtgtacgaagaggttttaagcgagttgtaggcaggcaacgcggcgatgacgaacctcacgatagctgaagggtgatgaggggcatactggccgagccgctatccttttaactttcggtttggagagtaaaacgagcgatgacgagctctagggtatctgattgataatgatgaagaaaaagagccgagctcacttctttcccttcgaagatttcttcgaattttctgaagtctcgagcccaagctttatccaatgaacagtccctttaaaatgatggcctattcttaaagagaaaaggtcaaagctcgaggctgagccttctgacgaccgggtcctcggcctcttctggctttatctcctcgatgctctcaatccatatctttgttctcggaaccctgtgcttgctcccgatgtcagagtaaacgagctcccttacgtgctcctccttgagggccctgtactccttggtgaaaggctgcttctttccgagcctctcaaaggtacccttgacgcggaaaaccttgacctccatttttcacacctccttcctccgccactactcaggccattttttaagctttgcttcaaccaaggaagccgagggcttcctcgatcttcactatctcaggaccagtcgtcaggtgcccgacaacgacaccatacgagttggccagcatgcaagagccaacgaatggaacgcccatgttggctgtgccgacgtagatatcaacgccaaagaggtcgctcagccactcaagctcctcgtcagttgcctcgggatggacgagcccgcccttgttcgtgacgacgccaacgctgccgactgagcggtagctggctatcattcccctctcgacctcatcaacgcccagtatctcgcctatcgcgtttgcctcctccctcgtgaactccttgctgacgagggcggccttatcgttggtcaggatgaggttgccaagggctgtgagcctgctcttaaaggggacaacgtccatgtcaataccgaactcgttgagagcagttttgattctctcaagctcagcgtcccagatgtaccaagggacgatgattgcgttggagttgccggcggcgaatattccaactatcctcgacttcatgatgctggtttcgatgatcgggactttgagaacttctctcaggacttccagcttcttctcacccagtccctctctcaggagaagaaccctgtcagttgcgcgcccgtaaacaccgagatatggggagttctcaaaatcgagtctctctatgtgcatctcgtcacctctaaaaagtggttaaaatcaggcgagggagacccttgctatcctcttcccctcgctctcctcaacgacaaccttgacgcggagctttcctggcggcttctcagcgccgcgctcccagatcttctcgttgacgtcggtgcctattatgacctcgtcagccttggcgtgcctggctatccactcgcggacgaagcgggcagccctcggtgccctcttccagcggggaaccctcttcttgatcttgtttatcgggacgacgaatatgacctcttcaccgggcttgatcggcatttacatcacctcactccttaagctttgtcctcctccagtgtctcctcttcgggtgagtgataactttcctgttggtcttcacaataacccaaacagggacgcgcctgttctgctttgcagccttggcgagcctgagcttcttcgcaaacggcttgttcctggccatagttacaccccctccttttgcctgttcatgctttggaaattcgtttttaagcttttttgtgtttaccatttaaatatctcattcgtcgggaaccaggtgatgctccctgcatcttgcttcgtagctttcccttcccccaacgaggatgaccggcgaattccttggagcgggcttcccgtctatcaatctctgactcctcgtcgcgggctttccgcagaccgtacagaccgccgtcagatagacgatgttgtccgccctcacgaggagttctttcgtcacagggaacgggtcgcccttgaagtcgaggttgagcccgctggctatgacgtaaattccctgatcggcgagctcgtttaaggcctccacaactgacatcggaaagaactgaacttcgtctattccaatgacctcgtagccctcattgagcgttatctcctttatcctttcaactcctttttctgtggtcggcactacgaaggcctcgtacctgagcccgttgtgtgcaacgacttccctttcggaatagcgattgtctatggccggtttgaataaggctgcctttctcttggcgaaaatctgtctctcgacccttttgatcagctcggtagtctttccggcaaacattgggccagttatgacctcaagaaaaccgcccgggtgcatcggtttcaccgaggaaggtgaaaaagaagggttaaaacggtttgggctcagactttcttcacgatcagcttgaccccatcaaccttgaccacttcaaccgtgtccccgacttcgagcttatcatcactgagcgctatccagttgtccccctcaagctcaacgaggtagtggtcttccgctactttaacgactctccccctcttccctaccagctcgaaggtgtacttcttctccttttctccaatgtccacgacgtcctttctgatgtacctgccgacgaggatgtaggcgaggacgccgaagatcaacgcaacgacaaagctctccgtgaagttccagccgaagcctaagagaatcccaagaacggcaaaggtaacccctatgggtgttatgaatgccgtaaccatcatgtcgagcaggattatgagcagtccaaggatgaggagaaaaatcgggaaggggtccatggcccctcactccgtcatgtctttaggcttttcaagctcttcgctgttctcaccacttccctggggctcttccttctcgttcttcggcggctgagggagcggcatgtccttgaccttctggaggattctcagcaggccgatgagagcctctgtgtcgtacgggactatgaggttgccgtacttggcaaggtcgggaagcttctcgatgtactggagcgtgaggtacttctcgtccgccatcctgagggcctcaagcaccttcctgattgcctctgcctggccctcagcgatgagtatctgcctctgcttctcaccttcggccttcagaatggccgcctgcttctggccctcggcctcccttatggcgctctccttcttaccttccgccaggagtatcatggccctcttctccctctccgccgtcatctgcttggccatcgcctcctggatgtccttcggcgggtctatcctctgtatctcgacgcgggttatcttaacgccccagcggtcggttatcttgtccagttcttccctcaggcgggcgttgattatgtccctaccagagagagtctcatcgagctccatctcaccgattatggcacgcaggttggtttgggcgagcttgacgatggccatcaggaagttgctcacgttgtagacggcctttatcgggtcgattatctgataatacaccacggcgtcaacggttacgacgacgttgtccttacagatgacttcctgaggggggacatcaatgacgtgctccctcatgtcgacctttttgacgtgctccatgaaagggattatgaagtgtacaccggggtcgaggattctgttgaactttccgagcctctccaccagacctttctcgtagggccggattatcttgacgcccagtagcaacagcaggagtaagaacagacccaggacgaatattacaaaggcggcaaagccagccattactactacctcccgaaatttctagacttcttctatgttgagttccttataagcctttctcaggtttgtggggtctactttttaaaccccgagcgtatgtgtgagcaggtgggaaaaatgggaagacccgtcttccttggaaaggcttacataaactggtgcgagaagtgcaacgtcccgctcatcggcgactcctgcgcagttcacggaaaggaaggagtgttcaggctaaacatcactccgccgggagacctgcgcttcgcctttgagaaggacattgagttcatccgctcagtgttcatggagcactacggcgttgacatcggcgaaattttggagggaaaaatcgtcctcctcaacaagctcccgagcgaggatgatgcctacgagataatcctcgacggctacgtcttcggctacgtcaagtacaacccgctcgagctgaagtggcacgccggactgaaagttgagggggccatcgccctctggaagcgcttcggaaagaagatgaagaaatggatagtcgttgacaagggagctgtagggccgataaagaagggcgcaaacctgatggcagttggcgtcctcgaagcggatccgagcataagggttggggatgaggtcatactcgttaccgaagacggagaggttttcgccactgggatagcaaagaaggactacgatgccctgatgaggggcgaaaggggaaccggcgtaaagccgaagaggcagaaggcagtaaactaccgcgagggcaagaaggccaccatggaggatgttctgcgggcgaacagtatagcgcttgaagagaaggtcgtgaagagcagggagttcatgaggagagtagctaacaagtactcagaccttccgaaggcggtcgctttctcgggcggaaaggacagtttggcggttctcggtctggcgctggaggagtttggaactgactttacggtcttcttcaacaacacgggcatcgagttccctgaaacggttcaatacgttgaagagctgagaaaggagcttgagcctaagggagtcaggttcatagtggccgacgccggcgacgccttctggagggctttgtatgtcttctcaccgccggggagggactaccgctggtgctgtaaggtaacgaagctcgggccgattacgatggccataaaggagaactacccaaagggcgtcctgatgttcgtcggccagaggaagtacgagagcataaagaggttcaagcagccgcgcgtgtggaggaacgagtgggtgccgaacgagataggcgcatcgccaatcttccactggagggccatagaggtctggctctacatattcagcaggaagctgaagtacaacccgctctacgctcgcggttttgatagaataggctgtttcctctgtccaagcgcttctctggctgagttcgagaggctgaagagggagaagcccgaactctgggagaagtggaagaaggcgctggagtactggagggagcgctttgaccttccagaggagtgggtaacctacggcttctggcgctggaagaagctcagcaagggtgaaaagtcaatagcgcggaagctgggtgttgatattccagaggagcgctcatgggagccggtaaaagtccagattgaagagaccgacgatggctacgagctgaccttcaacaccgtcctcaacaagaagaggctccttgaggtggccccaatcctcggtgaggtagaagtcgatggcgacgttatcaaggcggggcaggttgagttcctaaccggcacaagaaccgccagagctccgaatgaggaagaggcctggagcgcctactacctcgtcaagagggcctacgagtgctttggctgcgggttctgcgtcggcaaatgcccagagaacgcgctgagcatcgacgaaaggagcaagaagatagtcgttgactgggactcctgcgtccactgtcgcgagtgcatggacgtctgcccgctgttgaagatcaagaaccccgaggagggtagccagctctgatggtaaagttgagtttgacaaaaacacttaaatatggtaaaattgagttgtacatatgatgagagaggtgctcgaagaggtcatagcagagttttgggagcttggactcccagaggtgaaggagagggagctcgccctgcccacgaaccttgacactgccctctctatctttggcctcaggagggttggcaaaactcacttcctctatgcgacgatgaagagactcatgggttctgggctccccttcagaaggcttttttacgttaacttcgaggacgagaggcttgttggaatgacggccaaagatctctccagcatagttgagctctatcataagcacaaccccggagccaggttctctaccttttccttgacgaggtgcaggctgtagagggatgggaaaaattcgtgagacggatggtggagaggggaaacgccagagtttttctaacgggctcctcttcaaaactactctcgaaggagattgcaacttcccttaggggaagaacgctgtcgtttcagctctttccactgtcttttagagaattcctggagttcaaggagtttaagctgacctctccgttaaccgaagccagaaggggccggctttttgctttcctcgacgaatacgtcagatacggaggtttcccaggaatagtggactaccctcccctcctcaagatcagaacgctccaggagtacctcgacctgatagtctacaaggacttgatcgagagatatggtgttgaaaaaagctccgctatgaaggccctaatacgggtcataacaaggaacttcgccaggaaaacctcggttagaaagctccacggatttctgtcatccatgggggttaaactaagtaagccgaccgtctacgagtacttctcctaccttgaggacgtcgggttcgtcgttcccgttcggaagtatcatggcaacaccgttgaatcccttcggagcgctccaaagctctatctggctgatattggattcgcggaggctctgggtgtggaggacttcggcttcagattggagaacatcgttgctgttgagctcttgaggagaaagcactactccgacccattaatcgaggttcattactgggaaggacgtgaaggagaagttgacttcgtggtttcgagggggccaaaggtttctgagctgatccaggtcagctggagcgttgacgacccagagacgatgagacgtgaagtaaaggctctgatctctgcttccaggcatcttagatgcgggaatctaaaggcgatcacgtgggattacgaggccgcggaaaccgttgatggaaagaatattgaattcatacccctttggaagtggctccttggggcaggtttataaaccgttttcccttctcccattccggtgagagaaatggaagagctgttcgtatgtcctgaatgtggtagcgagaacgttgaggtcatcagggagagggggagagagcttacccttcgctgtaacgactgcggccacgtctggcacgttacccttccgaagttcaggaaggttcctctcattgtcagcaagcacgagaggagcttcaagagcgaagccgagcttccggagggtgaagaaataaaagtgggggacatcgtcgagacggaggacgatgaggtcagaataacagggatagagctggagggggacaagagggtcaacaaggctaaggtggaagaagtcaagaccctctggggcgagagcttaacttacccgaaggtcataaaggtctctatctaccttccaaagggcatcacccaggcctttaaggtgaaggtaccaaggagcgaggagttcgtcgttggggaagtcatcgaggtcgggggctacaccttcagggtggagaagataaagacggaaagaaaaatgctccaccacgggaaggccagggcagatgaaatcgtggccataatgggccaccagattccgaaggcgagagccagaaggagcctcgagatatatcggggctatgatgaggagtcttaacctgagttggatgatgagcttggccgctcctgagctttgaaattttttatccaatttaatttgatagttttcccaaaatgtctcaagcgttaaccaaaagattataagttctacaaacaaactccgcgagggtgagaaaaatgctaaagacgggaataaggcaggttgacgatgcccttgacggcggcataatagagagttccgccgttgccttcgttggttcactcgaatacgacaacataattctcatgcatcaggtcgctctaaacgctcttaaagacgggaaaaaagtccttctagtagcgtttagagaagcacctgacactctcatcaaagaagctgagcacaatgggatcaactacctccccttcatagagaacggttctctggttatcctggacgggtacaccaacctctacgctcccgaccagaagcagggtgagaacatcctctccaaccccctcgatataggaatcacaacggccgtaattagggatcgcctctcaaaaggagattttgacgttcttgttgtggatgatttaacggcccagtacaccctccagcccaatccaaagggctacataaaaacgctggtacgtctgataaactccgtgaagtcaactggagtaaccgccatggccgctctctgcgggaatgtgtttgagaaagttgatctagctgctactttgataccatttgactatgtctttgaagtgtcccgtggaaggattcacatagcacgctccattcagccactaaagactgcaaacctgatctttccatacgtaaggtcttcagaggggataaaactcgtacttgaagaatacgctaccttggaaggtatcaaaaagaggcttagagcagaatccgatggaactctgtggcttgactgggatagggtggaaataatcaccgaagacagcgaaagggctactatagagactgcttatgagttcctagggcctgagaagggcaaagagttcctttatctctggggcaagaagcagtttattgggctcggaaaagacgcgagaatgcgcaccgacagcctgagggccgcactcgaagaaatagcgctcctaacgcgctccagtgggggcggcaccctggagatcgtggacatcaaagacgacctaatattgataacgggcaaaaacctctttccaggagggaagggttcatccctgccatatcatgtccactacgcgggttcaatagcccagttcctaacggagttcacgggaaagagatgggagggcaaggaaaccaagtgcgaggccatgggcgcagatcactgcgagtttgtgttctggccagttgagtagcgaaacccttttaagcggtcagcccgagtcggtggtgcaaacagatgaacgatgaggtttcggagggatgaagatggcgaagccgagctacgtgaagtttgaggttccacaggagcttgccgagaaggcccttgaggccgttgagatcgcaagggacaccggaaggataaggaagggcaccaacgagaccaccaaggccgtcgagaggggccaggccaagctcgttatcatagccgaggacgttgaccctgaagagatcgttgcccacctcccgccgctctgcgaggagaaggagatcccgtacgtctacgtcccgagcaagaaggagcttggagcggccgctggccttgaagtcccagctgccagcgttgctatcatcgagccgggcaaggcccgcgagctcgttgaggacatcgccatgaaggtcaaggagctcatgaagtgagctccttttccttccttaacattcacgaaatgtttaaggtcatctctgcgaggggattttagatttaggggtgtgaggtatgagcgacgaaggataccctgctgaggttattgagatcgtcggcaggaccggcgttaccggtggcgttacccaggtcaaggtcagaatcctcgaaggccgcgacaagggtagggtcataaggaggaacgttaaggggccggtccgcgtcggtgacatagtcatactcagagaaaccgagcgtgaggccagagagatcaggaggaggagatgaagatggcccgctggaacgtctgctcctactgcggaagggagttcgagccgggaacgggcaagatgttcgtcaggaacgatggcagagtcctgttcttctgctcaagcaagtgcgagaagtactacttcatgggtagaaatcccagaaagctcaagtggaccaaggccttccaggaggccaggctccagagggccaagaggaagtgaacttttccatttttctttagtaattttggttcaatgctattccttgacaatctctaattttgggagagcgaaacagttaaatgtcatgaatgcgttttcttaattgacaaccccgttggggggctcagatgcgacagaagatggtatggttcctacttggagttttggttgggagtctgtttgttgcttcggcatacccaacgaacgagagcgtccagtacagtatcccagcgatacagaagatcacagaaagcaactacactgcatacctcctttatagcgagaacagttttccactggacagtgatgttctcaaaagcactgtccagacgcttgtcgaagagagcgctccaaacgccaagtggcacgtctacgcggttccagaactgccaaaaagcttagtcataaccggttatgggataaaggtaaccgaagaggggagagtagatattcttatcactgcaacaagaagtggagctccaatactatctgacaaaattaaggacgagcttctgcagtggagcaaaaaggcaccaaagttcaagccagacataatccccaaagagaagattggcgttccagaaggatggaaagttaaagcagtggacagcaacggcaatgtgaaggtttacagtggtgagagctcgccatactggcacaacttcggcgccttaactattgaagtcaacgatcccccatacggaaacatctatgcaaaattctatgcatacggtctctggaatgacgatgaccccagcagggagtactttctagttgctcctgatgaaaacggggagggacgatacgaaatagatccaggatatgggcttttggaagttgagggaaataaaaactacaagcgttatgtggctgattcctctaagataatccacaattggaacctcgaacccaatcttgatccacagttggatagagccgatcccgtggggtctttaggtggtcatacaaccactcaagtcaccgtgggttatccacctgctgttacgtttaccgtgacaataccagattcgaaaatacttcctgccgttgacagatcaactgaaacagccacatggctcttggatttcaacatgtactctgaggacgctaagtattcgtttaaaaccaacgttgcatccgaaggacacgtgaatgaaaatgcactccacgatggacaatggcatgccatagtaaatgtaaagttccaagcgacattcaagtactatgacgtgggagggggcacttactcatattcagggcctcatatagaatggtcatccaccccgtacaaacacgatacctggggggccgtcacctggtatgtaaaagtcggctgatggtttgtgctgtttctcaatattttttattcccatccaccattacacaaaacctattaacccccccgagtatcaacttcggtgttgccaatggcagacaaacagattgaaagaaccctcattattttgaagcccgacgccgtcgttaggggcctcatgggggaaatcatcagccgttttgagaagcgcggtctcaagatcgtcggaatgaagatgatatggattgacaggaagcttgccgagaagcactacgcggagcacaagggtaagcccttcttcgagccgctcatcgactacataaccaaggctccgagcgtcgttatggtcgttgagggaagatacgccataagcgtcgtcaggaagatggcaggagccaccgacccgaaggacgccgagccagggagtataaggggcgactacggcctcgacgttggagatgcaatctacaacgtgatccacgccagcgacagcccggagagcgccgagagggagataaacctctacttcaagcccgaggaactcttcgagtactgcaaggccgcagactggttctaccacacccacgcgaggtcaaagaaggaatacctggacagcatggactgtctggagcgctgatttagtctattacaatgtcgagcttccccttctttttccttatgaagtccgagtactccttcagaacctcgcgacattcctcgggaagccttttattcgttctgctgactgcaacctttccgagtagcaggaaggtcatcaagacaacgataccgtaggcggctattgcaagaacaccccttggaacaaggaagagaagcgttgccgggaggaacccaacgattaaaatcgcaagcttcatccctggacttggatttggagccttcaaagtgcattccgcaagctccctggagcgaggaaattctttgaggactgctcccccgatgaagagcgttctaccattcttaaaggccatcatgctattctcgtcggtgtaaacctcagctccttcaaggaagtccgtcctttcaactttaaggaactttatagaactttcttccctcggccagacaaggagggcgtaggccagaatgcccggaacgatcaaagcgggaagcagtgttgacgaaagtacgaccgcccccgcaaatatccccaacgccaggtacgagacctgaacgtactcgtcaatgctcaggctctccctcgcccggaagtaggaatagacaaccgcaaccagaaacgacaaaaacacccatacccccgcccattgggtaggagtgaggcacgttccagcgcagatgtaggtattccgcggccaagtctccgcaaacggaaccgagaatgcgtaggtaaagaccggtattcccagcagcgacatgaagatctcgctaccccttcccctcagtctgcccgcgatgagagccaatagaatgccgagtagagttccaaccacaagtcctatcatctcaccaccgtcaggatttactgcatggatttttaatccttcccccggctaacctttaaaagcccacgccggactttagctcaggtgagaaaaatgacgaagagaattagacagccaatcatcgcggttctcggccacgttgaccacggcaagtgcctgttgccagatgagaaagtgatactgcccgagcacggcccgataacacttaagggactgttcgatttagctaaagaaaccgtagtcgctgacaacgagaaggaaatcagaaagctcggagcgaaactcacaatagtgggcgaagatggaaggttaagagttctcgaaagcccgtacgtctggaaggtgaggcataggggcaaaatgctcagagtcaagctcaagaactggcactcggtttcggttacgccagaacatcctttcctgacaacgaggggatgggtacgcgcagaccagctcaagccgggggactacgtcgccgttccgagggtaatccacgggaacgagagtgatgagagattcgtctccttcgtttatgagaagctcaagaacgatgagctaatcgcaaagctcaggggagaagtactcagcaaaatctccagcgagtttaagggcgacagggcgtacaaagttgagaggaacgttttcaggtgggaggacatagagaggctcaacctgtgggacgaagtggaaagggtggccttcaccccaaggatgcaccgctcagggaagccgctccactacgtaaagcttccgcgctctccggaggaatgggaggcgttcttctacttcgcgggcgttatgttcggagacggaagccaggacaagatagccaacaacgatgttgaggtctacgaggagctgaagaagctttcagtcctcggggtggcagtgaagagagtggagcgcaccacatcttacgagattgaactcaccaacggcaaaaacgccctgctgaggcttctcagagtcctgtttgaataccccgagagacagaaggcgaagagcattagagtcccaaggatactcttcattgcccccagaaagtacgtctcccgcttcctcagggggtactttgatgccgacgggcacgtcagccttaaggacgcgaggattgaagtgacgagcgcatcccaggagttccttgaggacctttcattgctccttctccgctttggaatagtctcaaagatctaccgctcggactacacgaccctcgttatatctggcaggagaaacctcgacctattcagaaggtacataggtttctcggtgaagaacaaggcggaggctcttgaaaaggcaattaaaaagagcaggaggagcgaaagctatccgattttcgaggaactgaagcgcctgaggctcctcttcggcttcacaaggacggagcttaactcaaacgttccgttctacggaaaatacgaatccgaagaagccccgagctacgagactctaatgagaattctcgacgccatcgagaaaggctcaattaacctcgacaaaaaaatcgccgtcctcgagggtaggataagggatcacaactacattaaagccttcgaaaaggatgggctgataaaggacggaaagctcacagagcttggaagagagctcctcgaagtctggcgcaacagggagtttgactcaagtgacgttgactacatcaggaacctcgctgaaaacctcgtgttcattccggttgaggacatagaagagttcgaatacgagggttacgtctatgatgtcacaactgagacccacaacttcgtggccaacggcatcctcgtccacaacaccaccctcctcgaccgcatcaggcacacgaacgtggctggaaaggaagcggggggaataacccagcacataggtgcaactgaggttccgatagatgttgtcaaacagctcgccggcccgctcatcaagctctggaagggcgagataaagctccccggactgctcttcatcgacactcccggccacgaggcctttacgagcctcagggctaggggaggaagcctcgccgatttggcggtcctcgttgttgacataaacgagggcttccagccgcagacgatagagagcatcgaaatcctgaggcggtatagaacgccctttatagttgccgccaacaagatagacaggataaagggctgggtcatcgaggaggacgagcctttcctcgtcaacattaagaagcaggatcagagagcaatacaggagctggaaaccaagctctgggaactgataggaaagttctacgagatgggattcaacgccaaccgcttcgaccgcgttcaggacttcaccagggagcttgcgatcgtcccaatctcagccaagtacggcataggcattccagaacttctcgtcctcatagcaggcctctcccagaagtaccttgaggagaagctgaagatagaggttgaaggccccgcacgcggtaccatcctcgaggtcagagaagaggttggcctcgggacaaccatcgacgtcatcatctacgatggaactctgagaaaggacgacacgatagtggttggcggaaaggacaaggcgatagttaccaaaatccgcgcgctcctgaagccaaaacccctcgacgagatcagggacccgaggttccgcttcgaccaggttgatgaggtaacagcggcggcgggtgtcaagatagcggctccgggccttgaggaggcgttagctggttcaccagtcatagcggcgcgctccgaggaggagattgaaaaggcaaagcaggagatactcagccagattcagagcgtcgtcataaacaccggcaagatcggtgtcatagtcaaggccgacacacttggaagccttgaggccctcagcaaggagctccaggagaagggaatccccatcagaaaggcagatgttggcaacatcagcaagaccgacgttatggaggccctgagcgttaaggaggaggagccgaagtacggggtcgtcctcggctttaacgtcaaggtcaacgaagatgcagaagaggttgcgaacgcaaagggcgtcccaatcttcgttggcaacattatctacaagctcatcgaggactacgaggcctgggtgaaggaagaggaggagaagaggaagcgcgagctcctcaagaacgtcaccttcccaggcgttatcaggctctacccggacgagcgctacgtcttcagaaggagcaagccggccatagtcggcgtcgaagtcctcgagggcaggataaggccgggtgtgactctgatcaaggagaccggcgagaaggtcggcgtcatcaagtcgataaagaacaagaacgacttcgtccaggaggcgaagaagggggacgcggtggcaatagccatcgagggcgcgatagtcggcaggcacatacaccccggggagaccctctacgttgacctcagcaagaacgacgtcataattctcgccaagcagctcaaggacgagcttgaagagacagacataaaggccctcaagatgacggcaaaggtaaaggcgaaagaagacccgttctggagggcggtctaaacgagccctccctggagccatccaacggcggtaagcatttccccttcttttatctccttgttctctcctttcaggtgttctctgagaacgaagaggtctatctcgcccaaggggagactcttcagtcttataaggtatccatcgccgtataacgtcctgctgggcttgaccctcagcaccctgccggttatggcgtagtcgtccatgaatgcgcccttgaacgaggctgggaggagcagctcggcatcttccaagttaatctgcacaggctctccattctgcgggctgacggagattttatcccctatcggcccaaccttggcccagtaagcgaggaaggccagctttgccctggcagtgtcaagctccaggtagtcggcttttctctcgatgtaatcaactgcaaagaagctcacatagggagtctcctctccgatgaccttacccgagacgttcgcttccagcctgttagcccactcgagaatctcgttcacctcaaactcaacactcgtttccgagttgagaacgggaaaagccgttgcaaactggaggatcttcttcttggaatcctcaatcagaagtgatctcatgaacacatcgtcgccaaaggacacgtcgtatatccacacattgacggtctttttgcggggcaggattttaccaacatttaactccacagtcgcaatccgaggctcattatctttaattccctccatcagcaagttcagagccacagcagggtcgggataaaccgtgtctatatggctcccgtgagttattccatcaatacgttttagctttgatactcttttcaccataaccccatcaccaataagagtaataaacgagatttttaaattttgcttaaaaacaagtccggactgtatggcaacttcgatcattttaccaggcgcaacatatttatactccaagcagatggtaacatcggtgattctcatggagagaaggcagcttaggtgttccctgtgcgggggcacggattttcaggttgagggatccttccacgtctacaacagcatcgaagaagtagagacgttcctgggcgttatggaagaactggtaaaagagctgagggggacaaagatgatgcagagaaaagagacaaaagcagtcatgccccggctccactatttcctgtgatcaaaacggtgaagtccgcgtcaaatttctcgctcaggaaagaccctggagataatggccacacaaagtaaaacctctcttttcccactattctcttggtgggaccagtcgacacgtggtacacgtaaacatcaacgaccggcagtatgagccatgccctcgtaattacaatgttgtttaatctcttgggcttaagcaaacttttgctgactacaacgtcagatatcctgaagacagtcatcactcccactgaggggaggccgtagcttttgagctcctcctcagagaagccgtactcactagttagtgcggatgacagtacacatgaggaggtgtagcaggatattgaatcgaaaggcgagtggaggtataggtactggttaaggagagagtacccggagaaagacgtcaccataaaggcaaggaggaggaaagctccaagctctttgagatggtattctcttttctgtatatacgggtagtacttaaaggcccacacgatgatcgcaaggggaatcgatgcgtagtagagcaccatgaagaggccaaatgtcaccgggtcagttgcatgttcgaagtaaaccacatttaccacccggtaaaactttcgataagaagtgctttaaaatgttttcgtgagaattttaatcaagagggactcatattctcaaacacattccagcaagaaaattaaaaggtcagataacctttaccatcttctccatccagggagagaccctgaccctgatgtagcccctgagtttttcatcaacctctttatctcccgtgtacacacggataactccgttttccaccttcgatggagtagcaacgacgatgatgttctccttcggaatccttctcaaaacctcagcggagaactgctggtttcccctgccgaagaggaagttaagaccgcctatcaccgtaacgactatcctcgggtttttatcgacaaagcgtaggaggtctttttcagccgcgtccttcacgaggagcctggcctttccgtcctttacttccacaacgtcaaccccgagcaacgtcccgtttacccccagcctgtcctttattctttttattgtcgaacctgccccaagaaagtagattccgtccccgctcaaaatctcctcagccaccgcatcggctatggcctcaagggtctcgctctcatcgactttctgcggctcctttgccccctggacaagcagctcaacgacgggcgtcagggccttcccgtagtgctttggcctgacctcatccctcctatatgcgtcttcgtcgaggtccatgacgtccctctcttccagtctggccctcccgctggcaaattctacgagaactctggcggcactttcaggcgaggccgcgaaaacaccggagaacatcttcacgccagtgggcacgcctaggattgggacttttttgccaaggacggaatgaacgtccctcgcagtgccgtcaccgccggcgaagactattatatcaactttttcgagcatttcacgggcgaggattttcgtgtcttccgaagtggtgtccgggattttcactccttcaatctcacggtagccaatctccctgtgcctgattacatcaaagacgaacccaaactctctaaggtagtcctccccaagagggccgggccctgttagaaattcaaaactctcagcctccttgtagtgcttcagctcactcaggaacaggcgggcaacttcaggagctactggcctcgcccccctccttatcgcctcatcaacaacaccatcggtccccttcagcgctactctaccgcccattccggctatcggattgactatgaacccaactctgagcttcctcatttctacccccgataaaggtagagggatgtgtgcttaaagcttgccctacctcatgtacttcctagcgaagactgtgaggaagacggcccacatgaacattccaaagagtgcctcgaccgacgctataatcctgccaacgccgaagggatggtagtcgccgtagccgagggttgtggcagtaacgatgctgaagtactcgtagtcgaggaagctgagagagcttgagagaccctcaacactcttcgtcgcccagaacagtaggggaaaaatgacgttaacggctcccagccagaggagaataggtcttttccagtccgttccatatttgcaggttagatctgcgaagagccattcaaaccaaacctctgctgtgttgatgatccttttcaacccctttttcctcgactggagcttggcctttctcttcgccagcatctcaaggtagtagtactcgtcagccctgtcaaagtctccactcttttcccagctcgtcctcgcgagacggtagaaaagttcctccgcacggggattgttgaacctacagtcctctactataatgaaaccacccacttcaagctctatcggaaggttgggaagaactgtcatgccccaagtagagtcggtgtggatcgaggtgccccttagcactaggttactctcaactttgacgtggacgaactccggggagaccaggtagctcttccggatttcaatgtggccaaaaacctcgaggttctcaaggtgcagcctgccatgaaaacctgcaacggtaagcctcacccttctcttatagcgaggggacacgtcaaaggagacatcccttattatcagattccgcgccctaacgctccgctccttgctttctgatacgtttatcccgtgttccttaaggatctccctgaggagcgggtagcgggtgtttattcctatcctcctaacgcctgtaaggtttgaaatctctatgttgccgacaatcctctcggtctccccataggctttctcttcaccgacttcccccttgggcgtgtagcgcgtcgagtttatcataaggtacctaacttccgagtctcttattgagatgtgacttgaaaactccgtcctaagaatgttgagaccgaaaaccgtggaattttttacaagaatcgtctcaagggtgctttcgaaaataacaactctctcaacttttgagttaatcaggataagacccctaaccgaggaagcatccatgataaggtttgtaacccgcgagtttttgaaaacaagaactttttcagttgtgaagtcccttatcgctacatcgtagagatcaacgccctcaaaatatgtctggccaactttcaaccttttctcaaaggcctctttcttgatctctttcagtctctcaccgtatacggcctctccctcttccctagggatgtggagggcacagtactttgagccttccagcggtttcagcctgcactttttcccgttctcataggtatactcgcacatcacagaaaaaccgacaccactcgctttaaagctttccacttcaatatcaccgtacaaaagaagagcaaaaaagaaagtcagaacttgaggaccctggcaaggactataagcgggtcccagaccggcgcaaagggcggtgcgtacgctaaatccgtgaagaagacgtccttagtagtgaagcccgccgtaatcattgccgccgctgtatcaattctcggaagaatatctcctccaactgcctgaactccaaggagcctgttggtttcgttgtcaacgacacccttgagccatatagtctttgagccaggatagtagtggggcctcgttcccgcctttataaaggccgtcctgacgtcgtagccctccttcattgcctccgcctcggtgagaccagtctttccaatctcaaggtcgaggaacttggttatgcttgtgccaagaactcctgggaagtgaatctcctttccagcgatgttgcttccagccacgtagcccatcttgtttcctgctggagcgaggggcatccatacgcgcctccccgttatcaggtgcttcgtctcggcaacgtctccagcggcatagacgttctcgacgctcgtctgcatcctgtcatttgtccatatggcaccggtctcacctattctgacgccgagccctctggcaagttcggtgttgggctttattcccgtcgccactatcacgaggtcggctggatactcgccggcatcggtaacaaccctctcaaccctttcctttccttcaatcctgagcgtgacctcttcaaggcggaggttgaggtggtttctgagcttttcctcaactatatctgttatctccttgtcgaaggtcttcctgaggactctctcgctcctcccgatgagtgtaacgttcttgcccctctcgacgaaggcctcggccatctcaatggctatgtaaccggttccaataacgacgacgttttcgacggggtttttctcaaggtactcggttattgcaacggcatctggcggcaggtctgccgtgaagactccaggcaggtcgatgccctcaattgcgggaacctgcggtgaagcgccgttggcgaagacgaggtagtcccactcataggtcttctcaccatcctcctccctcaccctaactctgccctgctcgacctcgattacctcggccttcaggtgaaggtctatgccgcgcttcttgatgaagacctcggggggatagtgcatgagcttctccttgggcgagatgccctcaacaacgtagggaataccgcatggggcgtggctcacccactccgttgcctcgaagaccttgacgtcccattcgggcttcaacctcttgacgcgcgaggcggtactcattccagcggctccaccacctataacaacgaccgtctttctctccatcaccatcaccgggaaaggttcaaaacctttggttaaaaatgttggtggacagaaaagagaaaccttaaagggccagagggagcttcacccagtctagaacgcttccatagctcttctttatctcaacgtgctcaacgagttccttgaactggccccctgccagaccgtctccgattatcgcgcttccctgggcggcctccttcgccttgccctcaaggcccctctgcttgaccactgggaggtcaaagtgctcctcgaagaggtcttcaacgtcttttctaagctcgtctatgcgcatcagcctgccggagaggattatttccctcgcatctccaacgaccgccagctcgcttgcaaccgcctttacaaagccgtccttcatggcctcccaggccttcgcaaagggctcttcatcaagcctcttggcgaactcttctggagggagtatcttttcggccgctattacgctcgccccgccccagaagagatgccacttctttatgctgcccatcagataggcaacctcgccgtcgagggctccactgttcacataggccggccccgggaaaattgtaccaccaatgccgtccactatctttccgcccttaacagctccagcgtagttgtagccaaagccgacctcaagaagaacgaaggagacatcggcgtaatcgataccgagcctctttgcctggtcgtggattccaaggacagttatggccatcttgtcggctgttcccatgtcaatcttgttgtacttcctccactctggcaccgttgggaggtgtataacgccagggatgaaccagacgttcatgcccttctcggccatctggcttaccatctcctggaggccgatgaggacgggtatttccttcatctcctcctccctaactagggtcatctcaaagcggtctctatcggtgagctcgcttatgtgcttgagcgggacgccgtagccgctcggcccgatgattatgtccgcgttgaactcctcaatggctttcactatccttccaggatcctctgcaacgacctcgctcggatagctgaggtcgagctttatcctcccatcttcaagccctatcacgtcgaagctcttggttccggggtcgacgcctataaccctcattactccccctcctttcttccacggatgtagcgcttcccctttacagagacaactctgtaaacatcgccctcggtaagctcaactcctggcttttcaatttcgtaggtctcatagctctccatatccatgagctggacttcgtccctccctatgctcgtaaccatcgcctcgctctcctcgtgctcgactgtatcaactccctccctgctgagggtcttccagtccttgtgctcgctctcccccgtggagagattgcgcagggtcatgcccttgccgtcaaccctctcgacttcgtaaacggttccccgcttgtccgtgactatatctcctctctggaacttgggtattctgacgctgacgctcgtcctgtaaacctctctgctcgtctgcctgtccatgcccactagctcgtaggcctcgcttatctttccaccgaagcgctcctttatggcctgggccagcttcctcgcggcgctggttgatcccatatagaagtccagtccttcctccttctctatcgtgtcctgtatgaagcccatcctgtccttgcgcattatctcatccactttctcctcgacgagcttcccgatggcctttctttcttcctccgttagaggtctgtcctctgccctgacctgaagtatcgcctcgaaataaccaccgaggaacttctgacagcgcgggcagacggtctggcgaacgtatactgtaactttcttccgctcgtcgtgtagctctcgctgaagctcgtgggttctggccttaacacgaacttcgtacgttattatcgccgggaagtactctatatggtaatccacgggctcaaatgaaacgattgctctgccgacggggatttcctccgtttcttcaagctcctcaggtgatacgacctcgtactcgcggattttgtcgctgaaggaatcctcaagggcttcaagcagggcgttttcggcaacctcaaagatgagctcctcaagttcgtagctgtggggatcaacccacactcctctcttcttgtagctcccgcagttctggcagagctccgtgtttatttcgttctcgataagaaggacgggattttccttccggtagcacacctgacagagaccctcaatgaggggcccaccttctctctcgcttatcccacatctataacaaaagcgctcgctcacagctctcaccggagagagtgccagacgagaagttaaaaacctaactcagaagaagagcctcgccatctgggcatgcgggacaccctggattctcaggactctttcaggatcgacatacccgagctctatcgccttcgagacgcagcgttcgccggtaaggtttgctatcgttgcctcgtccaaaagctctttcaagcgatcttcctcgacgagttcgcccctataaaagcgctccttgacctcaagcttcaactccccctccctgaatgtcttcccaagcagctcctcatcgcaagcggcgagaagaacctccccctgaacgcgatagaccttcacatatatcatttgaccaccgggagaaaaggaagaaaagaggttaaaaaggtttcagccctgggcctcaagctcctcgatggcttcaaggagcagcttcactgccttcatctcgttgaggtacgccaggcgcagtggccttatgagtctcgggtcgctgaggtacgcgagtatgttgccgtcggtgatctcaatggcctcttcgtagtacttctcggcctccttgtggagctctagggccttctggagggtttcgttgtccacaccgagttcgagggccttctggtaggtctcgttgaactcctcgtggtatatgttgtaccagcggtagccgaggaagttgagggtcgtgatggagatgccgctctctgatggtacagttacttcctttgttccctgcgccacaatgatcgggtcctctttgagtactacgaatataacattgccctccttgtaatagtaaccgagtgagttgctcttgtttgtggtaagctgaaccttctgcccgttctttataacatagaccttgcttatgttgacatccctgagagccaccactgccacaccgttctcgccaatgctaacgtttgctgttatggtcacggagtataccttcttgttgcctttggtatctacaggggttgtcttcgtcgaaacttcagtcaacgttgcgttccagccggcaaccagggtggcgttgctgcctccggctacaacggtgtcaacggaggaggcgttcacaacgactgcgggtatgttgttcacaactgggatctcaacggtgaactcgccggaggaggtggaaacgttagcaacgatggtgttgttctcggccgtcacgttggcgcttccgccgacgacgccgatggtaacgttggtctcgttgtttacgataacctcggttaccttggcgcttgtgtggacgacgaataacctggtggcaattccatatgccccagtcgtgtcgtttgcaatcacagttagtttgtactctccattggttaggttagtgagggtagcaacgtagagtgatccgcttgccgtcaggttcaggggcttcccattgaggtaggccttaacgtttgtcacggtggcgtacgggtcggtaacgttaacaactacctcaacggttgaggtgttgtaaactgtgttaactggggataggatgtcaaccgttgggccttcgatggtaactgttctggtcggaagagcgacctccttaccattcgggtaaacgacgacgactgtgtagttgtatgttccagcagggagcttaagcttctggtctatttccgtaccgtagaagtagtagccaccgttctcctcgctgagctggtactcctttccgtcaatgctgacgtaggcgcccttgagcgggacgaggctgagcacgtcaacgctgaagttgccgaagtttattgttgagctatttgaaagtgtgaggcttccgtactgcactatcggaacctcgatggggataactttccatccgccgtcgggaatggttccattggttatatcagccgaggcgagaagcatgtagtcgccggtcgggccctggtagagaagtgtgaaattgtagatttcacctgttatgttgtctgggattatatcgcttacgtttgtgtagatagtcatgtaagttggcgcatcacccgtttcttccatgtaataagctaacccttcaccaagcccacttacgtcgaatgccatcgggctgttcgggaacgggtgagcctgtggaagtttccgataaaggagagtacggttgttggcaaggtacggaatgacgttttcagggaggtaatcatggtagaagtccaaaaagttcatgccccacactggagttccatttacttctgcaactatcgggataccagcttcgtgaactggcatatacgtgcttggatcgtaggtcccatcaatgacctctcctcttaaggggtgagctatgccgacgacgctcatgagcttcggctggtagttggccgccttaggaacgtatacccatgccagttggaacgattcctctccaaaccgaatgtcctcgtagctcatgtagaagtatcccccatctccccagttctggccccaagagttcgctatcctaacaacgccatatccgtctgcggttttgactctgtcatcgtagcccacgatggttacagcgtggccacctttaattaacgaatatgtccttccatacttgacctcaatgtacttggaccaaacttcccaccagccggtttccttggtgaagtcataaaacgctttggtctcagtgtagggcataaaggtctgcttcagaccctgtatgaaggtctcgttgctcaaatatgtctcgttgacccactgataataggtctcgttgttcgtcgcagtggcgacgtaacttgcccagtaatcaagggcctgcagtatctcatccgcgctgtcaaagatattgaccgcatcgaatggaaagcttaccccataagcatactgcacaacgtaaccggcagcgagcagttgcttgaggtactgccactgggtgtcgttggacaggtctattatgtaccactgacccggaacttggtactcatacaatgaggcctgccacatgtagtcgttaccgctgttacgcggtgctatcatccactgggtgatgttgggccacctggagatagcttcgttgtaccactcgtaatagagagtgtaatttgtaagggtaccatttgtaaatgcttcctttggaggatatgtatagagtggaaacgcgtccagtggaacggcaccgactgtagatataagggtcatggcatcccaggggttacttccttcatcaacgccaccgttaatcaggttgtaggtaaagctcgggttcatgatgacgtctggcgtgcgaggatatggattgtccctccaccagttcatcatgtacgtccagacgtagtaggttgaactccaggcgttgcacgagccaatgtaaccttgatcccctataggtgggagatacagattgttgaacaccattggcggaagagacaaacctgaggacaccttgtatcctgtggtagagggcaatattgccattgtttccctacccggatagtacggagcgttcattagagcctctttaaaggcagactctgttaggggcttaaattttatgcccgtaattttcgagtattcctctggcgaaacccatctaagtcccgttttatatgagctaagaagcagactcttgtcaagtgtgtcctctagtgtccttatcacactgtgattctctggagagttctgagctgccagcgtccccggaagcactgctggcactaccgacagcaccattactgccacgattagcaggctcaacacctttcgattcatagcaacacctccgttgtttggcattggaaactagatgtcagcagtgatataaagatttcgccgagagtaaacgcatcttatcactaatggtgaatatagggcattgggggtagataatcatcaaaagagcccacactacacaggatagtcattggtcactaaaccgcaaagacagagtgagtccgagacatatgcgggtattattggtttagctctaacaaacaaagattagcgttggattaacttcaaccggatcacttcggcgatagcattgcttttccttatcaaaagcctcgtccctagggcagaaaagaatcagcttgaacctgttctgggtgtggtcctcgtcccgataatggtcagcctcaaatcctggaaaatcaacgctccaatgataaacatcaggatgagcgcatctattccagaatcgagggcatatatcatgagggaacagacaaagacaaaggtttcatgctccctttcgctctctctaaggaagaggccgaggagaaacgcctcaagaagaccaaatatgccaaaatcagccaccgcttgaccgaaaaagaagtacgtgtagttagttgatgcgccaaagagctgtgagaccagggctctggggccttcactgaagagaaccgagccgtgaaaataaccccagggaagggagatgcgaaccaggttatggaaaaccagaaacgtaaatccaattcttacaagcagagcagagatgctcccgctcatgatgagcaccattccaaggagtgccgagccaaaaattacaacatgccattttctttcacgactcagagtgtagtccagcagatacgggatgtatccgaggagaagcagggagcggaaagtcccgagaaagtatacgacagaataagccaagagaaagagtgtttttgctctggtggaaaacttcgagtatgttagcccccctgctcccaatagggcgaaaaggacgaggggaccaacgattttgtacctgagtccccactggaaaaggggaatgcccatgcttaagtaaaagatgatggggccgagaattgagatccagagggccaaagtggagaacttttcaaagacgtcaatcttgagatagtatccaatcacggccacaaatgcgattaaaaatgcattcgggaagtcgtgaagggagagtatgagaaacagtgcaatgaggaatgatggtggaagctgaagtcccgaaagatagcccgcggcaaacgccataaaaaaaaccagggcaactaagaaaccaagcaagacggatgagggctcaaagcccctctgatagacaacggcgcgaaggtcttcatccaaataattggagtagagtgcaagaaatagatatccaaaaaaagcaaggccaaatatttttaaccccctcacaacaccaccagtaaaagctgatggctgcgcttaaaagcttttagaggtgttggccgtggagcgaaagagaacatacgtttcaatgatatacctattgttgctcattattgtgtcgttcataatcagactgattccgcacagaaacctcttactggcggcttatgatgagtaccttcatagggacctcaccctgagaattgctgaaggtggaataggggcagtgtcccgggatctaccgtccctcctcggcctccgtgcctacagttatccgcccctctttcacatagtcggtgccttcctctacagaatattccactcggactatttcttcctcgccataccagccgtttacggcacgtttgcagtcctggggttttactttgcctacaaagagctctttgaggacgaaaaaaaggcgctcctggcgacattattgctggcgtttgccccaaacttcatatacagaacaagcctctacatacccgaaaacatggggctgcttctgttctctttaagtatgttttttggtgtaaggttccttaaaaataagacagtatcgagctttatcccctttgcagtgacctttgggctctacaccataacccacaggggatggatattctttgcctttgcggcagcgatagtcttgctgtcttatttggagcccaccataaagcgcaacgtccactatgtaatcatcctggtccttgctggacttctggcataccttggcctgccccaggtaaaatcaacttttggagaactatttttacggcttcagaggagcgaggtaagtttccttggatatttcaagtgggttggaattgtccagctcgtcttcggggttcttgggagttcatattacttcaaaaaaggacccctccagaggggacttgtactgtgggcctggacattcctgctggcgggtggagtctccttccgctttagggatccctacgccacaattccccttgcggcaatcgcctcggactattttatagatgtcgttttcccatcaattggccccgttttgaagagggtcctaaatgacgtgcggggattcggttccgctcttgtaaagacccttcctgagaagagggcagtccaagtcctcataatagcggtcttaatcttaactcccacattccagggggtctatggggcgtaccattatatatcgattccgagcataacggacaaagaggcctatgagtggatatctcagaatacccctgaaaacgccacgatactcgtttggtgggatatgggatacctcttgattggaaacacccacagaaaggacgttgtcgtgtggaaaaaggtttatcaggggttcttcggtgaggccccaacggtaaaggaagcggcgcgggcttacacggaccatgtcataatgttcagctccaaccagaggagtctcgtttactatcttatgaaaaaatacaacgtgagctacatattcgttgacagaccgcgctactcctacggactgataaggtatggcctcatggaatatgccccgtatgacacccactttaagctagagttctgcaatggtggttccgtgatatacaagttcatcccagagcccgaactcagaatagaacagcctctccccatagagtaccatggggactactcccctctggtgaactttttcgagaggttctggacgggctacaactacgccgacttcgacacaggatacaaggcctatttcaacttaaacggatggatggttgatctgtactacaacctgtacaacaaaaccggagatgggaagtttaaggagagggcagactggctactaaagtggctagagtacaagcaaatggagaacggggcattcccttggggtgttcctcccaacgacttcacgctgtacacggcgtacacactggagcccatcaggaagttccagttcaacggaaccaagaaagcgctcagtctattgaagtccagagagaaagaagattacttcatgaccaccccaaaggacaaatcgggaagctttgttgtaaacgccctgctgcttccgctctacaaggaactcggcatcttgaacgccacgacggagaaaaacgttcttagagagatattgaacgagcagggtaaaacgggagactggagagataacatcggtaccacacttgcgatagcatccgctctggcaaggtattaccagctcacaggggacgaaacggtgttagagtctgttaaaaaagccgccacatggctcaaagaccagcaggacgaggaaggtagacttaaggcagagaattacccctacgcgtactcgaggacaagctacgttcagatggcttatatttaccacgtggcgggctttgaagaacaggcacagaaaacgctcgatttcatcatgaaaaccttcgacccaaccaaagagacgcacccgctcgatgcggcggtttcaatataccgctacatgacgtacgcatacggaagcgagaaagcaatcgagttcctgaactccctcctcgagcagcaccccctcccaaagttccttccgtgacatacgggctttaatggacattttttcctcttttttcatccctatacaccaaagaacaggtctggatagttaattttaaaagcggccggttgatatatcacccgcagtaattaatttggagggatcgccatgagcgaatacaggtttataaagtggtttgaggagctcggcaaggaagatgttccccttgtcggtggaaagggtgccaaccttggtgaactcaccaaggccggaattccggttccgcccggattctgtgtgactgcagaggcctacaagtactttgtcgagaacgttaagcttgaggacggtaagaccctccaggagtggattatggagatcatcagccagaccaacgttgacgactccaagcagctccaggagaacaccgccaagatcaggcagaagatcatcgagcttccgatgctcccggagatagccgaggagatcgagagggcttacaaggagctcagcgcccgctttaacaaggatgccgtttacgtcgccgtccgttcatccgctaccgctgaggacctcccggaggcttccttcgccggccagcaggagacctacctcgacgtctacggcgttgatgacgtcatagacaaggtcaagaagtgctgggcctcactctggactgccagggctaccttctacagggccaagcagggcttcgaccacagcaaggtctacctctcagccgtcgtccagaagatggtcaacagcgagaagagcggtgttatgttcaccgccaacccggtcaccaacaacaggaacgagatcatgatcaacgccagctggggcctcggtgaggccgtcgtcagcggcagcgtcaccccggacgagtacatcgtcgagaagggcacctggaagatcaaggagaagttcatcgccaagaaggaagtcatggtcgtcaggaaccccgagaccggcaagggcaccgtctacgtcaaggtcgccgactacctcggtccggagtgggttgagaagcaggttctcaccgacgagcagataatcgaggtcgccaagatgggtgccaagatcgaggagcactacggctggccgcaggacatcgagtgggcctacgacaaggacgacggcaagctctacatcgtccagagcaggccgatcaccaccctcaaggaagagaccaaggccgaggaggtcgagggcactgaggaggccgaggtcatcctcaagggtctcggtgcctcaccgggcatcggtgccggtagggtcgtcgtcatcttcgacgccagcgagatcgacaaggtcaaggagggcgacgtcctcgtcactaccatgaccaacccggacatggttccggcaatgaagagggcctccgctatcgtcaccgacgagggtggaaggaccagccacgctgccatcgtcagccgtgagctcggtattccggccgtcgtcggtaccaaggaggccaccaagaagctcaagactggcgactacgtcaccgttgacggtacccgcggtgtcgtctacaagggcatagtcaagagcctcgtcgagaagaaggaggagaaggccgctggagccgctggcggtcaggtcgtcgttgctggagctccgctcatcaccgcgaccaaggtcaaggtcaacgtctcaatgcccgaggtcgccgagagggctgccgccaccggcgccgacggtgtcggtcttctcagggctgagcacatgatcctcagcatcggccagcacccgatcaagttcatcaaggagggcaagttcgacgagctcgttgagaagctcgccgacggtatcaggaccgttgccgctgccttctacccgaggccggtctggtacaggaccctcgacgccccgaccaacgagttcaaggagatgcccggtggagaggacgagccggacgagaggaacccgatgctcggatggcgcggaatcaggcgcggtctcgaccagccggagctcctcaaggccgagttcaccgccatcaagaaggtcgtcgaggagggctacaacaacatcggcgtcatgctcccgctcgtcggccacccagagcagatcaggaaggccaaggagatcgcccgctcagtcggccttgagccgcacaaggacgtcgagtggggcatcatgatcgaggttccagcagcggccctcatcatcgaggacctcatcaaggagggcatcgacttcgtcagcttcggtaccaacgacctcactcagtacaccctcgccatcgacagggacaacgacaggatcgcccacctctacgacgagacccacccggccgtgctcaagctcatcaagcacgtaattaaggtcgccaagaagcacggcgttgaaaccagcatctgcggacaggccggaagtgacccgaagatggccaagatcctcgtcaggctcggcatcgacagcatctccgctaacccggatgccgtcgagctcatcaggaagaccgttgcccaggaggagcagaagatcctcctcgaggccgccaggaagaggctcttcgaggaagaggacgagcttgagttctgaagtcctctcctcttttctacttcgttttctccacttggcaaaaggtttatttagttccattctaaatcccttaatggtgattctatgggtgctgtggaagttaagagagtcgatccccagggaaggctggttttgccgaagtcctggcgtgagaggtggggaaacgaggttatagtcgtcgaactcgaggacaggatagagatacttcccaggaagaagcccaggctttcaaggttcttcgacatcctcgaagtcgagctgaagggagaagacatcgagaaggagcttctcaaggacataaatcctcagtgagggatctctatgaggttcatcgatgccaacgtctttttgtatgcggtcattaaaccaaagggagaagtaccctcctcggtgctggaacgaaagaaaaaggcaagagaaatccttaccagaattgaaaacggcgaagaagtggcaaccacagtagtccacctcagcgaggtggccaacatccttgaggctaaattaaacctaaccattgcccttgaattcattgaagacctcctaaccgctgagaacgtcattgtcctccccgttgctactgaggattatctcaaagctattctcatagctcgggataaaggggtgagcgtgaacgacgctttagcttacctgaaaatgagagaacttgacataaatgaaatatacacctttgacagacactttctgaacctcgatgtcaaaatcgtggaagagtagctggttcttttatccacgataaaccttttataccaacgtttagatttccatctgatcgatcatgcggagcgagaaagtagagcggatgcgcgagcagatactcaatgggccgatagtcaagacactcctcattctagcttatcccctaatcatcaaccagctcgtccaggtgctctataacctcaccgatactttctggctcgggaagctcggaaggcttgagctctcggctcccggaacggcgtggcccctcgtgtggttcttcatgagcatagggatgggattcgccaccgctggcttcgccttcgtgagccagtatgttggggcgaaggactacgatagggccaaccgctacgctggggctttatattcgctcatgctcctctttgcgactgctgttggggtatctggtgtaatactcgctccctacctcctccgcctgatgggtgtcagcgacacgatattcccctacgccctccgctacacgagggtaattttcgcgggcatacccttttccttcacgctcttcgccttcaacttcctcctgagggcggttggcgacacgaggacgccggttaagataaacatcggcacggttctcctcaacctcgtcctcgacccgttcttcatattcgggtgggggccgtttccacagcttggtgtcgttggtgcggcagtggcaaccatgctctccaacagcctcggctccctcattggaggttatctcctgttcacgggcaaagtgggcatacacctcacgcccgagactctcaagcccgacttccacttctactcgaggattttccgcgttggcctgccttcaagcatcggctcatcaaccactgcactcggcttcgtcatcctcacgagggttatcttcaccgttggaaggctctacggagaggcacatgggcttccccactatgaagacgtggctttcgcaacatacagcataaccaacaggctcaccaacttcatgttcgccttctccgacggcataagcatggcgatggggactatggtgggccagagcattggagcgggcctctacgagagggctaagaaaatagcggagaagacgatgctcataaacttcgctatcctgagcgctgggacgatcctcttcgcagccttccgcgtcccgatattcaggttcttcattaacgacccggcaataatagccgagagcaggaaggttgtcctttacttctccgcctcgcttccgttcttcggaatattctcggccgtgaacaacacgttcaacagcgcggggcacacaaagaagagcatggtcatcgggatgatccgcctctggggtataagactcccgctcagctacggcctcggggttttgatgagagatacggcaggaatgtggcttggaatgggtctgagcaacgttcttggagcggtcatagcgctcgcatggttcctcaggggaagctggatgagggcgataatcgagaaacattagttttaactccacatccattaactttttatatccccgcttcgatgcccgtcttactgtggtagggatggagcgcggaaagattcaggcaatgaggcaggaaattctcaacgggccgatagagaagaccctcctcaagttagcctaccctctaatcgtcagcaacctcgtgcaggttctctacaacataaccgacaccttctggctcggcaagcttggcagggaagccctggccgctccgggaacgagctggccgataataggaaccctcatggccctcggcatgggatttgcaacagcgggcttcgccttcgtagggcagtacatcggggctggaaactacgagagggctaaccgttcagcgggggctctctactcccttatgctcttcttctccaccgctaccgctttgataagcctggcaatcctgccctacgcgctccacttcatgaaggtcactccaaacgtctacccctacgccaaggcctacgccaccgtcgttttcgctggtgttcccttctccttcacgttcatggcgttctccgcccttatgagagcctctggcgatacaaaaacacccgtgaagataagcatgctcacagttgccatgaacatcctgctcgaccctctcctgatcttcggaattgggcccttccccgagtggggtgttgctggggcggccatagcaactgtcctctcaaacgccaccggagccctcataggtgctcgtctcttaacgagcggaagggccggccttcacctcacgagggaaacgctcaggccggatatggagttctactcgaggatttttcgtgttggccttccctcagccgtcggccagtcagccaacagcttcggctttgtcgtcctcacgaggatcatctacgggtacggagatgtgacctacgcggcctacacaataaccacccgcctcgtgaacttcatcacgagcatagcaaggggcgtcagcatggctatgggaaccatgatagcccagaacattggggcggagaggtacgagagggccaagaggatagccgagagggcaatggttataaacttcctcatagcctcttcagcgatcctgataatcggactcttcagggttccagtattcaaggtcttccttgacgaccctaaggtcatagcccagagcgagtacgtcctcaaatacttcctgatttccgttccgttctttaatggaatcttcgtcgttgttacgaggacttttagctcagctggacacaccaagaagagtatggttctcagcatgcttcgcctctggggcttcaggatacccctgagctacgtcttcggctacgtcgcggctgtgacggttttcgggcttagagttccgctcgcggagctcttcgggatgagcccaaagggcgtgttcttcggaatgggcatgagcaactttttggcggcgatagtggcattcatatggttcagcaggggaacgtggatgaggcgcattatcgaggaggaatcaaaagagtagcacttccttaccaaaaatcggcaaacggaagtctaataaacccaggccccaactcccaacggtgaagtccatgaagagggacgagcgctgggaaggtgtgtactcttttgaggacagccccttcataatggagattctcacggagttgagggacgaaagcactggcccgatagcgttcagaaagggcctcgtcaaacttggacgttacatggcatacgaaataaccaagactatggcgaccgaaaaagtccccatcagaacgccgctggaagaaacagagggcataatcgtgaaggaccgcagaaacgtcgtgataatcaccgttcttagggctgcgattccattaatggagggcctcattaaagttttcgagcacgccagggttggaatagtctccgcatcccgtggaaaggcgccaaagttcgagattgagatgaagtacgtcaaagtgcccaggataaaggcggaagacaccgtcataatagccgacccgnnatgatacgcaaccggctcaanncgctcatcaannagtccntggatgaggtntaaaaagtacggtaacgccaagcgctacgtggtagtcggcgttctagcagccccagagggaataacccggataaaggaagctcacccggatgtcgaaatgttcgtggcggcaatagatagagagctcaacgatcacggatacatacttccgggcctcggagacgccggagatagagcgttcggagaaccgataaggtttgaagatggagccccgggcgggatttgaacccgcgacctgcggattacaagtccgccgccccgccaggctaggctaccggggcacgggataagagttgaatgagtagttataaatttttcttttctcaaaaccgcaaaatttataaatcaacctctcattccctacattgggtcgagccgccgtagcttagttggtagagcgccggactgttaatccggcggtccccggttcgaatccgggcggcggcgccatcaggtgggcccgtagctcagcctggtcagagcgcgcggctcataaccgcgtggtcgggggttcaaagccccccgggcccaccagtacaaacttcgcgcaggcgaagtttgatcaaggctcgtagctcttttccagaatgccaatttcatgtgatttttctcgtcgagcaattgtgttcaaaagagagaacttctaaactctcctgttagtgcgtgtttaactcaaaatcgacgcccaaagggcgtcaaagaaaagaaaacaccctcttcaagaagcttcctaaaaggttctcactcaaaaatgagcacttgcagtctaaaatcctaaaataaaactctccttgaagaagagctacaaacttttggtcaagctttttccaaaagcttgtgggcaaagtttcatcaaagatggaatgtcctttttgagtgcccagcttttcagtgattctcaccataaattggaaatcctcaaggggtttgctcgcagtataacgcccgaaaggcgttaaaaataagaaaacccctattcatctgcaaatttgtcatgagaattccaattctcagccaatatcacgaagacattcaaacttttggtgaagctttttctaaaagcttcagcgccgctttcactgtcgttcaagcgtccttaacggatggcggaaagttgatatgctcttttaaacaggctcgttttatgaggggtttactttcaattggctgattcaaaaggattttcaagatacacaagctagcattagtgaattcccaatttcagccctctaaaaggagtttctaacaccttgacgcccgtggggcgtcaattaaaaagcaaactcacacagatcgggcaaattaaaaatagaattcgccactcccaacagcgttcaaaaggaaaatccgcccaaaatgctccgtcaaacacgaaccacgcactttgatgaaactttgcttgcaaagtttcattggtgaagctttttctaaaagcttcctgcgcgacgttgaagctctgcttcaacgcacggaacggtagttccgttgggttcgccaagttcttggttcctctagaatcacttccaaagggagtttgggaaaggtaggctaatatccagagaagatctaaaaataatggacaacactaccttgcgtgtatttccactatgtctccatcttcgagcacgtggtcggccccaacgcgctgaccggggaacttgacgctcttgccccagaccctcgcgtagcggaagttcttggcgaagtccttgtggattctttcagctagatccataaccgttgaacccttcttgagcgccaccggcggataagcgggctcttctccggggctcttggtgaaaaccctgataatcccagccagctcataaagctcgtcctttagcttgtcgaggttaatctttctcctcgccgagaccggcactatcttgaagcggtcgccgtaggctttgacaagcttctcgtagttctccttgcttccaggagcgtcgcccttgttcgctatgatgatcgcccttctccagacgaggctttcatcgagcgcgtcagcaaactcctctagggtcacaggttccttaacggttatctccgcagagtgtatcctttcctctctgagcatcttcatgacttcctggatgtcgccctttatgttctcctgaccgttgatgacgataccgccgctggccgtcctctttatctccacctttggcttcctcttgttcaccttgatgcccgccctctcaaactccctcaggaggatctccatctgtttaaccgggtcctgggaaaggtcaacaacgatggctatcgcatcggcgttcctgataacgctcaacagctgggggcccattccctttcctagtgccgcaccctccactaatccagggacttcgaccagctgtatctgaacgtccttgtggtgcatcattcccggaatcggctcgacggttgtgaaagcgtagtcggcaacgtcggcatccacgttcgtcagcgccctcatcagggagctcttaccgacgtttgggagaccggctaggacgatctgagctgcaccttccttccttactgccattgaggggccgccaccgcccttgcgcatctgcctctgtttttcaagttccttcctgagctccgcgagtttcctcttgatctggagtctaagcttttccgtacccttgtgcttcgggactgttgcgtacatcttttccagggcgcggatcttctctggaatggtcttggcgttcctgtactcctcttccgcggcaaggtattccgctgttacgttcgttggcattcctgtcacccccttccgcaaagacgaacgggtttttataaacgtatggtatcctatagtcggcaaatttataagctcttccgaaaaattttccccgtgtggtgatgtttatggctagaggaggtcttgacgaagtcgataagaaaatcctcatgattctccagaagaacagccgaactccccttcgagaaatatcaaaggaagtgggacttgccgagtccacgatatacgagcgcataaagaagcttaaggagaagggaataataaagaagttcacggtcatcctggatccaaacgctctaggtttcagcatactcgcgttcatcctcataaaggccaaggctgggatgtacggccacgtcgctgaccagcttaagaagtaccccgagatatgcgaggtctatgagaccaccggcgactacgacatgatcgtgaaaatcaggactagaagcagctcagagctcaacgagttcctcgacaagatgggaagcattgaaggagttgatgcaacgcacacgatggtcgtcctcaaggttcacaaggagaccaccgaactgccgctctgaactttctttttaatgtttacacgtgttcgtcatttctgtccagcaagggttataaatgtcgagtttcaatctttatctgaatgttatgggggtgattgagatgaaggtcttgattctgagtgctgacggttttgaagaccttgagctgatatatcctctccacaggatcaaggaagagggccatgaagtctatgtcgccagcttccagaggggcaagataacgggcaagcacggctacacggtcaacgttgaccttgcctttgacgaggttgatccggacgagttcgacgcgctggttctccctggaggaagggcaccggagatcgtcaggctgaacgaaaaggccgtcgcgataacgaagaagatgttcgaggacggaaagccagttgcaagcatctgccacgggccgcagatactcatctccgccggcgtgttgaagggaaggaagggcacgagcacggtaaccatcagggacgacgtgaagaacgctggcgccgagtggattgacgcggaggtcgtcgttgacggaaactgggtcagttcaaggcacccaggggacctgtacgcctggatgagagagttcgtcaagcttcttaggtgaattttttctttctgattcaattcttttccttagctgttactgaagacaggtaggcaagtggtggggaactgttatacctttccgccggtagtggggtcagttctttggaaccctggccgttcgcgatggggaggaggtcagcttttcttccttccatccaagaaccctggactgatagtgcattttcgggaatattgacagcgggtcaattcctctcttccttaagaggtgcctaagctcgacctcgtagtcgctcttctcaagctcctcgctctcccttatctcgacctcaaagagccttccaacgagctcgtttatcgtcctgtagccgaggccgaggagaggccttatgtacgccaccccgaaccgatcctcaagtgaacgtgcctttggcaggtcgaggtatggaactctgtcgtcccttctcgttccgtcactaaccctctcaacatcaggtttcgaggccagggcctcaagagccttttcgtggatgaactgaatcgcccttccgggtcttccgtcttcaactgccatttcggcggcccgctcaaggatctcccctgagagcttgagaatttcatgctcgaagccaagtcttctggccgtttcctccgcgtacttccagttatcgagcgttccgaaagttacggtaacaagcctgacctcatagcccagctttgctaaaatccacgccgccaagctggagtccttgccgcccgagtagaggtggtataccttcatcatctcacctctttccacttatgccgtcgttttttagcggttctgttaagccattccgtttacgcaatcgatttataggcgatggaaccattaacttcggtggtggaaatggcgttccttaaggttgttccgctcgaggaggcagtaaaggtcatcgagtcctttaaccttgaaccgaaagtcgagaaagtttcgcttgaacaggcccttggtcgggttcttgcagaggacgttgtgtccccaatagacgttcccccctttgacagggccaccgttgatggctacgcagttcgcgctcaggataccttcatggcgagcgagagcgaacctgttaagctgaaggtcgtgggtgagataaacgcgggagataccccttcaatccagctgaaggaaggggaagcagtctatatatccactggtgcaccccttccagagggcgccgatgcggtcattcagttcgaggacgttgacagggatggggacaccgtcatcatctacaagcctgcctatcctggcctcggagttatgaaggcaggggcggacattccaaagggcaagcttctgctgaagaaaggaaccaggctcggcttcaaggaaactgccctcctttcggcggttggtatctccgaagtgccggtgtttaaaaaaccaaaagttgccgtgataagcaccggaaatgagataatcccaccaggagaagagctcaaaccgggcaagatatacgacatcaacggaagggccataaccgatgccgtcagggagcttggaggggaggcgctcttcctcggcatagcaagggacgaccgcgagagcttgaagagcctgatactcgagggacttgagtgctgtgatgtcgtcctcctcagcggtggggcaagcgggggaataagggatcttacgagctcaataattgaggagcttggcagggtttacatccacgggatagcaatacagcccggaaagccaactatcattggggaaatcaacggcaagccgatcttcgggcttccaggctacccaacgagctgtctgacaaacttcacgctcctcgtggcaccgctcctgagaaagctgattggaaggagttctgaagtcagaaaggtcaagaagaggctcgcccacaaggtattttccgtcaagggaaggagacagttccttccggtcaggattgaaggggagaaagcagtgcccattttgaagggcagcggcgcggtgacaagctttgtggatgctgatggattcatagaagttccagagaccgttgaaatcctcgaagctggggaagaggttgaggtcacgctgtttgggtgactctctacactttggagatactgtacaactggcaggctgaggcaaagcctaaatacttctttttctcatcttttccggtggtgagaatgggagtccagataggtgagctgataccgagaaaggaaatcgagctggaaagtctctacggcaagaaggttgccatagacgccttcaacgccatgtaccagttcctctcaaccataaggcagcgcgatggaactccactaatggactcacagggcaggatcacttctcacctcagcggcttcttctacagaaccatcaacctgatggaagctggtataaagccggcctacgtcttcgacggcaagccaccggatttcaagaagagggagcttgaaaagaggcgtgaggcaagggaagaagcagaggagaagtggtacgaggcccttgagaagggtgaccttgaggaggccaagaagtacgcgatgcgcgccacgagggtgaacgaggagctgataaacgacgccaaaaagctccttgagctcatgggtattccagtcgttcaggccccgagtgagggagaagctcaagcggcttacatggccgccaaaaaagctgtctatgcctctgcaagccaggactacgactcactcctcttcggtgcgccgaggctcgtaaggaacctcacgataactgggaggagaaaacttcccggaaagaacgtttacgtcgaggtcaagccggagctggtggttctggaagaggttcttaaggagctcgggatagacagggagaagctcatcgagctggccattctggtcgggactgactacaaccctggcggaataaaggggatagggccgaagaaagccttaacaatcgttaagagaacgaaagacccgctggccaagtaccagaaggagagcgacgttgacctctacgccataaaggagttcttcctaaatccccctgttactgacgactacgagcttaagtggcgcgagccggacgaggaagggatcctaaagttcctctgcgacgagcacgacttcagcgaggagcgcgttaagaacggcctcgaaaggctgaaaaaagcggtaaaagcgggaaagcagagaaccctagagagctggttcggtcgatagtcaggctatcggaaccttgaggttcagcttttctaccagctctttatacctgttcctcacggtaacctcggtgaccctggcaacctccgccacttccctctgggtcctcttctccccttccatgaggctcgcgatatagagggcggctgccaccaatcctgctggactctttccgctagtgaggcctctctggtaggcctcttcgaggatctctatggccctcctcctgaccttctcgctgagacccagctcatcggcgaacttgttcacgtaatccgtgggcttgacgaagagcttctttggagtgaggttcaggtgcctcgctatgaagcggaagctccttccaatctccttcttatcaacgcgagagacgtcggcaatctcatcaagggttctcgggaccttcagaagcctgcaggcggcgtaaacacaggcggctatgacggcttctatggagcgtccccttatgagtcctttcctcactgcttcacggtagagccttgcggcctcttcctcgacgtgcttcgggaggcttagattgctcgcgagcctatcaagttcgctgagggcgaaggcgaggtttctctcagcggcgtcgctgaccctgagacgggactgccacttcctcagcctgtacatcttctcgcgcattaagccagttagcgacctgtctattccaatgtcggtggaaagtcccttgtcgtggagcagtatgctctcgggagcaccgacgcgcgccctcttctctctctggcccggatcaaaggccctccactcggggccctcatcgaccacgttctcctcgataacgtaaccgcaaaccttacagactatttcacccctgctggggtcgtatatgaactccgttgagccgcacacgggacagactctcttcccgctcactcaaacacccccggccggcgggctgttgggcaaaccccttataaccttaaccttcggaaagacgtacctaaccaaccagaggatatcctccttcttgaaggttatcctctcaagaacgcgaacatcgtcgtcttcctcaactatgttggcatagatccacaggaagacgggatcaccatcactgccgacgtgcttgttcttgtagagtatatcggcagtcccatcgtcgttctcctttatggagacgaccttccatgtgtccagacttacctctcccttttcgtcgaggattttgatgatcagggaagcgtccatatgcgatccctttaccacttgatcttaaagtctctcctcgttctggcgtctatctcggccagaatcctcttcagctttgcgtcgtctattctctcccttatctgccccgcctggtagagctgaaccaggagaagctcaacctgtctcgccagttcgggtttgactagtttgacccttccaagcctctcccttgcttcgggtgtgaggatttttctcattattgcctccagctgcgcttccagctccatctcccgcttaagggcttcttcctgggccttctgctgttcgaggtacttcttctggagctccatgagcttgcgcttcctgatctcctctatgtcctccgccatgttctcacctccaggttaaaattggaagtcccgttaaaaaggtattgggacgaaaagcttaaagggagaataacaactcaagaatgtaataaacccttgatgtggtgattaaaatgaatcactatagaaaattactcgctctcatatctgttttgattgtactctcatcgccctgcgtgagtgcctacagtacagcctggtgtgaaagctgtcaccagttgcttgttgagaacgacgggctttttgcgtacaatgggagcgaattccaagatctaacatggaagcttgaagcggaggagctgccatacgaagatggagactttttatccattgtggacactctggaggttgccaatgccggaaacctaacccttatctactcttacccgtacgacgaactctacatgggggtgtacaacggaagtgttcccataaccctaaggccggtgctccccaattacgtcggctatgcccgcgattttctgttctacaacgggagcatttttctcgttgttaactatgggagtgttcctcactcagccagcgacagcgttttcaggctcgacccaaaaacactgaacgttaccggggagtggggcctctcgtgggaggcgagggacacgatagcccccgagaacgcgggcattaccccctacgcgtgggtcaacctcggactggacaacaaaaaccgcctgtgggcccgcgtagatatgatctttccgaacactaccgtttactacctctaccacaacggagacttcgagcttaaaaacgagacccctgagggattccacattcctgaggttaaagcgcccttcgatattgcggttgaggatggaatcaggtacgagccgctctctttccttccggaatacactcccacgaggtatttcttgatcgcaaacggcacgaagagggacatcacaaaggaagtgctaaagttggcgtactcgtcgagaccgctgaagtccctctacggtttctggtcgtgggagaaaaacgagtgggtggtctcgttcaggatgtacaaccttccagttgtgtacagggttagcggaaagtgcagagaagccctctatatagatggtctccccatcgctgaatacaacgattcctacgtcctcctgggaaacggaaccctctcctggagaaactacaccgttgaaaccccgaggaaaacctactactggctggactaccaggaagatgaaaacgtgtaccatcacgtttgggttcaagtttacagaaagaacgaccacccccttgttgccttcttgtgggagatacgacagaacgggaccactaccgagggcttcactgcctacgagctgaccgatgagggcttcaaaatcttcaacacgacggatgagagggagctgggaaagaacctgatcccccctagatatattcccgtgaatggcgaatacatcccgaataacgaaactggaacccttcaaattgatcacgagaataatactgcattcatcataaacaacggcagaaggatacccattagctacgcccttgcggataaaaccgaagccgttgtcgtgggtaacaacacgtttctccttatcacctggagagatgcctacatcgtcccaccgtattatgaaccccttagcgtgctcggcctcccgctttgctcagatctaaacacgggaatgagagagaacatccctaagatatcggttctagcggtggtagctgtgattctggttggcataattctctggaggttggaaactagatgagcatgagctatccaaattcagtacttggactctcaaaaaacatatgagaagagagctcagtacttcttgagctcgggaatctgctcctcaagctccttcttgagctctgtggcgatcttgtcgaggaagctctggcccttcggggtaacgattcttccctcgcccggaaccttctggacgaagccagcggcctcaagctgctggagtgccttcctgatgatgcttccgccggccttgtagaagtgctccggagcgtggccgcggttcttcctgccgccgtaccaagtcctgagcctctcgattccgaccgggccatcaatgtagaccttcctgaagacgctggcaacgcggtagtaccaccagtcctcctgctcgggaagtctctccttgtgccttccggtcttgacgaacggggcccactcgggcggctttatctcgggaacctccttcagagccttggcaaccctctcgacgagcaggtcaccgggaacgtcatagacagtcgccatctttcaatccctccccttcttaaacttctttctgaagttagcgatatcgagcctgactttctggacgggtttctcctcccgcctctcagcggacgcctttctttcaaggcgccttaaatacctttcccagccttccctcggtttgaacaatataaaccttttgccctgacgtctataagctcgctgtcggtgagctccgcgaccctctctgctatggcttttctgtccattccggttgagatgagcgcgcccttccttatctcaactttcaggatcccatccttttcaagctgggtgtttatctcctcgatgacactctcggctaaccctttcttcccaatccacgctcgcggctctatgtcatagtatctcgcgcggatggctcttctcacgctaccaggtagtctcttcatagtctctcaccttccaccctctttggaaatggctttaaaaaggttgaccctgggtaacaaggaaatgtaaagaaggcaagctcagaagaagagtatcacagcgtctccaacgaccgccgtctcgacctcttctccctcgctgaagacggccttcctgagcacgatgtcgtccttggtaagttctaccttctggccatcgacctcgaactcgatctttccgctctccttgagtgcctttgccacctcttccgcgttctctttgaggtaggcggtgatcttcggcacgagctttccatagcgcggtcctaccgtcttgaagttcggctttatctcgattatcctctcttcaagctcgggctcgcccttgattatctcaagcttctcgatgttcatggttccagctatgtctttctctatggtcttgagcacctcgtaggaatcggtggtgtagattgccacgtgcttgagcttggcgttgagcgagaggccgtggctgttcttgtagcgtctcatggcgccgacgatctcgcgagcgagctctccgagcttttcagcctcctcgtcaatcctggcctcgctgtacttcggccactcgagtaggtggacgctcttggctccaatcctctcgcggaagaggttctggtagagctcctccgtgatgtgcggcacgaacggggccagcaggagcatcacgttgtagagcagctcgtagagggcagccttcgccttcagcttgctctcctcgtcgtcgccgtagagcctgtacttgatcatctcaatgtagtcatccgcgacctcgtgccagacgaaggttatcagctccctggtgaggaggttgaagcggtacttctccatctcctcggtcgcgaacttgataagcctgtggagcctgctgagtatccagcggtcgagcggttcgagctcttctggggcgctcgccgggtcaaagttctcaaggtgcctctcggcgaagcgatagatgttccagaccttctggaggaagcggtagttgtagtcaacggtctcccatttgaacgggtggtcctctccgggcggcgctaaagccgtccagagccttagagcgtcagcgccgtactttggaatgacctcgtccggggcaaccacgttgccatagctcttgctcatcttccttccgtccggtccggcgaccataccgttgatgaggatgtcgtgccagggcttctcgccggtgagaacccacgttctgaatattgtgtagaacgcccacgttcttatgatgtccgttccctgcggcctcagagccgttgggaagttgtgctcgaaccacttcttaccctcttcgtcgcccttaatggcctcgtgccacttggtgattatgagcggggttatgctcgagtcgacccagcagtcgaggacgtcagttacaggctttggctcgctcccgtcggagcacttcctcgggggcttctcaaagcgcgggtcaactggcagatcttcctcgttcggcaggattatctcgccgttatcgcagacccagaatggtatcggcgttccaaagaccctctgcctgctgatgacccagtcccagtccattgactccgcccagtccttcaggcggaggaacatgtccggtgggtaccagtttatctgctcggcaaccttgacgatttcatccgtgaaatctttcaccttgatgaaccactgcttcttcggcaggagctcgatgggagccatacaggagctcctctcggtgtggcggaggaccctgtgccttatcttctccttcttgtagaggagacccatcttttcaaggtcttcggctatcttcttcctggcttcctctgtcttaagccctgcatagggcccggcgttctcgttcatcgttccgtcctcgttgatagctatgatgaccggaaggttgtagcgcttctgccagacgacgtcctgctcgtcgccgtaggtacagttgtagacagcaccagttccaaagctcgggtcaacgtcctcgtcggccagaacgggaacttccctctcgaatatcgggagcttcactttcttgccgacaacatgcttgtagcgctcgtcctcagggtggacgaaaactgccacacaggcgggcatgagttctggcctggtggtggctatcggcacgtgaccgcttccatcggcgagcgggagcttgatgtagtagaggaagccatcctcttccacatagccgacctctgccttggcaagactcgtcctgcagcgcgggcaccaatagactgggtgctccgcctggtagagcattcccttcttgtagaactcgatgagggacttctggacagctgccttgtaccagtcgtccatcgtgtggtactcgaggtcccagtcggcggaatagcctatccttatgaactggttcctcatcgcctctatggcctgccaggtccattcgatacacttctggaggaacttctctggctggtccttgcttatgccgaactccttctcgaccttcagctctgttggaaggccgtggttgtcgaagccctgcgggaagagcacgttgtagccggtcatcctcttgtatctggctatgatgtcgatccaggtgtggctgagaacgtggccgaggtggagcgttccgctcgtgaacggtgggggcgtatcaatcgcgtagctcggcttcttttcgtcgagctcgtacttgtatatcttctcatcgagccagaacttctgccacttgggctcaatctcgttggggtcgtagtttttaggaagcatgggcatcaccctttggtttttctgaagatgggataacctcagaagggccttttaaaaaccttagccgcggtggtgccagagcttgagctaacccagaagggcggaacgcctggaattcaggggttgaaataggtgttacggtggacgataggcaccaccagggtatagaaatggccagcgtatttaaaaaagtttgggtcacttcacggccaccagccagtacctcctgtcgctgggggcgatgtccctcctcaggttcccgtagattttgacctcgctgaagtactgctctgccagaagcctcatctccctcggcgtgtagatattgagttcgtcatcgacgaaaaacgcctttgtctctccgttcggcatgattatttgcacgagtctcttgaagcggagcttttgaacggccggctcaacctcccgccagtcggttatcacgagcctttcatctcccctcctttcgtcccacactatcgggccatcgttcccgccgtagaaccagcatgggaagtcagctatgaagacccctcctggcctcagcgtcctccttacagaattaaataattcccgaattgcagaatcatcgaaatacatgattgaagagaagaacatcgtaacagcgtcgaactcttcctcaaagcttatatccagggcgttgccccggatgaacttgacgttcaaaccccgagcctctgccttccgcctcgcaaccctcaacatctcctcgtgcaggtcgagaccgaggacctcgtagcccctctcggcaagttcgagcgttgggatcccagtcccgcaggccaggtcgagaacgcgctttacctctctcttcgcgtcctccctaaagatttcctcgacgaagtcaatctcttccttaaccctctcggctctacttttgtagattgtgtcgtagtattcagctagcaccgtgtagagctcgtgcacgtagaccaccaagaggtgaaggatagttcgaatattaaattttcaccctcagatctaagtccaaatccgcttttctttttgctgaatactatgatggtcatgtgatcagagaaaaaatacatgctcatggataacatctaactttggagctaggttgttacgaaacattttaaaacgtaacaacagaggttgtggcggtggcagaagaatgaagaaaatattgatgctcatcgaattatctgagagaaacgcgataggacgacccgttcgaattacgataagagaacttgctgatgcccttaatacgtccccccagactgttctccgtctccttgcggagcttgaggatgagggactgatagagcgaaagacggagggaaggagaacatatattgagattctcccaaagggtctagatttccttcaggatatctgcgacaaaatatcaaacgcactatcaaagggagtgatagtgggtgaagtcgtgtcgggacttggggaaggtgcttattatgtaaggcagtacgaaccccttatcgaggagtaccttggatttaagccgtttccaggcactttgaacgttaaaattctgtttcccaagactgtgcttgatgcagtttgcaatattaggccggtaataatccctggcttcgtcaaagatggccggacttttggtgatgttaaggcgtatcccgttatgataggtgggatcaagggggctatagtcgttccttctcgaaccatacatccccccaggatagccgagataattgcaccggtgaatttgagggaggcgctgaagcttaaggacggggacagggtaagacttgaggtaatccaatgaacgcaaggttgaacgctgttctggcctactctgggttggggggcctttttggattcttggttgttttctttggatacgctgcaagcagggattacatggcctactccatacttctgggtgcggctgtgggtgttgtgcttgggatgtacctcgggccagcgggatttagggtcgctcccgcggcttccttaatggggggtggttttcactgccgtgctcgtactttcctgggcttatgggggcggagtgaaaagctttgactacattcttgcggttctggctttgatggctgcctttgtgataaagccctccgatttaaacgatgcactgttgggtttttccaattatgcgggcggatttgcggttgttctctttttattcaggagttttgagccttttcagggggtcgagggcggcctcttctcggtgataaagagtagtggacgtgtggcgctcttcttggtgttgggttctatgatgcgatggggtttaggggcattccaaaagacaacgtttaaatacgtccattgctaacctgccctggtgattgcaatggtgatgaggctttcagcaatatacggcaagcagatatataatacaaagggcaactacgtcggttacgttgatgaggttctaatagagatagaccagggctgcggcagggtgctggcacttgtgcttcctggtgaaaaagttggggttccctacgaccgcgttactgccattggggatataatactcgtaagggcaaaagaggagtgatccttggaatcaaataaatgaaaagggttgttctctcttcctttagccttcctttatgttcagtgcctcaaggaatttttccgttatagcttcctctgcgagcctaaggagggagttcttgtctttggccagcttgaaaagtccgagcggaattcttgcgccccctgcgcgggcatggccgccaccgctgccgatttccccaaatgcctctttcatgactttccctatgttaacgcggacatcccgagtcctggccgacatctctatgtagtcctcaactatgccaaagaccagaactgttgttatcccttccagcctaaggaggaagtccgccgcttctgccagggcgtctctgttctttatgaagccaacgttgctgataacgacgttcttgtacatcctgcggttcagtattgccctcgcgagtatttcagctgtttcggtgcttatgtcggggtgctctattttatcgagaatctcataatcgacctttcctgcgaggaactcgatagcttttaaatcaaccgggctgagcttggagaacttctttgtgtccacgtatattccgtagaatagggcggtagctaaagccggagtcaaaggatagttcatgcccctgaggtactctacaaggatagaggatgccgaatttacttctggacggatatccgtgaacgcatcttcgggcaataactcactcaaatgctggagaacctggtggtggtctatcactatcttgattctctcaaggtcagcttcttcgagaatggtcagattgccgtttggctggcagtcaacgagggcaaggaaaggcatcctctttatctcatacgatccccgtgaaactttggtgagttcaattccaagtaggtttatgaaagctctgttttcgtggtgggttatctcaccaccgtggaaaatctttgttttaaacccgagagtctgggcaatagctgccagggccgtggcgctcgctattgaatctggatccgggttgtcgtgcattattattcccagtgtatcggcggactctctaagctcccttaactttttgaggagaaggttcaggttcttcttttcaccaatgcggtgtatgacagccaggagggcatccctaatggcatccatgggggttattgcgtagtcaatgtttaaatcggcctcgaaagaggcttttaagtcctctttaatgctctcaatagttgtgccatcgggtaaaactgtaacgattgggatgttcttgctgttgcttctcacgacataaacagtttttttgatggtttcgagatccatcgtagttattacgagcaggtccgctttgtcgatgcctgccttcagtagtgtggcagtgtatgagaagtctccgtggactacatttaacccgccttcgctcagagtttgagctcttagctcgtctttctctatgatagtaacctcaaattcaccgcggagtgcctctgctatcagacgccccaggatgccccctccaagtattagtatcctcatcagcatcaccctagtcggacaataatgtttaaatagttaccctggtacactatgaagtgaatttgccatttggttctgttggcgaggcaatatatatagctaatggtggtgcccatggagcttccaacaaagactcccatggtagagaacgcggtcgttacctctaaaatggaactgagtaatttaatccaagaggccctctctcaaggaagtggggtattcttgaagatattctctaaggatagccgtaacaaatattacataacactcctgcttgacagcagtaaagtccttgcggctgaaggtattgtggtagatacaaaagagagatacagcggtgacaagacagtcgagctattcaaggctctcctcgacaagccaatgatcgttgatgtttattcgttagatgaaattgaactaaagcttgctatagcggaaaaccttgagacatactcagaaaccccaaaagtgcccatcaacgagctctttgaagagattagtgaggagccaaaagttgggatagttgaaaagcctcagcctacaaaggcagccgctcctgaaagggaacggaccgcccccaagaaagctgagaaactcccagagattgcacccaagaaagcggagacaacaactgggcctgagatttccataaagctcaggggtgagaaaatccccgaggaggcctttatgaaatacgctgaggccatacagagggactctgaaaaaatccgcggtatcaaaataaaaaagattgaattcaccggcaatgcagagggaggggttgttgatctcaacgttaccgtatacggaagctcggaaagcaaaaaccgcagggatatagagatttcggagagaaggattttccacatagtgagcaagaacgccccaataatattcagggtctctgagtacaaaccccgtctcaaggatataagagtagttctcgacggtgaagaagccagacccagggaaatcactgaaaaggacaaaaagagaactgactacatagataagagcaagaaaatccggctgtcagtactcgaggatatgtggccgtatttcagtaactttgccaagactgttatcagggaaattgaaacctcgggaatgctggtggagagtgcgtacttcgatataaaaggaagaagagagtttgagataaacctctccattgctgtgaagggagaatacgataaggacactgcagagagagctgttagagccgtgctggctcgccatgctcgtgagctctctaaggccatagagcgctacatttcaattcacaccgtcactgttgaggtgattcgtcctgaaggtgttgtgcctactaagccctccgtgaaaccaacgtcagcgaaggcctcagaaatcctggcaaagaaagaactccttgagaaagaagtggaaaagcttctccaggaggcaggaatagacgagctcgcgttcctcaccgaagaaaagaaaaaggaagcggaacagacgcttcttaagagcaggattgagccggcgattgaaacccttaaagccagaattcacgcggagctgaaacttgtgccccgtgctacctttaagtggttaaagctcaaccacgaggttcagggttccactgtgtatgttgatatagaggccagcttcgcaaaggaagaagttggaggtctcttcggtgcatactcgggaatctcggacgaaaaaataaagcaggatgttgcagagaccataaacagggttatcaaagaggtgtccagcgagtacagcgtctcaatcaggttgaggaagctcaacataatcctccgctgactcattccttttttgttcagcactcaagatcctcatcatccctaaggtcagcctagcctggctcatcacttcaaattgctcttcgggaggggctaataaaacatctcttctacgaacatctaaacgctaagccaataattttttaaggcgtctcttcaagtgagcaccatgaactcattgataattggaatccttgcggcactggtttcggcgttttcatgggcgtcagcgactatccttgtgagaatgggcttaaaaaggctgtctcctataagtgcgaatattctgcggctctacgttgcggcactgaccttcctggtaattttcctcgctacaaacaatatgggggtttttagactttccccaaggcttcttctagtggcgttcatctccgcccagttcggtttcgtaatcggcgattacttctacttctctgccttaaaaaggatgggagtgtcgaggactgtaccgattacctccacatacccactctgggcaatactgtgggctgttctctttttggacagaaaagtcagtccccaggtggttatcggggccctgcttgttgtaactgccataataatagtcagaagggcagaagaagaggagcaagttgatggactcggttttatatacgccctgttggcaccgatatcctggagtgtggcaataaccctgctggactacctgagctccgatgtccccgtactccaactcgccggcattagaatgatgtttgcggcaattggcatctcaatccttcttccgaaatactatggagaaatcaggagcattaccatcggagaatttctaacgataagcggtgccgctgtgctcggacttattctcggccagtacctctttgtgtactccgtctcaagcgttggttccccgatagcggcgcccgtttcggcgataaacccgattatatcatcacttctggctgtgctcctcctcggtgagaaacccaacaggagaatattcgaggggcttgcccttgcggttgcgggcattatcttaatctccacaggttgagctatgtttttaaacttctctgactacattacaacgccgacagcgaggggacagtcagtctcctcgcagggctcggtacaaccgcctccgcaaggtatcgggttccgtgagcggagcgtgctcacgccgagcccacagggccgggagcatccacccgcgggagcagtgaccgcgggcctctgtacccggcccacatttcgatgcccttctcaagaaagccttataatacccaccaccgtccaataactggtggttattgatggtgaccataccccggcccatagaccccagggagatcaggaaaatccgcaaggagcttggcataacacaggaagagcttgcgaagaaggctggagtgactcaggcctacatagccaagcttgaagccgggaaggttgacccgaggctctcgaccctcaaccgaattctccaggccctccttgagtgcaaaaaggcccagccgaaggccagggatgtcatgtcatctccagtcatatcggtcaagccctacgatagcgtggagaaggttatcagacttatgaatgaacacaacatatcccagattcccgtcatctctggaaacaaggtcgttggttcaatcaccgagaggacgctcgtgcgccagagccttgagtacgacgacatttacgggcacaaggttgtggaagtcatggaagaacctttcccaatcgttaacgaggatgaagaccttgaggttgtcaagtacctccttgaggatcaccctgcagttcttgttcaggataaggccggaaagatcgttggcataataactagggttgatctgttcagactcggaaagactctatctagggagtaatggaaggtgtctgaagtggagaaaaaacaggcctatcgcattcttcttgtcattgtaattcttctggcagttctctatacactgggagtcgtcggcatcctgccctttgaggtcagcgaggtcgtaacggttttcatggtagttctcttcttcgttctaaggttcaaggaaagaaaatgaaaccccaaagaagttaggaagacccgtaaagcggaagggcctcgcgtattctcctgagaagctcgtccttctccggcccgtcctggagtgctatttccagcacctggtctatggtctcgaccgggtagatttcaatcttctctgctttgtcgggactcaggaacacgtccttctcgttggccttgggtattatgaccttctttatgcccgcctctatggcagcctctatcttcggtgtcgccccacctattgggagcacttctccacggacactgagggagcctgtcatcgcaacgtcctgccttatcggtatgttttcgagggccgagataacggccgttgctacacttatgctcgccgagtcaccttcgacgccttcataagtctggaggaactggacgtggatgtcgtacctgctgatgtcctcacccttgtagcgcttgattattgccgagacgttctggacagcttcctttgctatctcaccgagctttccggtgactatgattttgccctcctccttgctggccgcgggggcaacgacggcctctatcggcaggactataccgctctgctcgcctataactgcgagaccgtttaccctgcctatctcaccgccctcggtctttatgacctggtactccttcttgttctctatgtaccagtcggcgagctgtttctccagcggttttgccattctcattgcctcaaggacgtcttctctctcaacgtacttcttgccctttttgatggctatgtctccagccgccctgactataccaccgagatccctgaggcggagcgtgaggtggcccttccttcccgccctcttctgggcctctctcactatctcctcaacggcttcccttgtgaagtgtggtatcttgccgtccctcttgacttcctgagcgacgaactggacgagctttctcctgttctcaatggtgtctggcatcgttgtcctcatgtagacctcgtaaccgtagcccctgatacgggagcgtaaagccgggtgcatcttgtctatggtgtccaggtttccggcggcaactaggatgaagtcacatgggacaggctccgtcctcaccatcgcaccgctcgacatctcgctctgaccggttattgggaacttcttctcctgcatcgccgtgaggaggctctgctgcattttgagtgagagcgttgctatctcgtctatgaacaggacgcctttgtgggcgcggtgtatcatgcccggctcaacgcgctcgtgggcgggcgttcccagaccaccgctctggaaggggtcgtgcctgacgtcaccgagcagtgctccagcgtgcgctcctgtggcgtcaacgaagggagccttcttccttccacagttgtcaacgagtaactttggcacaagaaccgtgttcctgaagcgcatgttggagagcaccatcatgctgaggagcaccacgaacattcccattaggagtgtggtggccgttggctccatgatgattgccagtatcaccgtgaatatgacgaacatgaggaggtagttcttgattccttcctgttcctttgcttttctgcggtagttctccacgatacgccttccctggcatgctggaacagtctttatttttggcatgttctcgtcttcgggattcggaaagaccaggatgtcctcaaggttctccgttggaaggagctccgccattgcttggccgagcattgacttaccagttccaggctcgcctatgaggagaacgtgcctcctctggtttgcggccgtctttatgacctcaactgcgtgttcctgaccgatgacctgatcgatgagcttttccggtaccgggatttcttcggtggtcttgaaatcgattcctagatcaagactttctccgtactcgcggggaatcagcctctccttggtggactcctcgtccatctttcttccctctctcagctctaggactgagtggattgacccgatttataaccttttttgagggtatgggcagcgccacaaaaaagctaaaagcccaacgtcaaaactcccttcggtgagagcatgaggatagaggagcacgttgcattcacagcaaagcataacgactggcgggtcgccaagaagctcacggagcttgaggatgagaacgttgcccacttccttgcaggaatagcgaactctgtgaactccaggatacccggctacatgggggaaaagatagacatagatggcataagaaaactggcagaagaagtcaggaaagacaccctcagcgacacaatagtcgcgctcaagtcccctggaacatcgaggaaactgggcggactggtcagagagaacgacaaaaagctgaaaaagctcttggttgatgctgcaaaggcagttctcgtcaggatgacgctcgaaggtgttgttcccatcaactaccctgaaggtgagcttactggagttgaggtagaatttccgtatgaagaagaccacgtgaactttactgccaagcacggaaagtggatagtcgtcaagaggctcatcatagatgagaaaacgcccctgcttgacgttgcgaggcttttggccagcatcaacgagacggtcaccctaaagcttcccgcgtatgcgcacatagacgttgagggtatagagggtgagttctcggcgttcaaaaaggttaaaaagtccgacatcccgaaggttgtggaagcctacgaggcgttcgagccttccgcctacgccgatgaaccgttccttgagcacgcgagggtctacgctcttcgcgtggcccttgagaagataggacttcctctggacgtcccgtccaagagcctcgagaagtaccttgagaaggcgtgatgacgccgaggacacctgagcggtgatgactcttcgcttcgctgaccttttcccttttgaggtgccgtccatgagaacgataaaaatccgcagggagcttctggaataccttcttcagttggccaggagtgcctatcctaacgagtttgctggctttttgagggagaaggacggaatttttgaggaggttctgatagctcccaaccagtatcccggcagaaactcggtattttttaaccactggatgctccctctggacgagagcataaagggaaccgttcactcccatccctctccagcattctggccctctgaggccgatctgaggttcttttcaaagttcgggggagtccacctgataattccctggccctttaccgaggacgatgtgagggcatacacatcctcgggggaggaggtccttattgagatcattgattgaatatttcatgtgaaaaagatttatttagggattcgtcggattttcctcggtgatgaacatgaaggtaagggacatagtggagaaactccccgaaaggcccaaaaagagcgtcttcaagtgctacgagaaatgcggacttcccgagatggaagcggagcttgagcctgaagttgatagagaaatcattgagttcttaaaggccctgtccaacccgataaggctcaagattctgaagctcacccgcgacaactggctctgtgtgtgcctgctctctgaagtcctcggtgaggaccagaccctcataagccaccacctccgcaccctgaagacgctcgaccttgtgaaggagcgcagagaaggtaggatgcgcttctataaggccaacacagagaggattgaagagctcttgaagaaagttgaaggggtgctcgttgggtatgaatgaacttcagaggaaggtcgatgagctgatccagaggcaggggggctactggccccctttccagatgctcgcggcgctggtggaggaggtcggtgaactcgccgatgccatgcttgcttttgagggcattaagggacatggggggaaagagaaacttgaagaggagctcggcgacgttctctacgccctcctatgtatagccaaccactatggaattgacgccttccaggcccttgacagtaccgtgcttaaataccgaaagagagatttgcgaagctgatggttttatttttattatcgtatttctgtagtaagctcccgcaattataacacttttgaacgtttaatgctgcaataaccgcgatttttggcgacccatcaataactggattatgccgaagtacatccaaaaacgaaacatttttatatgcatttgtaaacaactcaaacaaacgttagggggtggctgtgatggcggataaaataaatcccgttgaccttcgcatccttaagcttctctcaaagaacgctcgcctcacatacaaggagctcgccgagcttctcggcacgacaaggcagagaatctcccgcaggatgaaccgccttgagcagagcggtgtaattttaaagtacaccgtgatacccgattatgatgctctcggttacgttcacgttgtcctcggtattactctgaagcccggtgcaaatgtcaaggatgccatagaggcccttaaggaagacgaacacgtcaaggtgatccagcgtgcacttggctcccacaaccttgtgatccacgtaattgggcccaaggacatgagggagcttgaaaggataatctctgagatatccaagaaagttcccgcgatagaccacatggacgtaacgttcatcactgagacaatcaaatttgagaccctctagtctctgttctccttctattttcaaaatggggaaaaagtaataaaccttcttcagagcactaccaagatgacggtgatgactttgaacatcattgctgatataatcacggtgctcctcctcggggtcctggcatatcgctcccgagccttagatgccaagggctcgatagccgcggcccttttgggcttaggtgttcttgtgcttggtggaacgtggacgtttctggcacttttgaccttccttatcctcggagttctggccacgaagtatcggtatggagaaaaagttaagaaaggcctcgcccagtcaaacaacggcacaagaagcatcggcaacgttctcggaaacggtctggctgtgctgatctttctcctggtggaagctgctgttaaagaagatatcttctgggcggcaacttttgcctcaatagccacggtgaacggagatactctcgcgagcgagcttggaaaagtcctcggtaggaagcctaggctaataaccaacttgaaacccgttaatcccggaacgaatggtgccgtatcagtccagggtgaggttatagccctcatcggtgctttgatgatagcccccttcgctctcccgctgaccactcacacctggaaaatgttactcgcagtcacaattggcggtttcgttggcgtgaatctggacagtctcattggagcgacccttgaggagaagggaatcactgacaacaactccactaactttctggcaagccttcttggcggtctaatcggtgctgctctcttctacgctcttgagatgttataagactccggcggatgatgactacggcggattcccgagcggtgaggacgaccttagggtctgacgccgatttagataaaaagatcaggaagagtcctcggctttttcttcactcttcctgaggaactcttcataaacctcccagagggagaccagcgtcgctggtatgccgtgctcggtcgcaaacgtcatgtaaggtgctaggtcaaccacgtaatcggcaaacctgaagaggcccctcgggatgccttcccgcgaaccaatgaatatgactacttccttggcgtagtgcatgtcctttgccagtttctctttgacctctgctaaagtaggccccttaggatcagtgattatcaggagtcttttgttccttctcttgtccctaacgacctggtagagatcccacacagacacgggaaccttctcaaccttccagggataggcctccctctgtatctggtacctgctttcttgtcctatcttgatgcccctgagaaactccatcagctcgtaggcgtccattttctccttaggtgctatgatgagttctttgacctcaaaggcctgggccgccctgccgatcttctcaccgaacttcctgcaggccttgtaatcgccccagtagggcatctggacaagggtaaccttggaaaagagcttcctggcgtcgaacttgtctggagtgtattttcggtattcctcccctggaagaaccgagatatacgccctatcccctattatctcaacctggaccaccttgtcgggccagctcaggttcacgtccgcatcggttatctccttgatcctcgcacctaaaacgcggttgacatcgatgctcgaaaagtcgtgctttccgcgcctcttggtcttgacggcgaaggtttcatctttacttatgagactggctatttcatcggcggctttctctatctccttcagctccgcattcgtctcgacgaggacgggtataacgcgctccacttcaggtatctcaaggattttctcctccgcgttctcatcgttggtttcaactattacaagacccgaataacccatgggagaagcccagacttcagcgttgggaagggcttctcggatgtagttcccagcaacggactccatgcccctctgagtcttgacgagaaacttcaaggtatcacctcccggttatggtacagtcctaaacccatgaacctcaaagtcagagtcaaacgtgaaagctgttttcaggccgagcctttccatgatcgcaaagctgagggaatcgaagaggtcaatacccctctggtcgcgatacttaaagaagaactcccaagcctttctccaatctgcctccgtttcgttctcaatgtacacgaagctactcgaggttagggcatcgtagttttccttagcgatctcctttccatacctcttggataggccgtttaagtactccatgagcactggccttgagaggagaaagaggttcccggactcgagggcctccctcaggtaagatacagccctttcatggttcttgtcatttctgttgaagagggctatgagcgcactcgtgtcaaggtagataacttctggcaccggccttttcattcggtaagcccccactcctcgtcttcgctggcgttctcctcaagctccccctttccaacgattttccagatggggtcgtttttcgccttttgtttaagctctttctcttcaatctcgacgtacttctcaatcgcctcctgcaaaagttctttgagcggttttccagttcggatggaaatggacttcagcatgaggtagagcctctcatctatctcggcttgaatgtgctttgtggcagatcccatgaccctatcacccaacatgaatacggcatggaagcatataacgtttccgagaatagaaccaaaagagaattgaaaaagccttcaggcggaaggctcggcgagaacctttatcttcctgacctcggcgcgcttgatcgggtatatcttcctcgcttccttcgctatctcgctggctatctgaccgttgacagactggagaacgaagtcagcgaagttgagctcctcggccttcttgtagatgatgtcctggatgatcttcctgatagccctctcctggctggtctgaatcctcctgtaggcgatgaccatgcccatgacgcggagcttgtagccgtccttggtggtgatgttgaatattccatcaaccctggtggtcctcctcctgacgagggaccttatgtagctcctcgcgagggtgtggcccttgaacttggtgtaggcgttctgacccttgacgtcgtagacctggaagtagagcttgacgtggcccttggtgaagtcgccggtgaggtccttcagagtcgtttcaataaccctgcctataaccttctcagggtcgtcagcgggagtgaggcctatctccttgctcccaaagaagtcgggagcgtaaacgatgtaccactctttcatcttccacttatccttagccgcagcggccctcttccttgggttacctcttgccatcttaacacctccagttcacacctctacgctatcttcggcgattttgaccgaaaacacaatatcatcgagcgctttgatgagggtgtcaatctcacccgagtatttaacctttgttatgacgtctccatcaacccatcgggtttgcacatttaaacttttctttagttcctcgggcatgctctcgttgtccacctggattgcttcagctattgccctcgccttggcatcatcgccgtagtgccagactatctcaaccctcgccttcacttccaccgcccttcacctgcctcccgagggcttcgttgaagagcttaatgaactcgtctatcctgttcttcgggaagcgtatgcccgcggctatggcgtgtccaccgccctcgccgccaagtttttcggcaacctctttcaacgcttccccaaggtggtagcccttctccagtgccttctccgtggttctggcagagccttttaccaggttctcgtcctcgtcgctgtcggctagaactaccacgggtttctctgggtcagccagacccgcgttgatggccatgttggctgctattccaacgagagtgtcccgtatgttcttgccagcgtaaaagacgtaggcgtgctccccctcttcgaccatgttccagttctggattatgaacttcctcgcctctatctgctcttttttgtagtcgtcgagcatctttctggcaactttgtaggcttcctcgtcgcccaggcagatagcaactcccagcgttccggcgttcagccttcctgtggcgttgaggagcgttgcgaactccctcgcctcatgtcttacgtccccctcagggtagagcgggcttatgacaacgtcaccaatgagcctgtctattgcttccttcggtgctccgtgctttatcatgtggacgaggagggcctcgtggagctttctcttttcctcttccctcagctgccagtacttcatttcagggtcaaagcctttggcgcggagccattctattgccttcctctcgtctcccgttatctccgggatttcaggattggtagcgtaggcgagcatctgatagagcggcctgctctcccttccaaagagcctgagttctttcctgacttcgagaatacccagctcctttccgtcctctatgatttcaaggttgagtccgtgaaaagtcccgtctatctcctgcatatccccaacggcgccgacgatggctacgtaggccatgtccctgttctttctgttcatctcccttgcgacgaagtaggccaccccagagccgctcaagtccctaacgctgtttgctccgaatggaaccggattaacaaggacgtgggagtccgttgagaacgagtccttctcgggtgggtggtggtcggcaacgacgacggtggcaaagttcagcttttcttcgatgagttcaattgagccgcttccgaggtcgctgaaaacgtagatttctctcttttccctcgccagctggtctataagctcctcgctcacctgcttgacgatgctgagctggaaggttcccccttccctcgcaacggccttcgcaagaatcgcacctgccgtgatgccgtcagcgtccctgtgggagatgagccttatcgtgtgacctaactcgatatgcatcttaattagctcggccccttccctaacgcgctccaaaaaagcctccttatccacgcggcatcaccggaagaagaaggaaagggatcagcggaccaggagcttggcctgctctgggtcgtagcgccacttggctgggagcttgccagtcctgcggtagtacttgacgagcctcctgatcttgctctcgatgagctgaaggcccctccttgagtgcttgtccttcgggtgctgctcgaggtgcttcctgaggttgacggccctcctaatgaggaacatgaggtcctctggaatctccggagcgaggccgttctcttcgagtatcttggttatcttcttgccggttatcagcttgacgctcggaatgccgtactggtcgcggagaatcgtgcctatcatggccgtgctgtagccttccttcctgagcttgacaaccagagcctcgacctcctccgccgtgtactcgacccaagccggcggagcggtcctcggtggcctctttgaaccagacttacccctctttctcgcgtgtatcctcgccatatcatacacctcccggtgacggccagctcccgccagccgccccttcgcatcggcgttgcggaatgagtttaaaaaggtttgccccgctcccgatactccctaccaactttaatgtatctctccttccaacgcatagtggcatcgttgggacagcattccagaagagagagcgcatactgcagtttttgagtttttctttctgcagtgaatccaatttcctcgtggaaccgtttaatgtccattaatctggttattcgcaggccaaacatatccacatttgatttatactcccgtcctcgtataacaaccctctgacctttagaatacatcttgaatatcgcggatgttatcttgaattttgtctcgagcaacttccttgaaaattcgagcagtttcagattcgagttcacagcctccacataaactctaaatcttttaccagcagagaccaccggaaaaccttcactgtcaaagaaacccctcaaaaactccgcaggatacaactctgctacctcaaataggaattcaatgggatttttcaaaaatccatacaaagccttgctggagccttcaacataaaaacgattaactctcgtggaatcgttttcaaatccaaagacgggatgcaatcccagcgtcttcagagcattgtaaaacgcctcagcaaattccctgtctacaaccttgagctttattcggtattttccgttatccttgttatgaatgcttccgtctcccagataaacaccaatcacgtacgagagagctggggacgggctcaaattcacatcgtttattttgttgaatgggtcgtgtgttcccttgcaccatctactgatggtaggtcgggaaacgctaacatcgtatgcctcagcgatctttgatgagatggctgaataactaagcccctctgaacggagagttcttgcatagtccataatctctttgagttcgaatactgataaatctcgcaaccttctcattattactacttagcaagatgtatgtataaacttttcgaaaattatgctgaacaataaacatcatgggggaacaaataccagaagaaatgcacaaaaatagactggtagcggggcgaggatttgaacctcggacctccgggttatgagcccggcgggcactcctagctgccccaccccgctgctcgacccgttagttagtgaacagtggagggtttataaattttgcggaggcggttttataacttttccaggtcaaattatgccggtggtagaatgtacctgacgaaggaggaggagctaattttagcgggagagtacggctacgccctccagaaggcgatggagatactcgttgccctcggcgacatctacggtgctgacaggctcattccgataaagagcgcccaggtggcgggagtctcctacaagaacatcggtgatgctggaatcgagttcctgagggactttgtagaggctggagcgaaggtcagtgtttacacaaccctcaatccggcgggaataggcgacgacgagttcatggaaaagcagatggaagtccttgagctttacagaaagatgggcattgaggtcacatctacctgcaccccgtactacggcgcaaacctccccaagttcggggaccatatagcctggagcgagagttcagcggtcagcttcgccaactccatacttggagcgaggacaaatagggaaggtggaccttcaagcctcgccgctgccatcgtcggcaaaactccaaactacggcctccacctcgatgagaacaggaaggcaacggttatcgttgacgttaaagctaaggtaaagaccttcgcagactactcggttctcggctaccacgtcggcaagaccctcggaaacgacgtcccctacttcaaaaacctaaagcctgaaaagaccgagttcctcaaggagctcggcgccgcgatgggggctaccggctcgatagccctctaccacgttgagggagagacccctgagtacagggaggctataactgacaaactggaaacgataaccgttgaggactctgaccttaaagccgttagagaatccttccaggacgattggagtgatatagacatgatcctgattggctgtccgcacgcttccctgccagaggtcaaggaaatagcagaactcctgagaatgcgcgggaagcccctcaagatacccctcttcataaccgccagcagggccgtgaaggctttggcggatgccctgggttatactgagataatcgaacgctacaacgggaaaatcatacccgattcatgtttcgtcgtctcgccgataaagggatggtacagggggatagccacgaacagcggaaagtcggccttctacttccgttccttcggcttcagcgtacggcttgacgacgttgagaacctgataaaggaggctccgtgaggtggtaacatgaagctcaagggcaggaagatcgttgggggcaaagcggagggagaagttatagtctccaggaagcccctctcctttctcggcggcgttgatcccgagacgggcatcgtgactgacgccgagagcgacatcaggggtcagagcatagcgggaaaaatcctcgtcttcccgaggggcaagggctccacggttggttcctacgtcatctacgccctcaaaaagaacaacaaagccccgaaggctataatcgtcggagaagccgagactatagttgccacgggcgcgattatatcagacattccaatggttgacggtgtggatgtctcaaagctcaagaccgggatgaaagtccgcgtcgatgccgacagcggagaggtcgaaatccttgaggatggggagtaggtttttaactttctccccaatttcttttgggaagtgaaaatgccgaggggaatatacgagtgcgtaaactgcggccacagggaagttctggattccaccgaacccgtgattgagagggcctgtcccaagtgcggcggcgacatgatactagtgggctatgctgtaagcggtgtagaatctccgaacgtccgttctgggagggaggaagtcccagctcccgaggggagtggagtttctcccggggttgaagtcccgagagaatcgcctcacggtcttcccccagaggtcgaggcaaagctgaatgagttctactctctgaggttttacggctttgatgggcacgtggcggtctttgaggttctcgacatctacgaaaaaaactttgagagggttctcagggagcttgagaacctcggctactgggcggcccttaagaagagggacggcagaatcgtgctcttcgtctttcccgctggaaagatacccccggacaatccgtggctcccctggcttttcctcgtgcttacagtactctcgacgttcttcgccggctactacctggcgctcaactacatcgccacccttgaacactacggccttccaggccttagaaacccgtatataattgcgctctccttctcggtcagcgtgatggccataataggcacccacgaactcggccacaagatagcggccacctaccacggcgttaaagcgacgatgccgtacttcatacctttcccaaacatcctcgggacgttgggagccgtgataagggtgaagtcaccgctccctaccagaaacgccgccatagacctcggcgtcagcgggccgatagcgggcttcctcgtcgccgtgccagttacagtgctcggtctgaagctatccgtgctggtgcccatgagcatggtgccatcaacggagggcggtctctacttcggaaccaacctgctctttgaggccctccaaaggctggtgctcaacgtacagggcgattacgtgattttccttcatccagtagccatagctggctgggtcggaatactggttaccttcctcaacctaatccccgtcgcccagctcgacggcggccacatccttagggcgtttatcagcgagaaggcgcataagatgataacctacgccgcagctctgctcctcgtcgggatgagctacctctggagcggctggctgatatgggccatactgataatcttcataggctccgctggcaacccgggggctctcgacgaggttagtcctatctcgaagggcagaatagttctagcactaacggcgcttgtgatattcgtgattacagcaactccgaggccgctctggacggcttagcctttcaattatttttcctttagtatctgctggatgtcgtagtatatcgagtccctcgacactccgaacattctggcgagctccgagatgttcagcaccttcgggttgtagttgaactccttgagaacccgtgcgatgagtctccgcctttcttccattgtgaactcctcgaagggtttctgctcagtgggggcgttgtaaacggcaacagcgacgccgtaggccctcctcgtaacgggggttacgtaggtgccgacctcgaagtccacaacctcagcgttcttcggcagcttcgagttgagaatctctagggctttgttgagggcatcggccctgttcttaccagttgaatgttccgcaatgatgccctttaacatatctttctcgtcgtctatgagcaccgtaactccaaggttcataaaagctccaaagctcagggaaatctttgcggatgatatgaatccgtgggttgattggagggccttatttgataattcaaccacagtgcttgtacaatcctcgatacttgcagattcatgctggaaattaagcaacctcatgccaccacccctgctgattacacaatattgaaggcctcaccctcaaatttgggtagaaagctatataagggtttttggattgaaaaatggaatgaagtaacccttcggaggtgttgaggaatgttcagactcaataggaggaagggccagggtgccatcgagtacctcttcatgatcgcggccgccctggttataatcctgatagctgtgaggtacgtgagcaacagtggaagccaggcacaggaacagggtaacattgcccagcttcaggcccaggctgagcttgccaagagcaaccttataagcagaaacgcttggaatgacaactatatagtgacctggggtgacaatggaaacaagactcttgttataaaaccggatagttctactcccctagttaacgcaacggctactcatgcagatacatacaaatcagtaatcagcaacgatttgactctcaagaaggtctatgacaactgtatggctggggatgagaagtattgctatatcttaattgatcttggctgatcccatgactcttttctcttttctttggtgatagcgatgcgtgctcaggcttctattgagtatatgttcatgttcatccttgcgtttgctatgatattcgccgctctttttgcatacaattctggttatcttccaaagacacttcaaactggcgagcaggttggcactctttccctccagaactccgcccagtacatcgtcgttcagctcaacgccacgggaacctggaaagacatcaaatccaaggccgtctccctctcgacctcgaacggaaagaccacctgcacagtccaggggacttcctactcaggcgattattccggtgtgatcaactacgacgtgaacggcaagaacatgggacagatttatgacgactgcatggacggcaacgatgaggcgtgcaaggtaataatctgcgcgctgggaagctagggagctggataactgcaaaacttatttaagcattgcgttgataccacccattggagacagaaactattgagggtgatccttgtgtgcgcccaagcggcgagagagtactatacattctggcaaaggtttttcagagacgttcctcttctcatgttcacagacatcacatcgttatcagacgtatttgggaaaatacgggcgcaaatagatgaaaactccgatgaaatcctgcaaaaacttctacagatcactcccgaggaggcaactaaagaatcctacgaaagagcaataggggatatcaacaacattatcctatctgaaacatcccccttcttggacgaactcatggaggccgcggaaaacagctacataaacccagaagaagtcaaagaggaagtgctcaatatcttaatccccgagattgtggaacttcaggctcaggtgaacgaatcgaacagaaaactatgggaaaaggcattaagcaaggacaacctaaccgaagaggaagttaagcagtttgaaatcctcgacaaattcttgtccctggaggcgaacctccttgggataatggtggaaaacagggatttcaacaccatagaagaactaatcggatacttcctcctcctgcttctgagagtgctgaaaatcgtcgaagaggaaagagacctagctgaacttgaaaaagacttcaaaatcgtcgcggagaaaataaagtccctaaatcccgaaccaaggacaatagacgactacttcattgacgaacttctggaagactgactttctttgaagccagaggaggatgaaacatgctggaacaaggtgaaatatggacggcaccgtttccttactatgaactccagggtaacagccaaaaattcgttttaaaagacaaaataaggcctgtcataattgtctcagagaataaattcaactcagataacttggacgttatagtttgccaggtatcccgccacaaagactaccgaatactaagcctacctcctgaactcaaaaggagggtgataataatctccaactctaacctagtgcctggaacgggaaggctgaggaacataagcatcatcaagccgttcaaattgttcacccttcccaaggacatcgttctaaacggaaagctaatcggaaaactcgaccggccgacactcaaacaactactatccaacatccacagcctcttttaatccccgaacctcaaacactaagctcgctcgccttgaagggcaaagctttcaaaaagaaaagataaacctttaaatctcctttctccaaatccccttaaggtggtggcgatggcgttcctctcattcggctccaagaagggtaaggttcaaaagatgctggaggagagccagttcgaactccttctccaggaggcagtaaaggacaagaagatcagggaggccctctttgaacttctctcctcgaacaacccgggtgttgttggagatgccctgctaacgataacgaacctcgtggaaagcaaccctgatgttgtcaagggtcattttaacgaggataccttcaggaaaatccttggccttacggaatctagaaacccctacgtcagggagaacgcgatgacgctggcttatgctatcgtcaaaacctatccggagcttctcgacaaatacagggcctggattgttgaggaacttgggaagcagctcgaaacaggggacaaaaaccagaagggattcgccctcatgatcataggggaactcggcctgcgcgagctgtcagagaaggtccgggagttcgtggacgtcgaggacaaagtgatacttcccttcgagggcaagaagtgggtcaagctcggagatatagcaaaggaagctcttgaaaagctctgaggtgggaaaaatgctggagcttttagttcttcttttccttcttatagcagttggatggatcctcatcaagctgaccctggcaataatcaagtggctcgccctgaacacgatagctggcctgctgataatcggcctcctcaacttcctcggcgtcactcacgtccagcttaacctcttgaaccttctcatagtggcaatcggtggaatcccgggtgttttcatagtaatcctgctctcccttctgtagctccaaacctttataaaggcccttttcgtgcctatttcagcgagagaagttaggggtgatgctcatgtctcacaagtctgccgagatgtacgaactcaagaagaaggtcgaggagctgaagagctatcgaggccgcgcaaccgagctcgtcagtctctacatcccggccggctatgacataaacaaggtcatgcagcagcttagggaggagtacgggaccgctcagaacatcaagagcaagtcaactcgaaagaacgtccttggtgcactcgaaagagcgatgcagcatctcaagctctacaaacagacccccgagaacggcctggctctcttcgtcggaaacgtgagcgagcaggaaggtgtgagcgacataaagctctgggctatcgttccacccgagccgctcaacgtcaggctatatcgatgtgaccagaccttcgttaccgagccccttgaggagatgctccgcgttaaggacgcctacggccttataaccgtcgagaagaacgaggcgactataggtctcctccgtgggaagagaatcgaggtcatagacgagcttacctccaacgtccccggaaagacccgcgccggtggtcagtcggcgaggcgttacgagcgcatcagggagcaggagacccacgagttcatgaagaggattggggagcacgccaacaaggctttcctgcccctccttgagaagggtgagctcaggggcataatcataggcggtcctggtccgacgaaggaggagttcgttgagggagattacctccaccacgagctcaggaagaaggtcatcggcgttgttgacatcagctaccacggtgagtacggtctaagggagcttgttgagaaggccagcgacatcctcaaagaccatgaggcagttaaggagcgtcagctcatccaggagttcttcaagcacctcgtcaaggacacgggaatgataacctacggtgagaaggaagttaggaaggcccttgagctcggcgccgttgacaagctcctaatcagcgagggctacgacaaggttcgcgtcagggcgaagtgcaacaactgcggctgggaggagctcaagacaatgagcgagggggagttccatgtttacaagaagcagttaactcactgtcccaagtgcggaagccagaacataaccttcgagaagtgggacgtagcggaggagcttataaagatggcagaggagagcggggcggacgtcgagatcatctccctcgataccgaggaaggccagcagttctacaaggcctttggaggtctcggagcgattttgaggtacaagattcagtgagctatttatacgcttcccctcttcttttaagccgatggattagtataactctctcttcccagtttactgagtagataacccggtattcaccgagtctaactctgtatatatccagatcatcggaacccttcagctttgcgatatcaaacctgtccctcggaacggcttcatactgaagaacgtccttcagctccagaaatctgttgagattggctttggcattttctttagctcttttatgacttcctttctgattttaactctgaacgtcattcttcatcctccaggatttcatcgaggtcttcggcatcaatccattcctcgctttcctccttgaactttctcgcttccatttctatctctctgagctcctcctcggggacttcgtccttcacaaggggaacgagcatagactcaagtctttggatgtgaaccttgagcctctccagttcagagagaatatattcaatgcgtgcatcagtagtcctttccatactctcaccgtctagtggtatctacaggaggtatttttatgtttcgactacttttttcttggcttacagaacctctaagaggagagccctcaccttttcttcaacttcctttccatccatagtgtagggcggcctgaggacgggttttatcgagaagcccctgactctcattgcgagctttatagccgatccaaacgacgaggcgatgtcatagacctttgagagtttagccagctttcttgagtattcaaaggcctcctcaaagcgcttctcgttgaaggccttgtagaggcgtagatgaagctctggtgcaaagttcgcgcacgccattattccgccatcgccgccgaggatcagcgtgttgaggaagtgctggtcgaggccagtgaagaccctgaagtctttcctttctcccttcacatcgagaataatgtcccttatgtagttcacgctgtctagggtggccttaatgccggcaatgcttgggtactctatggtgaggcgcttgacgagtggaacgctcagcgagttcgcacaggcggggatgttgtatagtatgattgggatgtcggttttctccgctatcattgagtagtgcctgaatagtgcctcctcggtgaggggacagtagtatgggggcgctatcacggcgtagtctgcgccaatatcctgggcgtgctttgtaagttcaatgacctcgagggtgttcgatgatgccgtccccacgaggtagaacgctgaagttacaagttccctgcccttctcggccaaaaaccttctctcctccttgctgaggctcgtaaactccccggtagtcgcgtttatgaatattccgtgaaccccgaccttctggaggtagtcgaggtgctcttcgagagctggtacgtctattgaatagtcctctttgaagggcgtgacaatggggactataacgccacgcatggaatcaccgggataaagtacgtctaaaagggtattttagtgttggtattgcacgaaaaccttaagtatcggtaccgatacttagtatcgggggcgatacctaatgctgtttgatccaagacctaaagaaagaagggaggaaatctttgacagggagaaagaacttgaaagtatacttaacggaatgaacgaatatccgataagcctcatcatcggaattagacgagtggggaaaagttctctgctgaaggtcgccctgaacgagtactccggtattggaatttacatggacacccgccgcctctattccgctggtagcggcagtataagctcagctatgctcgttgacgagataaccaggatactcctcgggaagggcagggttggtttccttagggggattaaggtggaggagataaacctcctaggccttcacttaaaacccagggaatcaacctgggttgatgttctggataggctggagcagttcggaagaaagactggaaagaaagtcgtcattgccttcgacgaggctcagtacctccgtttctttggttcacgagggggtaaagacttcctcgcaggagtagcttatgcctacgattcactcccaaacatcagcttcgtgttcacaggttccgaagtgggcctcctccacgactttgttggaattgacgactattccagccccctctacggcagaatatcagaggagatcgagataagggcgtttcccagagagctctcagaggaattcttgaggaggggatttgcagaagttggagttaaagttcctgaagatgagataagaagagctgttgacgagctcgatggtatccccggatggctcgttgagttcggattcaactactggaagaagggaagctttgagaaagctatagagacaaccatgaacagggcaaaggccatgataaaggaggagctctttgagttggagaagcgctccccccgctacgctttgattttaaaggcgatctcaattggactttcaaggtggtctcagataaaggactatgttgaggccaaaggcggtccgataaccaacgcacgcctcaacagccttctcgtgaacctggagaaaatgggttggataaagaaggaaaacggccgctaccacattatagacccggttgtggaaaaagtgattaaagaggactgatcacatcctctccggcgcctttattccgagaacatcaagtccgttcctgagaacctgctttacagccaagacgaggagcaggcgctcctctcttattccctcctcggccttgagcactgggtggtccatgtagaacctgttgaagagcgaggccagttcgttgagataagctggaacgagatggggcttgacgtccctgccagcgctctccagaacctccgggaacttcgcgaggaactttatcagctccttctccctgtttgtcagctttgagaagtccgccttctcaagcagggcattccagtcagtctccactccgctctcttcggccttcctgaggatagaggcacaccttgcatgggcgtactggaggtacggggcgctgtctccctcgaagttgaggacatcttcccagcggaaggtgattaccttgtccgggctgtacttgacgaggttgtagcggactgccccaacgccaacagcctcggctatctcatctttctcctcatcgctcaggttcgggttcttctgctcgacaagctcccttgccctctggacggcctcgttgaggacttcatcgacggtgaagccgacccacgttcccttccttccggagaacgagccttcaggtcttaccacgtgctcgtaggccaggtggtggaagttttcagccgcatcctcaaagccaaggagctggagcgcgtactttatcgccatctgcgggtgcttctgctcggcgccgatgacgttgattactatatcagcccttccgaactttccgggcatctcctttccgtcgggagccgtcgtccaggtctcgtggtcctcaaccctgtcccagagcttgtagagcatgtcggctttgaccttgccaaacttccagaggtggtaggctatgtccttgccggtataggttgccgtcccgtcgctcctcctcagaacgaggaacgggttcttcatatcagggaagagctttcttaagtccatcacgaaggctcccttgtacttgccctccgtcgcccagaagaagttctcgttcttctctatcagcccgtaggcctcgccgaagatcccgctcttcattatgtcgctctcccagctgaggaggtcgtaggttatccccatgcggtaagtggtgagcatctgcgccctgacaacgcgctcggcgagcttccttccaacctcggctatctcgttgtcgccctcttcgagcttcttcatcagctcgcggacttccttatcaacctctgggttctcctcaagtttcttgttgacctcaacgtagagcaggcccattacatggtctatgaagtcctccttcaggcccttctcgcgtagctccgcttcaatcctctcaaattcctccttcaggtttaggtagccccatagaacctgggcgaactgaacgccgagatcgtcaatgtagttctgaacctcgacggtgtagccgagcttcctcattatcctcgccatcgtgtcgccgagaacggcgttcctcgcgtgccccatgtggagcggctttgtcgggttcacagaagtgtgctcaactatgaccttctttccactcccgagttcactctcgccgtacttctcgcccttctcgagtatttccctcacaagggcctttccaaagaactcgtagtcgaggtagaagtttatgtagccgttcacggctttaacgtcccttatttcttctgggagcttttccttcactctcccaacgagttcctcggctataaacttcggcgccttcctgaataccctggccagctggaaggacactgccgttccaaagtcgcccagctcgatgctgggggtgtcatcaaaggttatctcaccgtcccattcctttccagcctcatggagcatttcatcaagagcttgacgcagtgcgagccttaccctttcctgaacttctttgtaaaccatcctcaccaccggcccaactacaacccaacctttaaaaacttctcccgcgagcttactaaggggatgggtatgaagcaccacgtaggtgagcacaaagctaagaagggcctcataaggatagagttcgacgaaagggatggaagggctgaaaacgtcaggataacgggagatttcttcattcatcccgaggagactgttcatgaacttgaaagcaggcttgaagggcacaagctcgaagagctggaggggataatagacgagttctttgccatgaggcttgacgtcgagatgccttatataaacgtcgaggacttcaagatagcgttgaagaaggccctcgaagggtgaaacccgtggggagaattggcaggtatttcctctatctactgttggcactcttcgctggcatagctgcgggtctggcatacgtgaggttccagccgggaatggccttcgaatatatggagcggcttgccagacagtttggaagtatctccgagaacccgttcagaaattttgtgtggatattcctcaacaacgccagggttgcgcttctggtggttgtggcgggtctcttttttggtgttggttctggttttgtgatatttgccaacgggttcatagtcggacttgtcgtcggcgtgctcaaggaagaaggaatcccagtaaaaactctcattttgggccttgtgccacacgggattgtagaaatccccgcgatactcctggccggagcggcaggtatgtgctggtaccgcaggattatggagtcagaagataagggaaaaggcctcaaagagggtgccctccaggccttgaggctttacattgtggttttgctgatgctcttaatcgctgcgtttatcgaggcttacataactcccaacgttgccggcctctgatgagacgaggaaagttccctcggtttcatatgtttctatctccttcaggattacctccattgggttctcaagccccgaaacaacgctccggatgtagttcctgtaactgccgttcatttctatcatcctttccgccactgtggcaacttccaggggatccgttgagtggaactttaccccaagctcaacgagccacttggtaacggcgagcagttttccagggtaagtggagatcgttggagtcccgagggctattgcctccctgttcatcgttccccctgctcctatcatcagtctggcgtagtaaagaaggctcaagctgtccacgggcttttctggcattatgacgttgtcaaagcgctcaaagcgcttcctctgctcttcagttctcgggaacaggactattgggatgtctggaagaaggggtatgacgtcctcaagaatgctctttatgtcgccgttgaagtagttggcctttatgggttcggtgcgcataacgatgtacccgttgcgcttcaccccaagctctttcagaacctttctctcgggcttaaagccgtagaggtgggctagctcggagaatccgttaacgggcctcatgccgttcgggtctgcaccgcacttgatcagctcataggcatcaatagctcttggatacaggagcagttttgtgaacggggctatgagcttgttctgaccaatcgcggtctcgttgtcaatgaagcctatgctgggtacctggaggccaaatgcaacccttggagcttctgcggagtgcttgtaaatcgccaggtcgggcttttcctctattatgagcttgctgagtttgtaaaccctctccgagcttgccagaagttttccttcaagagtagcccctccgtgcttcccgacgacgtagtagtcaaagccgagcatatcgagaattccggtcaggccgtcaaactccctcgtggtgattataatctcatagccggacttctcaagctcccgtatcaagcccttgaaaaagtgagcgtgaggcgcgttggttatatccacccagaccttcattctaccaccatccaataactggacgcatctgtccattataagggtttccaaaaaaccgttgtgaaggcgtttttttctgtgtcctcaactcttgcttttgattgaaaaagctttctaaccctttctttggatgaaattggctgttaaatgtcttccttcaactacacccaaaatccgctcaggtttttgagaggctggcatttctaactaacttatcacaccctaaaacattttcacaaccgttggctggaaaaggcttttattccgtccaggatagctccccccggtggtagatgtgaaggaaatagccgtaatcgggctcggatacattgggctgccgactgcgataatgttcgcgaatgcagggtttagggtcactggttatgagatacgagaagacgttgttaggagcataaactctggaaaagctcacataatagagcccgaaatagacgaactcctgaagaaggccgtctcaagcggcaacctgcgggcgacttctgaccctgaggagataaggaacaaagacgcctatataatctgcgtccagacccccctaaaggaagacaaaacccccgacctgagctaccttgaaagcgcggtcagaacagtcgcagagcggatgaaaaagggttcccttgtcgtgatagagagcacagtccccccgctgacgactgtcaaaatggcgaagctcatcgaggagataaggggattcaaggcaggcgaggatttctacatggtgcacgcgcccgagagggttatgcctggcaggatattcaaggaacttgtctataactccagaatctttggcgggataaccccagagagctcagagatagctgaaaagctctaccgctcctttgtgaaggggcagactttcaagacaagttccaccgttagcgaggtcgtgaagctcatggagaacaccttccgcgatgtgaacattgccttggcgaacgagttcgccttcctcgcccaccagtacggggtaaacgtctttgaggcgatagaactggccaatacacacccgcgcgtgaacattcaccttccgggaatcggtgtcggcggccactgccttcctaaggatccccaccttctcctctggccggctaaggaagattttggcctcataagaaccgccagggagataaacgactcaatgccgctcttcacgaaagaccttctgttttctgcgtttaagcagcttaacgttccacctgaagaggccgtggttgccgtccttgggctggcttacaagggaaacagcgacgacacgaggaactcccctgccatagcttttatagacgccataaaggacgacgtcagggaagtcagaagctatgacccgtttgttgggggaagcgctgaaagcctggaggaggctctgaggggtgccgacgcggcggttatcgccactgaccacacggcctttaagaacctcaactgggaggagcttgggaagcttatgaggacgaagattctgatagacggcagacacatcatagacaaacctccgagaggcttcctctttaagggcatagggaggggtgaatattgaaacccgcccttgtgtttgggaccaggcccgaaatcatcaagctggcccccgtcgtaagggctttccttgaaatgggaattaagccgttgctcattcataccggccagcactacgactacgagatgagtaggattttccttgaggaacttgagcttccgccgatagactaccacctcgaagtaggctctggaactcaggcggagcagacggggaaggccatgattaaaatcgagaaagtcttgatggaggagagacccgacgttactttagtacagggcgacaccaacaccgttctagcgggtgctctggcgagcgtgaagctgaagatacccgtcgcccacgttgaggctgggctgaggagctttgatcggacgatgcccgaggagataaacagaatcctagctgaccatgcgagcgaagtcctgttccctccgaccgaagaagccaggaaaaacctcgagcgggagggcataacggaaaacgtctatgttgtggggaatacaatagttgacgccgtactccagaactccctggtggcggagaaaaagagcgacgtcctcgagaggcttgaccttaagcccaaagagtacatcctcataacggcccaccgcgccgagaacaccgacagctgggagaaccttaccaggcttgttgaaatcctcgaaagtcttccgatgatggccgtttaccctatccatccgaggacagagggcaggctcaagaggtttggtctctgggaacgggttgcctcgatagagaaccttatactcaccaaaccgctcggttacctcgactttctgaggctggagaagaacgccttcgccgtaatgaccgactcgggaggtgttcaggaggaggcgataattctcgacgtgccctgcctgaccctccgttacaatactgaaaggccggaaacagtcaaagctgggggcaatatcttagtgggccttgaaagggagagggttctccgctacctgcaaaggctgattgaggacagagacttctatgagaaaatggcaaaggcacctaacccgttcggggacggaaaagccggagagaagattgcaaaaatcctggttgggctatatgaaaaaggggagctgaaagttaaaagctcccgcttcatctgattattctttttcatcgcttttcaagaactaacctttcatggcaatactcttaagcagtatagatggggaagtaatgtacggcgatcactgtttatctccaaatacggagttgatgtagtcctcggttgattcggtgatgttctgaactttttccagggcatcctccagtagttgtccaagtccattttgagtttcgttgttgtctgtgccgattttgaagaccccaagaaacttctctattattgacttcgatgtttcggtcgagttcttcacgaccttcagagtgtcgttgtacactctgtacgcgtagtctgagctgagggaggtgtttcccacgtaccagtcggttgggtctaggacttccctgaggagactctcgttcatctgatctacagtatacacccccgatcctggaagcggtgtgttctccgctagatattctatctggttgccagcggggtttaactggggcatgttgtttttccccacattgatgccgttgacgagcttgtccgggtcttggagggggtcggtgattccgttgagcacgttggagatagaaccaagtgcagacattacgttagtgtacaccattatgagcaaaattaacataactatcgaaattatggcccttttcattcccctcccccaattgtagttaaacttttcatcgtatttaaggattatgctattagaaaggtattttattggaaattttacaaatgttcgcccaattagtttggattgctcacaatgttacaaatcttgtctggaatgttggagcatcttgaactacacgggggtcccgatgtatattccatgcctggttctcactattctaacccttatcctgtccccaacttccgctctggtatttatgacttcgatgagtctgtttctggcttttgctatcatctctccctctatcctgcctgggagaactacctctgccttaacgacctctcccggtctgaatgcaaggggaatgaactccctcttctccatcccgaagtgttcgggctttagaacgaggggcttcattccagtcttttcttcaagggccctaagccaggcatagaattccttgaagggcttgaccttggctatgacagggtttcgaccgaacttgtagggaacgtagttctggaagcccagcgcgggccagcgctttccggcgccgatctttctggcgaactctatgaaggcctcagcctcgttgtcgttcaccccgaaaatgataacgggtgcaatgagaacgtctattcctgcgttcacaagggcctccgccatgtcgaggacgtgctggagatcgtagtctttcctgcccatcagcattttcgccttgtctgggtcgagggaatggatcgagaggtttaccctgtcgaggccagcctcggccagctcctcaaccagcttgtcgttcaggagcgtcccgttgctctgcattgaaataaccgagacgtttgggtgctcgcggagggcctggacgagctctacacggaagggatatatgagaggttcgccctgaccgtcgaggtgggcctcaaggccctttccttttatccgggcaacctcatcaaaccacttcatcagatagtctatgtcaacaacgtagtcgagcttccttgttcttgaatagggaccctcgtcaacggaacagaaaacgcagctgagattgcagccgctcactcccctgacctgaatcaggttagttcccctgtcgatcaggccaaaggcgttgtagccgaggagagggacatcgaggccctcgtggatgtaaagaactttccgtttggtgtatctgttcctgagaagggctcctagattgttctgaatgtagattgcaatgtacttttcaattccaggataatcagtgtcaatgaaaagtctcccatcttttataattaactcgggctttacgcggtacttacgcttgattactctgatcagctcttttttgtcgaagtccgcgtaaagtgtctctctccataccagccttatgctatcgccgacatcttcaaaggtcacgtggggcagtgagacttcaatcatgtccacgggttttcatccgcttttaaaaactcgacgatggaggttttatccatcctcaaaatttttaaacccctgagattgtcattatgcggacatggaaacattttaatatcaatgatgcaaaaagtatagtggtgaacttaagtgggtgatgcaggatgtggggaaggatcgagcactactttgacgaatatcctgtgaggaaactcatagcgaaaaccctcctgaagtatggtcttagggtctccgatgatatgaagataaaggccggggacattgaagtcccgtacaccaagatagccaaggccctcgatgttgacaggagagtcgttaaagagaccgttggaatgattctcaaagttcccgagctgagggacatatacacgaacctcgagccgaccgtccacatgaagtacgtcggcaggcacgttggctacggcgtcatcgagatagaacccgaaccgagggcagtgggaatactcgcgaagatagcccagaagatagcggagcatgacataaacatcatacaggtagtcgcagaagatcctgaactctaccctgaggctacccttacgataatcactgagaggcccataccgggagacttaataaacgagctctccaagctcgaaggtgtcaagagaatatccatatattagtcgaagtttctgcttcttttcctattctcattactaagatttttagaagattttggggcttttcgacgggaagggactttgatgcccgcttttttggactgctggacaaattagatacctccattttaaccaaaagttctaaacctttgttctttgcagataacgtttataaggtatcgttagaaaccctcggttagcagtccagaactgctgagactctctggagggttgatgaatggaggaagcgagtaagattagcaggtacctatacaccctgataatcctgtttttaatatggctggcactgacggcaagcctcgaccagcaggagcttatcttcggcttcgttctctcagcgatagtggcggcgataacatacccaatattcacaacgagaggactggcgaacctccatccgaagagggtcgcctacgcgatagcctacgctccctacttcctgtgggcgatgatcatggcaaacttagacgttgcctacagggttctccaccccaagaggccgataaggccggggatagttcactgcaagaccatcctcaaaacaaaccctgggaaactctcactggcaaactcaataaccctcacgccgggtacgataaccctcgacgtcgatggggacgactacttcatccactggatatgggttccggacgaggttctccacgctgaaagcgaggaggttcacgttgagaaggcctccgagaacatcacaagaccctttgaaaaattcctgaaggtgatcttcggatgatagggataggtgtttatctggcactcatagcgatagcaacactgctcagcatgtaccgcttcatggtcggcccaacgacccccgacaggctggtggcagtggacatcatgaccacgataacaacgggactgatggtgctcttcgcgctctactacaagcgcatcatcttcctcgacgttgctctggtttatgcaatcctggccttcggcggtgtcatagcgttcgcacgctacatggagggaggtctatgaacgtgctctcagcacttggtgaagctctggttttaattggaacgttcttctacttcctctcagccctgggtctcatcagaatgccagacgtttacaacaggatgcagacatcaacgaagagcgccaccctcggatccctcggcgtcatggtgggagtcggcctctgggcggttggcgacggcctctcgtggtcttggttcaccaagagcgtcgtcatagcgctcttccttctgctgaccaacccgataagcgcccacgcgcttatcagagcagcctacaagagcggaatcccgctttggcagggcagtgtggttgacaagtaccgcgagcacctggaggccaaggaaaaagccgaaaccgaagcctcaaaggagggtggtgaggaatgaactgtataacctgtattgaatacatagtagttgccctcatgatcatatcggcaatactcgcagttgagtggagggatctgcttgctgcagcagtcggtatggccgcggtgagcctgttcgcgtcgatcctgttcttcatgcttcaggctcccgatgtggcaatgaccgaagctgccataggtgccgcactgagcggcgctatagttatcttcgccgttaagagaacccagcgctttgagactgaggaagaggagaagccagggtggtgggtgagatggtgagcatactcaagaggtcgctcgcgataatcacactcctgatagttggctactggctggcccagggcctcgctggagtcccattcggcgaggacaagatgctcgttggccattactacctccagcacgttaaggaacagacgggagccgttaacgcggtaacggcgatagtcgttaactaccgtggtttcgataccctcggtgaggtcaccgttctcttcatagcctcgactggtgtcgctgcccttctctggaggaagaagagggagagaacagctaaggtcgagggttccgtcgtcctcacaactggtgcggagcttctcttcccgttcatagtcatgttcggtgcctacatattcatccacggacacctcacccctggtggaggtttcccaggtggagcgacgatagccacggcattcttgctgctgtacatggcgttcacgatctacgagattccccacaaggcctttgaaaaggtcgaaggtctagctggaatgagctacgtcctcgtcggcctcatcgggcttgcaatcggcggctacttcctcttcgactggatatggcagacctggcactggggcactgacaacatcggcagactcttcagcggcggcttcataccgataatctacacgataatcggcatcaaggtcggaacggagctcagcggtatcgttgacaacatgctcaaggaggaggtgagagaatgatttcagtctactacttcggcgcgatagcactcgtcctcataggcctctacggggtcctcgtcaagaagaacctcatgaagatactcatcagcctgagcatcatggagaccggcgtcaaccttctcctgataagcgttggctacgtctcagggaagagcgcacccattctgagcgagggaataaagtggaaccaggccgttgacccaatcccgcaggctctcgtcctcacggcaatagttatcggtgttgccacaactgctatggcccttagcgctgccattttgatctatgagaagtacggaacccttaacgttgaggaaataaggaggttgagaggatgaacggtcagtacgcttcactcctcatagctttaccgctcatcagcgcattcttcgtcccgctgataaagggacttggaaggaaggccgtgatgggctacctagtgctcatcaccgcactccagactgcaatagccggctgggtggcaaacgaggtctattccacagggaagccgataatagtcatggcaggtggctggaagccgccagtcggcattaacctttacatcggccactttgcggcgctcttcgtgttcataatagcagtaatcagcttcttcatggcgttcttcagcttcagagcagtcaccgtcgaaccggttgacaagtacgccatgctcttcctcctgctgatgctcggtgcgacgggaatgatagcgacgggagacctcttcaacctgttcgtcttcatggagataacctcaataactgcctacgccctcaccgcctacaacaagaccggcgaagcggctgaagcctcaatgaagtacatcgtcctcggtggaataggctcaagcttcttcctcatcggcgttgccctcatctatggggcgactggaaccctcaacatggctcacctcgctcagcttgcgggagctattgacccgactgttgcacaggtcggcctcgcactgataatcttcggcctggcagtcgaggctgaactgttcccgctcaatgcctgggcgccggatgcctaccaggccgcaccgcacccgataaccgttatgttctcagccttcgtcgtcaaagctggcctctacgcgatagcaaggctcctctacatactccagaacgcaaacggatggagcggcgtccttaagctggtcataataatggccaccttgacagtagtcgttgccgagttctcggcactgagacagaaggacgtcaagaggatgatagcctactcctcgatcagtcaggtgggaatgattgcctttgccctcgccctcggcactcaggcaggcgttgacgcgggagtctttcacatggtcaaccacgccatcgttaaggcccttctcttcctcacggtcggatacgtcggcgttgccctcggcgggaccaccatcgagaacttccagggactcggcaagaggatgcctttaacggctttaacactcaccataggttccctcgccgccgtcggaataccgctcttcaacatcttctggagcaaggtcaggatactcctcgccggtgtcgaggctggctactcctggagcgtcgccctcatcctcggtgccagcgtcgtcgaggcggtttattacctcaggctgatccatacgatatggttcgtcgaaggcggcgagagggtcagggagaacttcgccataggcgtcatagcaatcttcctcgctgcattgataatagtcataggcgtttacccgaacgacgtctggactatcgtccaaaaggccggtcaggacatctttaacgtggccaactacatcaagaacgttcctctaatgggggtgggagcatgaacgaaataccgattatcctctttactcctctccttgctggagtgctcgcctggctgattaacgtgaagggagtccgcgagcttatcggagtcatcggtgcagccactccattggcgttcctcgccaagctctacccgactatcgtcaacaatccgaacaacccgataacttaccagatgaccgtgagcgggtttaaggtaaccttcactctgggaatgctgaactggtactttgccgccatagcttccctagtcggcctggctatggcattcggcatggtctcaacaagcaagaacggctacgactggctcttcgcccttatgagctacactggagtccttggcgtcttcctcagctgggacttcgtcagcttcttcctgctctgggagcttatgaccttcgccagcttcatgatggttctcaagaggaacaggcacgagtccctcaagtacttcgtgctgagcgttatcggagcctacgctatgcttctggcaatagcgcttatctacgctaagacaggggccctcgactttgactcaataaggcaggccctctacatggacgcgatgctcggctcaatcagcaagggtgagaccgctctaatcttcgttctgttcctcacggcgttcggcgttaaggctggtgcctggccgctccacgtctgggcaccaggagcttacagcgagaccgaccagagctacacgaccttcttcagcggcgccctcagcaaggcaggggcctatggattcctgctcctctacatcctgatgggtgccaagctctactacgccctcggaaccttccacggccacctcacctttgcgtacataatagcgtggataggagctataacggtcgtcgtcgccagcttcttagccgttctgcaggaggacataaggaagctcttcgcgtactcgtcagtcggtcaggttggctacatcctcctcgccttcggacttggcacggggcttggcttcgctggaggtctcttccacgtcctcagccacgccgtcttcaagggtctcttctggctcgtcacagccgctataatcctccagacaggcaagactcagttcaaggacttcggcggattagctgagaagatgccctttaccttcgcgatgggactcatagcagtcctcagcctcgcaggaataccgccgatggctggtttcgccagcaagtggctaatctacgaggccgctatcagcgcccacatgccccttgtagctggagccatattcctcggaagcgcgctggcctttgcctacgtcgtcaggttcctctacgcggtgtggttcggccagaggcccagcgaccttgaagatgtgaaggaagccccgctaccgctcctcatagcgatggcaatactagcaatcccgaacatcgtcttcggaatagctccgggacttgtcacgaactacctcaacaaggccctcggtggagaggtcgtgggcggcaactactacaagctcgttactcagaccggaacctacaacgccctgaccgttgccctcctgctcgtggttggcctggccatagctggtctcatctacctctacggcgcgaaggcaaggagaataccggttaccaacacataccagtcgggtaaccccgtaaccgaggaattcaacctcagcataaggaggaacttctaccttccgctcaaagaagccttagcgttctggctcaggtacagcttcgacaaattctacgagaggattgcccagctcagcgaggacttcgctgacacactgagggaagggttctacaacgggaacgtgcaggcctactcatggtatctggccatagtactcgtaatcctggctctctggggggtgctgtgaatgatagactggaagctcatacttgagacgattgggatactcatctacgcgactttcatgggcttcatcttcatgggtatcgagagaaaggcgatggcgaggatacagagaagggttggacccccgatataccagcccatcatagacacccttaaactgctcggcaagaaggagagcgtcagccacggcttcatctatgacttcggccccgtgtttgccctcggagccagcatagcagcgctcctcttcataccaatagccaacttccagctgttcagcaccaacgcagacctcatcgtcgttgcctacctccttgaggtcccgatgctcggaataatgctcggtgcaatgagctcaggaaacccgtattcagcggtcggtgtccagcgtggactcctcacaatggttgccatgcagctcccatacggcctagctctgatagccctcatccagcactggggaaccttcaagctgaacgatatagttgctctccagcaggcccatggatggagcataacggtcccagcactgctcctagcgctgatagtctttgacatagtcttccaggcaatgctaggtctcgagccgtttgacatcattccagcaccggcggaaatctccatgggtccgatggttgagtacggtggaaagcacgcggcactgctcttcacccagcacgcagttcagctctttgctgaaacagcgttcttcgctgtgctgttcctcggtggagcgagcaacctcctcgaactcctcatcaagcagattgcagtgctgttcatatcgattttcatagccagcatctacccgaggttcaccattgaccaagcggcgaagttcttctggaagtggcccacgataatcggaataatagccgtcctcctgacgatgtgaggtgatggtgatgagcgagatgcagaacggtgatgtaatacactacgaactgaaggagttccagctcttcgagcccctcttcaggtgggctagaaagaagagcctctggatagtggccttctgtaccggctgtggcggtatcgagatgccgccgttagccaccgccaggtacgacttcgagcgtttcggaataatgcccaacccagcccccaggatggcagacctcttcctcatcacgggctacgtcacgccgaagacactcaagaggataatcataacctacgagatgatgcaggatccgaagtacgtactcgcccacggctcctgtccgataaacggtggcgtctactgggactcctacaacgtggttaaacagctcgacaagtacataccgattgacgttgccatagccggctgcatgccgcggccggaagctgtcatggacggaataatggagataatgcgcaagattgagaacggtgaagccgacggctggaagaggtacaaggagaactacgagtggtacaagaagaaccaggatgagctgttcggcgaaggatggcgtgagaaggatgcaaggaggtggctcgcatggatatgaacgagaagcccaaagtcgaggagaaggttcaggaggaggcaaccgtggaggagaagccgacccttccggacacaaaggaaggaaagctcgtgaaggcgctccttgaaaaggccccctacgccgagggagaggtaatccgcgagagacgcatcaagttcatcgttccagcggatagaatacacgaattccttgagctagcaagcgagaagttcgagatgctcatgcagataagcgtcgtggactggctcaaggagggccagttcgaggtcaactaccagctctggagcgtaagcgagagcgttcacgcgttcgtgaagacaagggttccaagggacgaggcgaagctcccgacggtcatggacatctggccggttgctgagacctacgagagggaggcacatgagttcttcggaataatcttcgagggcaatccgagacttgggccgttcatcctggagccgagggagtacgagaagcacccgctcaggaaggacttcaacatgctctcctacgtgaaggaaatctacggtgaggacttcgataggtatgacgagagcaagactaactacgtgatatgaggtgatgatcatggctaatttggaagttccgagagagcttagggaagaggcgaaggcccacgacatgtacctgcacccgatagacaaggacacctacgagctgttctttggtccacagcacatggcaacggagaacttcagcataatcctgaagatggacggcaacagggtcgagaaagctatagtcaatccaggcttcctccacaggggttttgagaagctcgccgagcagaggccatacttcaccaacatcgccctgctcctccgtatctgtgttcccgagagcgatgtcccagagaacatctactcaatggccgttgacgagatcgtcggctgggaggttccagagagggccatctggataaggacggtcgtcttggaaatggcaaggctcagcgcatggatgttctggataatgggctttggaaacgagataggcctctacaccgccggccagtgggcggcagcctaccgtgagaggttcatgcgtctgtacgaagaactcaccggaggcagagtctaccacatctacaccgttccaggcggcgtgaggagggacatacctggagacaagtggctccgccagctcagggacaccgtcgagtacctaaagggcaagctcaaggatttcgacgagatactctttgacaactacatcatgttcgagaggactgagggagtcggtgttatggacaagaagttcgcccttaagcacgcggtaaccgggccgaacctcagagcagtcggcgttccctacgacgtcaggaaggacgacccgtactacctctacgaccagctcgacttcgaggttccagtcctcaaggaaggggacagcctcgcgagggttctcgtcagaaggtacgagatggagcaggacctctacatactcgaacagctcctcgacatggggccgccgagcgggccttacatggttcaggacgcccgccttaaggccctcccgaggttcaagcctccagctggggaggcctacgcccacgtagagagcaccaagggcgactttggggccttcgttgtcagcgacggaacacacaagccctaccgcgtccacgtcagggggccaagccagagccacggtgttacggtacttgaagagctcctgaagggagcgcgcctcgctgatgtcccggtcatattgaagacccttgacaactgtccgccggacatagacaggtgatgaagatgcccgcgagagtcgttggtgaggaaaaggtcaagctcaagaagtccttcatcaagccctggatgggcatcaagtacctcttcaagaagcccgtcacaataaagataccctacgagaagatagagccggcaccaaagtacaggggcttccacacactcgactggaagaagtgtgtgggctgtaacttctgcggccagatatgcccggcaagggcaatagagatgacttggatagaagtgaacggccacatcgccaccaggcctcacccgaaggtggactacggcaggtgtactttctgccagttctgcgttgacgtctgtccgacgggagcgctcggcttcagcgagaactactacttgaccactggcggccttgaagaagatctggagctttacgactgggtcccgatccaccccgacaaggttagagagctcaacgagaagttcaacgactaccgcttcccggttgagaggataaagttcaacaaagagacgagggaggtaacctactacctccgcgacggctcaacgatacagttcaagatactcggctacggcctccggccgccgaagccgccggcgaagcccgcggccaaacccgcggagaaaaaggaagggcccaaggctgaggagaagaaggagtgacttccccattttcttttccgcggcctctattcttacaacttctggcgatagtatttttaagccaagcatcgtattaataccggtggtattatgcccgttgatttaagaaccgaaaagacactcggcctcctcggctcgattctaactctgctgggaggtttgggtgacggagcaattaaaacatggccggttgttgctttctcgaacttggtttcattcattgggtttatccttgttctcctggcactccacggcatcagcaccaagctcaatgacgacagaccattcagatactacctctactccacggtcgttatcataataggaatggttttggcactggtccttcttgtggtgggcgtattttttgtgtccaattcaatgatagctttcaggaatatccacaaccatctgggtatctccgggctaataatggcgatatctggagtgcttctgatacttttggtcgtgattctggcggtgtaccttcagattcaggcctggcgcgcgacctacgaaataaccggcgttgaggagttcaaccaggtcgcaacgtttctcaaatggggcgctataaccctgataatcctcgttggcgtccttctgctcctgatagcacaagtattccagataattgccttctcaaagcttccggatgaactggagccgaaaggccagaagccagagtacgatactcggatagttgtttattgaggtttttcattcctttttggcttttagagtggtaaagatgcaaaagaagaaaaggattagagaattctctcaagaattatcgccgttatcgccccaacggccatcccggactcgagtatgctggagagtattcttggtagagcgtggaacagactctctgggagctggggtgcgccgaggcccgctatcagcgccgctgctagaatgaggacgttcctgtcagtgaactccaccttttcctttatcagcctaaggccagtgacgcttatcatcccgtagagtgccagggtcaggccgccgagcaccggagccggcatcgaggcgagcaatcccgcgaacttcgggaacagggagaggaatatcagtattatagccccaacctgaaccacgtgcctgctacccactttcgttaaagcgactacacctatattctcggaatagctcgttgttccgcaggcaccgagaaagccagctatcgagcacgccagcccttctgttcctatgccccttccgatgtgcttctccgttatctccgcgcccgttacggtcgctatggcgtggtagtcaccgacgctctcgattatgctgaccatgaatgcgaagagcagtatggctattgcagctgtatcaaagacaggcgctccccatggaaacggcttggggatgctgagcataggaaggctctcgatgaggctgaagttggtaagcccgagtggaatgctgattaagtatcctacagccgcgcccacgaccacaggcatggcctttaggcttcccttcgctttgagtgccacgaagacggtcgtgaggaacgtgaccgtggctacgagcactgccttccagacgtttgtgccgttcgggtctgcgtacgcgttgaagaagttcatcagcgcgacgttggcgaggctgaagcctatgagggttattgttaccccagtgacgagcggcgtgaaaagttttctgaccttacctatgatgccgagccagcccacaagcccttctatcagtccgccgactatcagtgcaccttgaacggcagccatgccgatggtcgaacctatcgatatcagcccgggaatgaaggcgaagctcgatccctggactattgggtagcgggttccgatgatagtctgaaggagcgtcgctatgcccatagctaaaagaaccgcctgtatcatcatggctatctggtctccgctgagcccaactgctccgccgacgaccagcggcactgtaactgtggctccgaacattgcaaggacgtgctgaagcccaaaaacgaaagccttcgcaggctcgaccttttcctctattccaactttcagaaccggcttctcaacaacttcgacattctccattaaagcccgctcgggctgtgttggtttttgtttaaaaagttttcggatgaggtaagaataaacaggaaattgttaattaccatccctgcactttctcaatgacttcatcaggtacgcgaccttcttcaacgtcctctattgcctcctcgagcttgtctaatccctcatcaagcacttcttcctcgatggtcagaggtggttcaatcctaaggacgttgccctggagaaaggccacaatcaggcccagctcgtaggccctccagacaacctttttggcctcatcgtatgccctttcctttgtttccctatccttcacgaggtcaacacccaacatgaggcccagtccgcggacatcacctatcagctcgtgtttctttttcattttctccagtcttctctttgccctctctccaagtatttgagcccttttgagcagctctttctcttctatctcctcgattactgccagagcggcggcgctcgcaaccgggttgcccgacatcgtgaacgcatgtcccagtgggggtaacgagtccattatctcccctctaccgactattgcgcttatgggaagtccgccgcccaggggctttgcgagtgttatgatctcgggctcgacgccgaagtgctctatggcgaaccactttccagtccttcccagaccgctctgaacctcatcaacgacgagcagtatgccgtgttcatcaagtatccttttgagtttcttgaagtagttttcaggtggcaccaccattcccgcgtcgccctgaattgcctccgctatcagcgcggcagttccttcggcgtgcacttctccctcaaatttttcctttaggaaggagacgcattccatcctgcattttcccggttctttgccaaacggacagcgatagcagtttggaaaaggtatgaagtggacatcgctgagctgtcccacctttgagcgcacttcgaagtcgaggcctgtaacgctcattgcaccgtaggtggaaccgtaatagctcctaagatatccgatgatcgaacgcctgccagtgtaggccctggcgaactttatcgcaccgtcgtttgcgtcgctcccgctcaggccaaaggcgacctttgccccctcgagcggcgctatctcccttaacttctcggcgagaagaagaggctcgaccgggaacccataaatgaacgtgaagtggagcaatctatcggcagttttcttcacagcctcaacaaccctggggttgttgtgtccaacgttctggacggcggcatctgcaaggaagtctatgtatgccctcccttcaatgtcccacacgagggcgttttcggcccgggacggaacaatgggcacgtacgtaacgtgggacgcccgggagatgacctgtgaatacctctcaacgacctcttcaggagtcatgccggttctcacctaactgttatatgcgtttgaaactaatagcattttcgcctaaaaattgcgaatttagtagaaatacttatgaactaaatgctaaattagtcaaaatggtgggcaaataatggcgaatacagaagagcttgatgcactcgacaggtcaatactccgtatcctccaggaggacggacgggcgagctactccgagattgcgcggagaataggagttccggaatccaccgtcaggctcagggtcaagaggctcgtagaaaaaggagttatacgaaagtttgcggccctcataaacccgtttaaggcaggctattcaatagtggctttcatagcggtcgatgccgagccgggtaaggtgaaggaggctgtagagagactgagcaagctcccagaggtggatgttctcggtattgccacgggggctcacgacatactgatgcaggtcacagttagggatttgaaggagcttgaagacttcttaatcgagaagctggggagcatagatgggataaagagcacggagacctcaatactgaccagtgtcaggaagtggggctacgcgagggtgttctaaaccgagccccccatgagaacccacactccaattcctatcaggagtattccagcgacgaccgaaagctccctgctgtgcctgacgagggcctgggagaagcgcttgctctccgagatgcttcccatagtgagcaggatgagcaccaacggcaggacgaaaattacgttgtagagggccaggagaaggaaggcgagcgccctgctgccgtgggatataatcgttgcatagacgagataacttcccgcggagcacggaagtagcgtggtcgagaccacgacaccgaggaagaaagagctcataaaagttgcctctgtactgaacatcttcttcctaatgcccttcttgtcagctatcctcgacttttccatgataccggtaacaatggtgtaaactccaaacgctattgccaggaagcccgcgaaccagagggggatgtactgtccaaggtacaggagaccgactccgagaaggtagtatgagatgtagacggccaggatgaacgcggagccaacgatgtaaagctgcttcttctcaacttttctaactgacagcgctatcaggagcattgtgtatattacaaaggtacaggggtttatggagtcgctcattgatagggcatagaactgggggatgaaccaggggattcccagcaggtatagagcaagtgcgctgattccgaaggacagcactaggattactgacagcagtttaatttctcccctcatgatggtatgctcggaacggtcctttttctggatttctaaaacaaaaagttgagaacaagaggtttcaacccgttgagttagacttcagctttgtcagaacgctctgaacatcgacgctttcgtgctctacgaaaatcgtctgaagggcatcgatgagcgtctctgaccttggattatcccgggccaaaagataccattcacccccaatgaaaaggataactccatttgcattcatagcagttgcaacaatctcaggtgttgcagagacgttgaactccccctcaaatattgcctgtatagtaccgttgtaagttattgcgatagcgggaacaccggttatgcctgttagctgtgcaagctgtccaaaaagctctgagttagtctcgtcatttacaagctcataatacgtgagtgaatctgccccaaattcttcaggaatccactctttcatatgcctgcagtgaggacaggtcttcataccgtacatgtaaaaatgtatctgatccaggtaaattctcgttccattcacgtccacgtattttggagattctgtggacgtctggctggaggtatttgaatcagaactcagacaggcggaggcaaaccccaccaagaccaggagcatcagcagtattccagtttttttcacgtttaccaccattattagctcgggaaagacgttataaactttgggcgttaataattgtgggggactcccatgcaggaatggtaccgctctcgggcactttacgatggggtcatgaagctcgtaaagtcccacaggtttgatgaggcccttgaactcgttgaaaagattccagataacaaggtcaagtcaatggccctgaaccagattgttgtcgagctcgtcaaagctggagaggattattctaaagcactcaccagggcaatagaggccgctatgaacgtcaccggccagaacgagagcaccaagacgctgatggggctggcctttgacctccttgagctgggaatggttgacgacgccctgaaaatagccgagtacatttccgacttatcgaacagggcaaaggtcgaggcggaggttgccctgaagctggccgagaaaggtgaggttgcacaggccatggagataatagagaacatcctcgatgaggacgttaagacctgggcgacctcaaggctcgcgaacaagctttaactttcttttttcaaagattcacatttggctggatgaattttacaagaatccctccacaaggcttttttagggctttccttttctgggcccggtgagaaaaatgaacggcggagagataatcggacttcttggaatgctcctgctggtgagcgcgtgggttccccagacatgggaaacggtaaaaacgaggaagtgccccctcaacatgaagttcatagtgatttacgtcacggcggcgaccctgctgacgatatactcctggataataggcgactggatattcttcacgctgaacttcctctcggctttccagagcgccataaacctcgtggttaagcttatggaaaagtaaacctcacttcctctcgtagagcccaacgacctctccccaggctatcacgtggccttccatggccttttctaactcttttcttgaggagccgggttcgagtttaagttccgtgtcaagggcgtagaccttgaagtggtagtggtgaaccccgtgtcccctcggcgggcaggggccgttgtatcctatcctcccgaagtcgttctttccctggacgatgtggaacggctcgtcggtttcgggtttcctaggcacccatgaaggtatctccccaacgggcggtatgttccaggctatccagtgggtaaaggttccagctggcgcgtcggggtcatctacgataatgaccaaacttttggcctcggccgggatgttgccgatgtaaatcggcgggttcgtatcgtcgccctcacaggtgtattccttcggtatgaactccccgtcgtggaagacggagcccacctcaagggtcttttccatctttacacccccttcggacatgcaccctgcagtggcaaccagcaaggccagcagtaacgggagcggcctcttcatggttttagttacgtcattgagggtaaaaaggttttggaaaaggtcaaaattctgaagggatatgccaaagtcgagctggggtgaagtttccgtagttagtggcatctcaaaggatagttgcaccgagaaataatcaactgttggaaatccgacggggaaacgttttaaccttcttcgtcctaacatctttttgtgagcacgatgcgcgtggtgtgggagaaggaaattccggcggagaagataaccgtctcaccgaggcctgtctggaagtgcaggacctgtccgatgtacggaaagaggccgagctgtccgccatacgcccccgactggaaggaagcaaaagagtgggtcagatccttcaaaaaagcccttctcgtgaagtttgaggtcgatatgaacgacttcgaaaacgagaagaggaaggttctcctgtggcttttgaagaaggaagcagagctctttaaacaggggaagctctacgcaatggcccttttcccaggcaactgcaacctctgcgacgactgtccatttgagcacggtgagccatgcaggatgcctgagaaggtgaggccgagcatagacgctattggaattgagataagctcactggttgagatagacttctcggaaagcgtcctctacgggatggtgatggtcgaatgagcgtccacatagctctgctcgggagaacgccctgggcgctggtgaacacatactacgcctccgttatgaggggagaacgcccaaaggaagtttatatcgtaaccgaaaggagatactcccacagcctgccgaaaataacggaggcaataaagacgatctcagaggcatacggcttctctcccgaagtgaagaccctcgtcataccagatgacgacttcaaggaggcagataaggttctgaaaaacctcttctccaagctgaaggagaaggacggcgacatcgtcctcaacatgacctccgggaggaaggcgctggttgccgccgcgataatccacagccgggagtcgaacgttagggagatactctacatggcccttctcgacgtccagttcccgaacaggccttacatgatgctcccaacgcacatgcaggttctcaagaacttcctgggtgacggaaatggcgggtgaagtggttatcgaaaagcccgaacttcagatactcatcaacctcctccaagaacgggaaaaaatccgggtgagttttccaatctacggcacgcttctctttacagccagccccacagagaggggctatctgctggaagtccaggctgaaaagcgggacttccatgtcaggcacccagaactgccttcatactccgacttctacgaggcgtttatctcctcgggagtgatcacgtacgacaacatagaggactttaaggaaatgctggagctgtaccgtatccttagaaaaggtgttgtgttctctcccgacaccaacatattctaccaccgctttatatccaactatcgtcccctcgatggataccagatcgtcgtcgccgaggacgtcaaaaacgagatagagagcgccatgaactacaagtaccgctcaaactaccttcacgagattatgagcacagtcaaaaacggccatctcctgcgtgagctgagcaacaggaggacgaagaaggccagaaaagccgcgtacatagccctaaaggagtttgaggccctgagggataggataatcgttgttgagcgctacggagagggtcacaacaacgacgagcgcatagtgaagaccctcaagcactacgacgagatgagcccggcgatggtggtctttctgacggccgaccttgccataaccgacgttgctagaatagagggtctcgaatacttctactttgaatatccaactgcaaggctcggcacccacgaggtctccgcctaccagctcaggacgctcatcttcaacctcgcggcggttttggggctggttgaggtgaacgggacactggtttacggcgagttcggagggaagaagaggctgaacgagctcaagcttatcttcaggaatggggagcttcaaagggagtttctcttccatctgaacctgtgcaggaagctggagaaaattatggaaggttaaccaacaacaagtccgcctgttgcaagctcttcgccgtttctccccttaactatgaaggtgtagttcccggcatcgttcacgtgagcgagcagggcaaaaccctccactgttcctagtttaatggtctcgccgggatgcttatcaagttcggactttttggctgtgaaccttgcacgggacttctctttgacttttgcagtcaactgtctggggtactgttttccagagtactcaatgaccacgggaacatcctcgtagacaggtacgtatgtttctctggaaacgggtttgccattaatgagaacttcaaagtctttcggctcaaacggcggcacgattttcaggagatacagtgtaatgctcgcctggggcttgccgttatcattcacaacttcaacttcgaaggagtacagggtggtgttgctcttctcgaagtactccctgacttcctcggctagtgatgctggaacgctaagctggcccgagaacgtgccgttgagtttcaacatgagtgtgctgtcttgggtagaggacatacttgtgttctcaacactcgtgctcgtgggtgtgttttcggtgttcgggccttttgaacatcccgccgagattaccactaaagctaccgcaatgagtacgaggattgtcccgcttattgacttccaatctttagtccgcattgttatcatctcatactgaagtaacaattaggccataaaaagtttttggcgtcacctggcccttgatggagttctgactttaatcatcagggctgtaagctcgagtatgaatgtgaagagcgctagaaactcaccaatggacgctagagtacccttgccaagcccaagtaaagaactcacggctatgctcatagtaacaagctcttccccttcttttgattctccgccgtacctaagctccaggaaaaacgtcagccagttgaagagtgctattattccgggtgttattctgacgttccagagcacataacccgtcgcgatgagcaagaagggaagcgcgtaatagagccgcctcatactaccaccggacagagttaaaacgtaactccttataaaaattcttctgcctggctaaaaaccataaaaggagaggaggaaactcactgcagcatgccctcaagcttctcaacgaactggatgctcctctttatgtcggcgaagtactccttggccctctcgacgtgctccttctcgaccctgccacccttagctaaaacgctcgccggtgcgagaagctggactgcataccttaggctggtcttttccccaagctccgcgaggtactctatcgcctcctcgctgacctctatcttctcctccttcgcccttatcttgactatctccctgatctcctccttcttgtacggctcggtgttgattatgaggagcctgtcgagcatgtcaatcgggattccgtgtggcgcctcgatgtcggtgccccttattttcgttctgccccggttggtagccaggattagtatcggcgcgagctcgctctccatggccctggcgaggaacgagaacgcctcgatgtcgagcatgtgaacctcgtctatgaacagaacaccgggaacgagtgtggccctgccctcctcgatccacttcttaacggtctcatcaactctctgcctcacttcatcgcttatctccgcaccggtgctgaagagcagaccgaagatgttgcccctggcgttggcaacgtcgaggtcgtgtagggtgaccgtgtaggtgaactccttgattttcagaactggcccgctcggaaggttgacctttttcttgaagaagagcccctcttcctccttcgtggttcctaccttcgatattctacctgtctcagcgtctatctggataacgtcgccctcttcgacgcccatctccatgagctggtaggctatctcccttcccgcccttatcgtcttctcgtcgtccttcgtgcggagggttatgatgacgctctccggaatctcgacgtacgggttgaaggggtgcctcgtcttcctgacctcgatggactttacctcgccctcgtagacctttctctcctcgcttatcctgacgcctatagccctcctcatggcctgcttgaggaactccgtcttgttgacctccgcggagtagatctcactgcccgctatctggacgaaggggacgtcctcaccgagctccctcgcgattcccatggctatcgccgtcttaccgcttccggttgggccaacgagaaggattccctttcccgcgagcttgccgcgctttatgagctcaacggctattccggccgcttcccttgcctttatctgtccgaccattccgtcggccatgaacttcgcctttccgttctcgtcgaggccaaggccccttatgtgggagtgcattccaatcctctcgaagctcttggtggccacctcctcgatcactggcattttctcacccccagctcctttagaataccgaaggttactaaaagaggggggcttaaaaatttgacggaggctcaggccgtcgatcccgggcatccatgaccccaaaggccaatctcatcattgccggaagggtttggttgggggccttaaaaactctctcaaagcacgttcaggtacttgtgaacctggaagctgagaccgacgttcttcctgcccattatccttgccgcctcacggtagaactccatgagctttgcctgagaaacctctatgggttccctcggctggatgacgagaggagcgaggccctttagaagtgaggcgtaccactgaacgttctctactttcgtctcgctggtaacgacgagctttgcgtaggtcttcgctccagcttccttcaggattctgatgctctcaacttctctgaggacgaggcctttccagtcttccgttgccttcgcgctctcgtcctttatgtcgacgctcgcgtagtccgtcagcggtgctacatctctaatcagctctggaaggccgccatgggtctctaggaagttgtcgaagccgagctctttcatcctctccatcagggccattagaggcttcacctggagcgtcggctctccgccggtatagcttatcgagtgtatatccccagtatcgagcctgagaacagcttcaaccacttcttcaacgctcgctgggttcggcctgtattcaaatcgccccgtgaagggcttgacctcgtacctccagctggaaactcgtgaggcatctatgtattcccttgagtcgcaccaggcacaatgaaggtcgcagccggcgaagcggacgaaaatctgcctccttccgaaggcagagccttcgacgctccctccttctccctgccagctgttgaagacctcggccattatcaccctcattctgacacctcacagctcctcaacgtcaattccctttaccttttcgctgacgaacccctcaagtatttccactctcacttccctttcctcaccggtcatgtcggccatgagcttcaccgccctggcaaagtcccataaccttctcttcgcggtgttttcaacgacctctgccatcactatgagctccttctcctcgggatgggcgcccatccactccacgacttttttggcgtcttcctcggtaaagacgcccctcttcttgaacagcatggcgaccaccaaagctttagttgtttaatccaacaattacgtaattacataattaggcaatcaaatgtacctgagcaggacttcagcggcctcatctaaaagctccttttcctcgccctcgaggattccagcaaggtagtggagcgcgtgtatgtctatgattatgtacgccgtgttcctgtcgaggccgagggagtatgcatcgtaaaagaccctcctctcgcccaatgcctcgttcatcatttccacgtaggcgtttatctcctcaaccgtcagctcgtcccacttgctctccatctcgtcaaagtatccctcaagcgtccgtatcttttcgaggtcgagcttaagcataccctccacgaaggggaactcgccgacgcggaagaccttgacatcttcattgtcctctatagctatgtagtcccacaggacgacgcctttgatgggattgtggccgtatctgctcgccaagtatgaaaagcgctcaagggcaaagtcaatgtcgtctataaacttctcctcatcctcaaagtggactatcctgctcactgttccagccatacctcgcaccggtgggagaagggctggaggggttataagggtttggaatgggcaagccttttatttggtcgcgcgataaccccaagtgcccgacgagtattgggttgcgatgacgtcgggacccccaggggggcgacatccctactgcccccctttgaagtaaggtttataagagacttgtaaaaggtctgacgaggcgagaccggtggggcgcgagataacggatgagaagctccagaagtatttcaaaataaccgaagaggcccttgagaggcttgaaatagccgtccacgagaagagccttcttatgagcgtcgcccgcgactttttaaccatggcgaggagctattttgaggacgccaagtactactacgagaagggcgactacgtgaccgctttcgccgctctcaattatgcccacgggtttattgacgctggagtgaggctcggagtgtttaagggtgaagacgacaggcttttcgcctttgggtgatggaaatgggagactacgtggtcgttcttgaggcaccgataatcgtaaaggacgttgagacgagcgaagacgctataaacgtcgcagtgagcaaagtcaccaaggccctcaacaaggagaagctcgactttgtgcgggtggaaataggctactcccagtgtccggtctgcggggcgcacttcgagagcgccttcgtcataggaagcgtcggcctcgtcgggatgtacttgacgctcaaggtctacaacgcccagagcatcgagcacgctgagaggattgccaaggccgttgtgggtaaggccctaaagaaagtgcccctgaaggtgtttgagataagagagcttgaacacgacggagaaaacgggatcgaggcggaggagctgaacggggaggacgtttgacatcgtagttaacttttttgtactttttaatgtggtgtctccatatcgcaaacaaaaacttttaagcactccccaatcaaccaccgacataaccggtggaggttttgccatgacgaagttcatatttgtcacgggtggtgttgttagcggtctcggaaagggcatcaccagcgcttctataggcatgctcttcaaggctcgcggcttcaggacgacgaacatcaagatagacccctacctcaactacgacgcggggacgatgaacccctaccagcacggtgaagtcttcgtcctcgacgacgggggagaggttgacctcgacctcggcaactacgagcgctttttggacaccagtttgagcttcgaccacaacataaccaccggaaaggtctattctgcagtcatcgagaaggagcgtaaaggagagtacctcggagccactgtccaggtcataccgcacataaccaacgagatcaaggagcgcataaggagaatagccagggactacgacgttgttgtggtcgagataggtggaacggtcggcgacatcgagagcatgcccttccttgaggcagctagacagatgcagatagaggagggcagggagaacgtcgccttcgtccacgttacctacgtccccaggctgagggtcgtcggcgagcagaagacaaagccaacccagcacagcgtcaaggagctgcgctctctcggaatacagcctgacgccattgtggcccgctcagaggatccgctggaagattcagcgaggaggaagataagcctgttcaccaacgtcccagaagaggccgtcataagcgcctacgatgtcgaagatacttatgaagtccctctgatgctcgaaaaggagggcctgcccgcttacctcgccaggaggctcggccttcccgagagagaacccgacttggaagcctggcgcgagatggtggagaagtacaagtccctcaccgacacggtcgagatagcgatagtcggcaagtacgtcaagctggctgactcctacctgagcatcaaggaggcgctgaagcactccagcgtggcgaacgacgtcaaggtaaagataaggtggattgaggccgaagacgttgagaggcagggagttaagctccttgagggcgttgatgggataatcgtgcccggaggcttcggggctaggggtacagagggcaagatgatggcgataaggtacgcgagagaaaataacatcccgttcctcggcatctgcttcggcttccagcttaccgttgttgagttcgcccgcaacgtcctcggacttgagggggcacattcaactgagatagaccctcagacaccctatccggttgttgacctgatgccggagcagagggaccttgacaggctcggcggcaccatgaggcttggggcatatccagtccacatcaagccgaacaccctcgcgagaaggctttacggcagggagatagtctacgaaaggcaccgccaccgctgggaggttaacccggactacgttgagaagttcgaggaggctgggcttgtcttcagcggcatagccggagacgacgagagaaggatggagatactcgaacttccgggacacagctacttcatagccacccagttccatccggagttcaagtcgagaccgatgaggccagctccagtcttcaggggtctcgttgaagcggcaaagaaaaagaagtatggaagctaaagctcaattccgagttccttcatttcttcttcgaattttttcagctcctcttttctcttaagctccctgtagaactcgacgccgcctatccacaacagctcatacacaaccgcctcaaagggcgcacccagaaaggccgacacataaccggcaatattctcagggaacgccagtgatacgagggaaaccgtacccgatatgagacctatcaccaaaacgccgatccaaaggagaaatccgaagcccacgctggatggaaggttttttaggacggctccaaaggcttcaaacgcggctccgaggtcttctctgtcagcgtacagcggaactgcgagcaccgacatggtagtcagcattgccgcagtgagtatgatgaggcctattcctataagcaccagaataccgcccgcaggaagggtcaggaggccgataccgattggtatcattgaaacgacgatgaaaaccagcccgatgaacccgtagaagaggtttatcaagagtacgcctgggaagtgcagtatgctctccctgataagctctaccagacttacctcgcttccttctccatacacgagggcgcctttgacgattccatactggaacagagagccgaggagcaggagaataacgaagagctttccaaggttctccattgaacccattatatccgagacctgttcctctgaaagtccgtgctcctccattatgacgtttccctgggttgtggatgtttggttttcgagaacgctgaagtccgctggtgccagataggcctgaaatggagcggccagcagggccagaaggagagctaggatgtagagcttcttcgcgcgcgtgatgagagtgatcgttctggagaatgcctcaaatgcgcccataccaccaccgatgggagtaatagagaagacttaaaaatcttttgaagacccagaaaagcttataaacgaactacccgaagtggcgttgggttcataagctaattgaggtgagtgtaatggctatctggcagggaagatcactcaagaaaccctcaggtggtaggatcatcctcgcgaggaagaagaggaagagggagctcggaagggagccggccaacaccaaggtcggcgaggacagggagaagaggaagatcatcaggacttacggcggcaacaggaaggttcgcctcgttgaggccctctacgccaacgtcttcgagggtggaaagggcaagaaggtcaagatactcaacgtcgtcgagaacccggccaacaggcagtacgcgaggagaaacatcatcaccaagggtgcaataatagagactgagattggaaaggccatcgttaccagcaggccgggccaggacggggtcgttaacgccgtcctcatcaaggaagagaacgcctgaactcttttttcttccctctgtattctgaggctttcgtgttttctgtttgcatctgttgttggctgtcgtgaaaagaattcgtgaatcaaaaaactaaagaaactgatgaaaggaaactaaaacgcttcctctctgaactttctcagctccttttccatgatctttctggcgaactcttcagccttgggcttcactatctcgatgaccctcttcttgagctcgtcgagaccttcgcctgtaagggcggatatcctgaggggttcaagtcccttggatttaacaaactcctcgatcgttttcatcttctcctcgtcggctatgtcggccttgttgaggacgacgatgaacgggaactctccgaactctgagtatatctcctcgaacagatgcatctgctcctctatcgggaagccacagtactcactcgggtcgaagatgtagacgataacgtctccgagatgtttcaaagcgaggattgcctgcttttcaacctcgttcctttcgcttagaggtctgtcaagtagtcccggcgtatctattacctggtacttgaggtagtgctcctcgaactggccgacgtttattcccttggtggtgaacggatagcttgccacctctggcttcgcatttgtcagcgccctcaaaagggtgctcttgccgacgttgggatggccggctataaccacagttggaagctcaaggtcaaccacgggaagctccttcagaacgtcccttgccctgttgaggtactcaaggtcgtcgccaatgtccttaagtatgtccgccactctgccgtagaactgcctcctgagcttggctatctcgattgggtctctctcgtagcgtatcttctccacgtacctctgctctaggtttcttatcgtctttatggcccagttgaccctcgccagcgagcggtggaactggtcgcggtcgacaagggtatcaacgagctcccggtagaacttcggcagggtggatactccaggtgttctgtcgagtatcttcctgaggttgtcccttaccacgttggagacggttctgactctcagctcctccctctgacgggctttggcaactttccctccctgaggggtgaatgcagaagcggccttctcggccctcctgaaggccttgtcgatgagttcatcagcggtaaggactgttggcatcttctcaaacgggttcttcatggtctcacctcaacgtatttctcgcgggagaagagttttcggctgggtttaaaaaggtgcctgacctggaagtatattttcagattcagtttggggctgggtactccgcctctaaccgtaaggttcataggtacaaagtgtctaaaatatccttgaatgtccttcgggtgtatggctatgtttcagggtatagcggacgcactgctttcgggaatcctggcagcacttacgtcgtggcttcccatgtccccagagggaagctttggtcgccttatagacggtgtgattagttatactgcctttcttgtgcccgcttatgctggcattatgttctctgtgctctaccgctatagggaaaggctatccaaggagccattgatggcccttcggggcgctgagacatcggagctccagtactttgtactcgggtttctcttaaccctcctgcttggccttcccttggcgaagccgttaacggctcataatgctgccttcgatgtcttcaatttgatcttggcgttcttaataacattcttcggcttgacatggccaggacttaccgttcttaaaggtgcggaggacaggataccctccaaaccgagttttcttgatgcagtgcttgctggagtgttccagagtttctcctccacaggtggagcctcaaggacaggactcgtgacactggctctcgtccttcctggacacaaagcggagaacgtgcttgaatgggggtttttgattgctcctgcttaccacctaataaggctgctttaccttggtgcctacgagggagacactctcttgggctttatcactgctgttacggcgttttttgttagccttgggattatggaagttttggtaaggacagcacaacatcttggaacgaggaggtttttaacgctctttggactaataggggtgttgttaaatctgggggtgctgatatgaagggtgtaatactcgccgctggtaaaggggaaagactgaggccgctgactgatgacaggccaaaggtcgttctaaaagtggcaaacaggccgataatagagtacgtgcttgagaatctcgacccgtttgtggatgagttcgtgataatagtcaggtatcagaaggagaagctgatcgaggttctcggcgatgagttcaacggcaagccaataacgtacgttgaacagcttcctggggatgggaccgcaaaggctatagagagcgcgagggagcacgttggagatgaggagttcatagtggccaacggggacatatacttcgaggaagagggtgttagggagcttgttgctgtttttaggagagaaaaggccgatgcggctcttctcgttaagcattttgaagacctaagccactttggaaagatcgaggttgagggaagtctcgtcaagagggttaccgaaaagcccggaaaagtccccggttatgcaaacctcggagtgtatatctttaagccggaagttttcgggttcattgaacgcactcccctgagcgagaggggtgagtacgagattacggataccataaacctaatgattgaagccggaaagaaggttgcctacgccgcttattccggctactggaacgacattggaagaccctggaacctccttgagctgaacgagtacctcctaaagaccaagctgaagcacgaagtcaggggcaccgttgaagagggcgcggtcctcataccgcccgttgagataggtgagggtacagtcataaggagcggtgcctatataattgggcctgtgaagattgggaagaactcacgcatcgggccgaactgcttcataaggccctacactagcattggcgacaactgccacgtgggaaacgccgtcgaggtgaagaattccataataatggacaactccaacgcgccgcacctgaactacgttggggactcaattataggggaaaactgcaacctcggagcgggaaccataaccgccaacctgagacacgacaggggcaacatcaaggtggaaataaagggaaagcttgaagacagtggcaggcacaagctcggagcaatcatcggccacaacgtcaagacgggcataaacgttacaatctacccgggcaggaagatagggagcggctcccttattgggccgggagttatagttgataagaacgtacctccgaggactctcgtagttgtaaaacaggaaaaggtggtgaaggagttatgaacgctctttatgaccttattatcccaatcctcaattttatctcgcgatgggcgctgtttatagcctccacataccaggccaaaaagacccgggagaaaggctgggtactgctgtcggctg

SEQ ID NO: 1087 - DNA, 2089378 bp, Thermococcus kodakaraensis KOD1 (residues 1,044,690-2,089,378 of 2,089,378)
  CDS (5371)..(6090): Predicted hydrolases of the HAD superfamily
  CDS (6094)..(6459): Uncharacterized ACR
  CDS (9352)..(10377): TPR-repeat-containing proteins
  CDS (10414)..(11214): DNA repair photolyase
  CDS (12967)..(13179): Ribosomal protein S17E
  CDS (17779)..(18600): Sugar kinases
  CDS (22600)..(23907): Predicted sugar nucleotidyltransferases
  CDS (23950)..(25098): Myo-inositol-1-phosphate synthase
  CDS (25771)..(26412): Orotidine-5'-phosphate decarboxylase
  CDS (26932)..(27381): Cytidylyltransferase COG0615 TagD
  CDS (30229)..(30636): Uncharacterized ACR
  CDS (39907)..(40272): Predicted transcriptional regulator
  CDS (40279)..(41058): Zn-dependent protease with chaperone function
  CDS (41065)..(41601): Deoxycytidylate deaminase
  CDS (45175)..(46368): ATP-dependent 26S proteasome regulatory subunit
  CDS (48562)..(49062): TPR-repeat-containing proteins
  CDS (59284)..(59895): Dolichol kinase
  CDS (68302)..(68943): Predicted Zn-dependent hydrolases of the beta-lactamase fold
  CDS (68953)..(69615): RecA/RadA recombinase
  CDS (72814)..(73746): Molybdenum cofactor biosynthesis enzyme
  CDS (73810)..(74853): ABC-type transport system involved in multi-copper enzyme maturat ion
  CDS (76864)..(77067): Predicted ATPase of the AAA superfamily
  CDS (84802)..(85158): Transcriptional regulator
  CDS (89665)..(92316): ATPase involved in DNA repair
  CDS (96055)..(97200): Deoxyguanosine/deoxyadenosine kinase
  CDS (98677)..(99666): ATPase components of various ABC-type transport systems
  CDS (103654)..(105009): Uncharacterized ACR
  CDS (107500)..(108432): Aspartate carbamoyltransferase
  CDS (108436)..(108894): Aspartate carbamoyltransferase regulatory subunit
  CDS (109609)..(110412): Uncharacterized ATPases of the PP-loop superfamily
  CDS (111979)..(112407)
  CDS (123688)..(127467): Pseudouridylate synthases
  CDS (129169)..(129381): Chromosome segregation ATPases
  CDS (137503)..(139590): Archaeal serine proteases
  CDS (143029)..(143385): Beta-glucosidase-related glycosidases
  CDS (144802)..(146760): Aldehyde:ferredoxin oxidoreductase
  CDS (150073)..(151413): Protoporphyrinogen oxidase
  CDS (151543)..(152490): Carbamate kinase
  CDS (152728)..(153633): Uncharacterized archaeal coiled-coil domain
  CDS (153643)..(155349): Queuine tRNA-ribosyltransferases
  CDS (156142)..(156450): Phenylalanyl-tRNA synthetase alpha subunit
  CDS (158887)..(160341): Lysyl-tRNA synthetase class II
  CDS (165061)..(165411): Predicted transcriptional regulators
  CDS (168988)..(170685): ATP-dependent DNA ligase
  CDS (171499)..(172068): Orotate phosphoribosyltransferase
  CDS (175789)..(176457): Ribulose-5-phosphate 4-epimerase and related epimerases and aldol ases
  CDS (179917)..(181251): Acyl-CoA synthetase (NDP forming)
  CDS (181312)..(182289): Metal-dependent proteases with possible chaperone activity
  CDS (188497)..(189207): Dinucleotide-utilizing enzymes involved in molybdopterin and thia mine biosynthesis family 2
  CDS (190123)..(190548): Molybdopterin converting factor
  CDS (201160)..(201834): Deoxyribose-phosphate aldolase
  CDS (207106)..(207588): Uncharacterized protein sharing a conserved domain with thiamine biosynthesis protein ThiI
  CDS (207619)..(208107): Uncharacterized ACR
  CDS (225592)..(226476): 2-polyprenylphenol hydroxylase and related flavodoxin oxidoreduct ases~ COG0543 UbiB
  CDS (227278)..(228564): Coenzyme F420-reducing hydrogenase
  CDS (228637)..(228822)
  CDS (229237)..(229683): Ni
  CDS (229771)..(229998): Uncharacterized ArCR
  CDS (235636)..(235941): ATP-dependent Lon protease
  CDS (241267)..(242187): ABC-type transport system involved in multi-copper enzyme maturat ion
  CDS (242194)..(243111): ABC-type multidrug transport system
  CDS (243436)..(244137): Predicted Ser/Thr protein kinase
  CDS (249532)..(250863): Predicted membrane protein
  CDS (250870)..(252270): Uncharacterized ACR
  CDS (255220)..(255672): Predicted transcriptional regulators
  CDS (269602)..(269808): Uncharacterized BCR
  CDS (282721)..(283467): ATPases involved in chromosome partitioning
  CDS (283525)..(283857): Superfamily II DNA and RNA helicases COG0513 SrmB
  CDS (286015)..(287133): Hydrogenase maturation factor
  CDS (291262)..(291504)
  CDS (291817)..(292143): Predicted nucleotidyltransferases
  CDS (307759)..(309399): Archaeal/vacuolar-type H+-ATPase subunit C
  CDS (312838)..(313305)
  CDS (314233)..(314889): Phosphate transport regulator (distant homolog of PhoU)
  CDS (314893)..(315807): Phosphoglycerate dehydrogenase and related dehydrogenases
  CDS (316075)..(316725): Tartrate dehydratase alpha subunit/Fumarate hydratase class I
  CDS (321109)..(321459): Uncharacterized protein involved in chromosome partitioning
  misc_feature (321437)..(321437): n is a or c or g or t.
  CDS (321493)..(322299): Uncharacterized ArCR
  CDS (324769)..(325242): Transcriptional regulators
  CDS (325885)..(326535): Chromosome segregation ATPases
  CDS (330643)..(331884): GTPases - translation elongation factors COG0050 TufB
  CDS (331918)..(332349): Uncharacterized proteins of PilT N-term./Vapc superfamily
  CDS (334087)..(335910): Transcription-repair coupling factor - superfamily II helicase CO G1197 Mfd
  CDS (345421)..(345684): DNA-directed RNA polymerase specialized sigma subunits
  CDS (348829)..(349443): Carbamoylphosphate synthase small subunit COG0505 CarA
  CDS (349873)..(350601): Chromate transport protein ChrA
  CDS (351955)..(352485): ABC-type transport system involved in cytochrome c biogenesis
  CDS (378664)..(381210): RecA/RadA recombinase
  CDS (404800)..(405810): Aminopeptidase N
  CDS (405883)..(406560): 2-keto-4-pentenoate hydratase/2-oxohepta-3-ene-1
  CDS (414379)..(415413): ABC-type dipeptide/oligopeptide/nickel transport systems
  CDS (416692)..(416736)
  CDS (416833)..(417522): ABC-type transport systems
  CDS (436687)..(438186): Zn-dependent carboxypeptidases
  CDS (449623)..(450708): Uncharacterized ACR
  CDS (453013)..(454329): Beta-glucosidase/6-phospho-beta-glucosidase/beta- galactosidase
  CDS (461764)..(462369): DNA-directed RNA polymerase beta subunit/140 kD subunit (split ge ne in Mjan
  CDS (468151)..(470115): Alpha-amylase/alpha-mannosidase
  CDS (479188)..(480147): ABC-type dipeptide/oligopeptide/nickel transport system
  CDS (481693)..(482466): NAD synthase
  CDS (482476)..(483339): Permeases of the drug/metabolite transporter (DMT) superfamily CO G0697 RhaT
  CDS (494494)..(495696): Predicted SAM-dependent methyltransferases
  CDS (523606)..(524418): Uncharacterized proteins
  misc_feature (527833)..(527833): n is a or c or g or t.
  misc_feature (527901)..(527901): n is a or c or g or t.
  misc_feature (527978)..(527978): n is a or c or g or t.
  CDS (528367)..(528996): ABC-type dipeptide/oligopeptide/nickel transport systems
  CDS (530044)..(530988): ABC-type dipeptide/oligopeptide/nickel transport systems
  CDS (531940)..(532923): ABC-type dipeptide/oligopeptide/nickel transport system
  CDS (533083)..(533904): Predicted phosphosugar isomerases
  CDS (537370)..(537741): Predicted nucleic acid-binding protein
  CDS (588424)..(589485): Nucleoside-diphosphate-sugar epimerases COG0451 WcaG
  CDS (590872)..(591363): C4-dicarboxylate transporter
  CDS (592162)..(592701): Isopropylmalate/homocitrate/citramalate synthases
  CDS (593818)..(594765): GAF domain-containing proteins
  CDS (596947)..(597156): DNA-directed RNA polymerase subunit E''
  CDS (597640)..(597972): Ribosomal protein S24E
  CDS (600070)..(601125): Predicted methyltransferases
  CDS (606598)..(607329): Predicted transcriptional regulators
  CDS (607597)..(608418): Cysteine synthase
  CDS (620359)..(620880): Conserved protein/domain typically associated with flavoprotein o xygenases
  CDS (621769)..(622779): Fe-S oxidoreductases
  CDS (627652)..(628035): Excinuclease ATPase subunit
  CDS (630862)..(631005)
  CDS (642634)..(642957): Uncharacterized ACR
  CDS (647194)..(647490): Phosphoserine aminotransferase COG1932 SerC
  CDS (649396)..(650106): Uncharacterized ACR
  CDS (650851)..(651609): RNase PH
  CDS (668455)..(668928): NADH:ubiquinone oxidoreductase 24 kD subunit
  CDS (670720)..(673578): NADPH-dependent glutamate synthase beta chain and related oxidore ductases COG0493 GltD
  CDS (701800)..(703317): Predicted membrane protein
  CDS (708094)..(708846): Uncharacterized ACR
  CDS (723913)..(725406): Uncharacterized FAD-dependent dehydrogenases
  CDS (732976)..(733557): Predicted ATPases involved in pili and flagella biosynthesis
  CDS (740890)..(741930): Ribosomal protein L3
  CDS (745972)..(746325): Ribosomal protein S17
  CDS (746329)..(746754): Ribosomal protein L14
  CDS (748429)..(748599): Ribosomal protein S14
  CDS (749005)..(749568): Ribosomal protein L6
  CDS (750424)..(751038): Ribosomal protein L18
  CDS (752233)..(752679): Ribosomal protein L15
  CDS (754828)..(755358): Uncharacterized membrane protein
  CDS (756625)..(757335): Dehydrogenases with different specificities (related to short-cha in alcohol dehydrogenases) COG1028 FabG
  CDS (757813)..(758838): Pseudouridine synthase
  CDS (764551)..(765576): Enolase
  CDS (769300)..(769758): Transcriptional regulators
  CDS (773227)..(773337)
  CDS (780325)..(781389): Threonine synthase
  CDS (782656)..(783132): Uncharacterized ACR
  CDS (784924)..(785688): Predicted nucleotide-utilizing enzyme related to molybdopterin-bi osynthesis enzyme MoeA
  CDS (785761)..(786447): Aspartate racemase
  CDS (806344)..(806994): Uncharacterized ACR
  CDS (812689)..(813258): Uncharacterized ArCR
  CDS (827122)..(829149): Uncharacterized ACR
  CDS (832942)..(833796): Glutamate dehydrogenase/leucine dehydrogenase
  CDS (837817)..(838185): Sulfate permease and related transporters (MFS superfamily)
  CDS (843253)..(844374): Cell division GTPase
  CDS (844405)..(844590): Protein translocase subunit Sss1
  CDS (846364)..(847395): Ribosomal protein L10
  CDS (848482)..(848577)
  CDS (851002)..(851403): Small primase-like proteins (Toprim domain)
  CDS (861676)..(862302): Thymidylate kinase
  CDS (867865)..(868638): Glycerophosphoryl diester phosphodiesterase
  CDS (873517)..(874128): Predicted dehydrogenase
  CDS (876274)..(876618): NADH dehydrogenase/NADH:ubiquinone oxidoreductase 75 kD subunit ( chain G)
  CDS (890983)..(891249): 3-Methyladenine DNA glycosylase
  CDS (891262)..(891519): SH3 domain protein
  CDS (892048)..(892257): ABC-type Fe3+-siderophores transport systems
  CDS (900472)..(901128): DNA gyrase (topoisomerase II) A subunit
  CDS (902854)..(903114)
  CDS (907462)..(907659): Predicted transcriptional regulators
  CDS (908017)..(908775): ABC-type multidrug transport system
  CDS (915742)..(916356): NADH:flavin oxidoreductases
  CDS (917473)..(918357): 2-polyprenylphenol hydroxylase and related flavodoxin oxidoreduct ases~ COG0543 UbiB
  CDS (919906)..(920700): 4-hydroxybenzoate polyprenyltransferase
  CDS (929824)..(931017): RecA-superfamily ATPases implicated in signal transduction
  CDS (933379)..(933912): Nucleoside diphosphate kinase
  CDS (951637)..(954123): Uncharacterized membrane protein
  CDS (954253)..(956634): Phosphoenolpyruvate synthase/pyruvate phosphate dikinase
  CDS (956719)..(956946): Regulators of stationary/sporulation gene expression
  CDS (956956)..(957372): Predicted nucleic acid-binding protein
  CDS (960406)..(960843): Uracil phosphoribosyltransferase
  misc_feature (960838)..(960839): n is a or c or g or t.
  misc_feature (960860)..(960861): n is a or c or g or t.
  misc_feature (960872)..(960873): n is a or c or g or t.
  misc_feature (960879)..(960879): n is a or c or g or t.
  CDS (960883)..(961116): Uracil phosphoribosyltransferase
  misc_feature (960890)..(960890): n is a or c or g or t.
  CDS (964264)..(964809): Putative intracellular protease/amidase
  CDS (965632)..(966861): Molybdopterin biosynthesis enzyme
  CDS (969640)..(971292): Predicted metal-dependent RNase
  CDS (982114)..(982692): Predicted transcriptional regulator with C-terminal CBS domains
  CDS (986197)..(986592): Predicted transcriptional regulators
  CDS (987052)..(987510): Transcriptional regulators
  CDS (987868)..(988305): Predicted membrane protein
  CDS (999739)..(999894): Fructose/tagatose bisphosphate aldolase
  CDS (999994)..(1000563): Uncharacterized ArCR
  CDS (1013518)..(1014018): Predicted regulator of amino acid metabolism (contains the ACT do main)
  CDS (1014784)..(1015038): Multisubunit Na+/H+ antiporter
  CDS (1015690)..(1016418): Multisubunit Na+/H+ antiporter
  CDS (1018240)..(1020090): Formate hydrogenlyase subunit 3/Multisubunit Na+/H+ antiporter
  CDS (1020091)..(1020984): Formate hydrogenlyase subunit 4
  CDS (1021567)..(1022163): NADH:ubiquinone oxidoreductase 27 kD subunit
  CDS (1023355)..(1024008): Formate hydrogenlyase subunit 6/NADH:ubiquinone oxidoreductase 23 kD subunit (chain I)
  CDS (1024378)..(1024722)
  CDS (1037383)..(1037670): Uncharacterized ArCR
  CDS (1038103)..(1039782): CTP synthase (UTP-ammonia lyase)
  CDS (1040617)..(1040694)
  CDS (1049674)..(1051152): Trk-type K+ transport systems
  CDS (1058428)..(1059102): Nuclease subunit of the excinuclease complex
  CDS (1059310)..(1059861): Type I restriction-modification system methyltransferase subunit
  CDS (1064593)..(1065597): Periplasmic serine proteases (ClpP class) COG0616 SppA
  CDS (1065598)..(1066077): Predicted Zn-dependent proteases and their inactivated homologs
  CDS (1074967)..(1075383): Flagellar hook capping protein
  CDS (1092820)..(1093500): ATPases of the AAA+ class
  CDS (1100995)..(1101861): Pyruvate:ferredoxin oxidoreductase and related 2-oxoacid:ferredox in oxidoreductases
  CDS (1102132)..(1102527): Uncharacterized ACR
  CDS (1103026)..(1104174): Pyruvate:ferredoxin oxidoreductase and related 2-oxoacid:ferredox in oxidoreductases
  CDS (1106425)..(1106898): Uncharacterized ACR
  CDS (1112575)..(1113144): Thermophilic glucose-6-phosphate isomerase and related metalloenz ymes COG2140 -
  CDS (1114606)..(1116012): Mannose-1-phosphate guanylyltransferase
  CDS (1123948)..(1124547): ATPase involved in DNA repair
  CDS (1125574)..(1126785): PLP-dependent aminotransferases
  CDS (1128049)..(1131738): Topoisomerase IA
  CDS (1139716)..(1141299): DNA-directed RNA polymerase beta' subunit/160 kD subunit (split g ene in archaea and Syn)
  CDS (1143637)..(1143945): Ribosomal protein L30E
  CDS (1144384)..(1144836): Ribosomal protein S12
  CDS (1145833)..(1146021): Orotate phosphoribosyltransferase
  CDS (1154986)..(1155459): Uncharacterized ACR
  CDS (1170673)..(1170723)
  CDS (1181161)..(1181403): Uncharacterized ACR
  CDS (1186804)..(1187682): Putative transcription activator
  CDS (1193281)..(1193703): Acylphosphatases
  CDS (1202200)..(1202811)
  CDS (1202839)..(1203684)
  CDS (1210720)..(1211169): Predicted prefoldin
  CDS (1224559)..(1225257): Biotin-(acetyl-CoA carboxylase) ligase
  CDS (1225357)..(1226649): Na+/H+-dicarboxylate symporters
  CDS (1226833)..(1228245): ABC-type dipeptide/oligopeptide/nickel transport systems
  CDS (1228294)..(1228974): Predicted metal-dependent hydrolases related to alanyl-tRNA synth etase HxxxH domain
  CDS (1237495)..(1237560)
  CDS (1238053)..(1238244): Ribosomal protein L37E
  CDS (1243726)..(1244781): Xaa-Pro aminopeptidase
  CDS (1245319)..(1246392): Predicted RNA-binding proteins
  misc_feature (1250239)..(1250239): n is a or c or g or t.
  CDS (1259650)..(1260393): GTPases
  CDS (1266808)..(1268232): Acyl-CoA synthetase (NDP forming)
  CDS (1278112)..(1278531): Predicted transposase
  CDS (1298320)..(1298940): Translin (RNA-binding protein
  misc_feature (1302432)..(1302434): n is a or c or g or t.
  misc_feature (1302471)..(1302471): n is a or c or g or t.
  misc_feature (1302488)..(1302488): n is a or c or g or t.
  CDS (1317571)..(1318095): Cation transport ATPases
  CDS (1331749)..(1332420): Predicted amidohydrolase
  CDS (1338664)..(1339170): Predicted ATPases of PP-loop superfamily
  CDS (1339501)..(1339938): Uncharacterized ACR
  CDS (1341025)..(1341612): GTP:adenosylcobinamide-phosphate guanylyltransferase
  CDS (1344775)..(1345791): NaMN:DMB phosphoribosyltransferase
  CDS (1348855)..(1349691): Aldo/keto reductases
  CDS (1359592)..(1360296): Transcriptional regulators
  CDS (1365064)..(1366236)
  CDS (1366897)..(1367034): Exoribonucleases
  CDS (1372951)..(1373835): Pyruvate:ferredoxin oxidoreductase and related 2-oxoacid:ferredox in oxidoreductases
  CDS (1373908)..(1374354): Peroxiredoxin
  CDS (1384129)..(1385541): Dolichyl-phosphate-mannose--protein O-mannosyl transferase PMT1
  CDS (1388374)..(1389150): Predicted serine/threonine protein kinases
  CDS (1389868)..(1391577): DNA topoisomerase VI
  CDS (1392724)..(1393968): Uncharacterized ArCR
  CDS (1396558)..(1397991): Periplasmic serine proteases (ClpP class) COG0616 SppA
  CDS (1398025)..(1398828): Uncharacterized ACR
  CDS (1398865)..(1399062): Dihydrolipoamide acyltransferases
  CDS (1401745)..(1402515): Archaeal fructose-1
  CDS (1411228)..(1412076): Integrase
  CDS (1446280)..(1446867): Molybdopterin-guanine dinucleotide biosynthesis protein A
  CDS (1448197)..(1448985): ABC-type cobalt transport system
  CDS (1450378)..(1451244): Predicted membrane proteins
  CDS (1457539)..(1458357): Iron-regulated ABC transporter ATPase subunit SufC
  CDS (1460389)..(1461546): Uncharacterized proteins of WD40-like repeat family
  CDS (1464868)..(1465077): Putative protein-S-isoprenylcysteine methyltransferase
  CDS (1469032)..(1469262): Protein
  CDS (1469263)..(1469490): Protein
  CDS (1472752)..(1473261): Uncharacterized ACR
  CDS (1480753)..(1481700): Fe-S oxidoreductases
  CDS (1483972)..(1485402): Predicted Zn-dependent proteases and their inactivated homologs
  CDS (1486807)..(1487466): Predicted DNA binding domain
  CDS (1488379)..(1488420)
  CDS (1488433)..(1489284): ABC-type multidrug transport system
  CDS (1491580)..(1491858): Fatty acid/phospholipid biosynthesis enzyme
  CDS (1494583)..(1494639)
  CDS (1498339)..(1499349): Lactate dehydrogenase and related dehydrogenases COG1052 LdhA
  CDS (1499410)..(1501158): MutS-like ATPases involved in mismatch repair
  CDS (1501711)..(1501995): Aspartate/aromatic aminotransferase
  CDS (1504150)..(1505796): Chaperonin GroEL (HSP60 family)
  CDS (1514722)..(1517229): ATPases of the AAA+ class
  CDS (1517308)..(1517643): Uncharacterized ACR
  CDS (1518649)..(1519206): Uncharacterized protein involved in cation transport
  CDS (1520866)..(1521513): Predicted phosphoribosyltransferases
  CDS (1521592)..(1521822): Uncharacterized stress-induced protein
  CDS (1524067)..(1525068): ABC-type Mn/Zn transport system
  CDS (1531273)..(1532499): Predicted transposases
  CDS (1552507)..(1552560)
  CDS (1552684)..(1554012): Methyl-accepting chemotaxis protein
  CDS (1556848)..(1557255): Acetolactate synthase
  CDS (1563793)..(1563981): Predicted nucleic acid-binding protein
  CDS (1564336)..(1564650): Uncharacterized protein involved in cysteine biosynthesis
  CDS (1570618)..(1571100): Predicted hydrolase of alkaline phosphatase superfamily
  CDS (1571575)..(1572375): Chromosome segregation ATPases
  CDS (1574155)..(1574535): Uncharacterized proteins of the AP superfamily
  CDS (1578499)..(1579215): Uncharacterized ACR
  CDS (1582714)..(1583136): Thymidine phosphorylase
  CDS (1586914)..(1587720): DNA polymerase III beta subunit
  CDS (1588126)..(1588440): rRNA methylases
  CDS (1598734)..(1599861): Tyrosyl-tRNA synthetase
  CDS (1600399)..(1602897): Specific archaeal helicases
  CDS (1609216)..(1609749): CBS domains
  CDS (1624957)..(1625112): Ribosomal protein L23
  CDS (1639084)..(1640433): Predicted hydrolase of the alpha/beta superfamily
  CDS (1640479)..(1643181): Distinct helicase family with a unique C-terminal domain includin g a metal-binding cysteine cluster
  CDS (1648975)..(1649682): Predicted Zn-dependent proteases
  CDS (1652566)..(1653078): Transcriptional regulators
  CDS (1658593)..(1658760): Amidases related to nicotinamidase
  misc_feature (1674836)..(1674836): n is a or c or g or t.
  CDS (1683415)..(1683750): Uncharacterized Zn-finger containing protein
  CDS (1696057)..(1696764): Acyl-CoA synthetase (NDP forming)
  CDS (1697191)..(1697808): Uncharacterized ACR
  CDS (1699246)..(1700322): Uncharacterized ACR
  CDS (1703239)..(1704348): Predicted ATPase of the AAA superfamily
  CDS (1704907)..(1705134): Regulators of stationary/sporulation gene expression
  CDS (1709068)..(1710201): Methyl-accepting chemotaxis protein
  CDS (1713070)..(1713843): Uncharacterized ACR
  CDS (1713844)..(1714545): Predicted transposase
  CDS (1731997)..(1732929): ATP-utilizing enzymes of ATP-grasp superfamily (probably carbolig ases)
  CDS (1742710)..(1742772)
  CDS (1751083)..(1751667): MutS-like ATPases involved in mismatch repair
  CDS (1769527)..(1769571)
  CDS (1770139)..(1771113): Uncharacterized ACR
  CDS (1777753)..(1778361): Nitroreductase
  CDS (1778362)..(1778736): ABC-type thiamine transport system
  CDS (1780492)..(1781067): Thiamine biosynthesis ATP pyrophosphatase
  CDS (1800331)..(1800873): Predicted nucleotidyltransferases
  CDS (1801225)..(1801620): DNA-directed RNA polymerase sigma subunits (sigma70/sigma32)
  CDS (1804279)..(1804965): Allophanate hydrolase subunit 1
  CDS (1806106)..(1806834): Histone acetyltransferase HPA2 and related acetyltransferases COG 0454 WecD
  CDS (1808857)..(1809519): Histidinol phosphatase and related hydrolases of the PHP family C OG1387 HIS2
  CDS (1818100)..(1819077): Uncharacterized ACR
  CDS (1823116)..(1824483): Translation elongation and release factors (GTPases)
  CDS (1830145)..(1830822): Uridylate kinase
  CDS (1834216)..(1834725): Uncharacterized ACR
  CDS (1839772)..(1841181): Aspartate oxidase
  CDS (1848952)..(1849701): Metal-dependent hydrolases of the beta-lactamase superfamily I
  CDS (1854172)..(1854663): 3-isopropylmalate dehydratase small subunit
  CDS (1855789)..(1855950): Uncharacterized paraquat-inducible protein A
  CDS (1858558)..(1859646): PLP-dependent aminotransferases
  CDS (1863574)..(1864488): 3-Deoxy-D-arabino-heptulosonate 7-phosphate (DAHP) synthase
  CDS (1865455)..(1866096): 3-dehydroquinate dehydratase
  CDS (1866526)..(1866906): Shikimate 5-dehydrogenase
  CDS (1867660)..(1868907): 5-enolpyruvylshikimate-3-phosphate synthase
  CDS (1870264)..(1871358): PLP-dependent aminotransferases
  CDS (1891753)..(1892346): Acetyltransferases
  CDS (1892419)..(1893240): Histone acetyltransferase HPA2 and related acetyltransferases COG 0454 WecD
  CDS (1893532)..(1893636)
  CDS (1895020)..(1895226): Acetyltransferases
  CDS (1897579)..(1898748)
  CDS (1901425)..(1902267): Nicotinate-nucleotide pyrophosphorylase
  CDS (1903423)..(1904016): Predicted glutamine amidotransferase involved in pyridoxine biosy nthesis
  CDS (1904443)..(1905942): Sugar permeases
  CDS (1906054)..(1908033): Anaerobic dehydrogenases
  CDS (1915393)..(1915482)
  CDS (1917997)..(1918248): Phosphoribosylformylglycinamidine (FGAM) synthase
  CDS (1923985)..(1924980): ATP-utilizing enzymes of ATP-grasp superfamily (probably carbolig ases)
  CDS (1929295)..(1929861): GMP synthase - Glutamine amidotransferase domain
  CDS (1930360)..(1931220): DNA repair photolyase
  CDS (1934626)..(1935891): Protein implicated in ribosomal biogenesis
  CDS (1939681)..(1940085): Predicted nucleic-acid-binding protein containing a Zn-ribbon
  CDS (1945585)..(1946646): ATPase involved in DNA repair
  CDS (1946671)..(1947525): Endonuclease IV
  CDS (1954831)..(1955493): ABC-type multidrug transport system
  CDS (1958224)..(1959228): ABC-type sugar/spermidine/putrescine/iron/thiamine transport syst ems
  CDS (1971136)..(1971903): Predicted membrane protein
  CDS (1972744)..(1972896): Predicted nucleic-acid-binding protein containing a Zn-ribbon
  CDS (1976359)..(1977735): Acyl-CoA synthetase (NDP forming)
  CDS (1987645)..(1988154): Histone acetyltransferase HPA2 and related acetyltransferases COG 0454 WecD
  CDS (1988173)..(1988463): Uncharacterized ACR
  CDS (1998322)..(1998795): Histone acetyltransferase HPA2 and related acetyltransferases COG 0454 WecD
  CDS (2029510)..(2029674): Dehydrogenases with different specificities (related to short-cha in alcohol dehydrogenases) COG1028 FabG
  CDS (2036773)..(2037315): Uncharacterized ArCR
  CDS (2038819)..(2039100): STAS domain protein
  CDS (2040049)..(2040225)
  CDS (2060044)..(2060787): 5'-nucleotidase/2'
  CDS (2061982)..(2063565): Predicted ATPase involved in replication control
  CDS (2065183)..(2066781): S-adenosylhomocysteine hydrolase
  CDS (2066809)..(2067465): Uncharacterized ACR
  CDS (2081764)..(2081979): DNA-directed RNA polymerase subunit K/omega
  CDS (2082835)..(2083299): Carbamoylphosphate synthase large subunit (split gene in MJ) COG0 458 CarB
cctttttgatagatgctttggacatggagagctatgtgctcgacccacttgggataactttcaaggagaatgcttatctagttgcatcagttgtttcaacctttgccgtggcgatactgttcttgtggggagcgcttcatataaagtatgggaagaccgacttcaaagatgttgcgtacgtggcaatctttgtcgtagtatcttacatatggatattcctagttgcgtctgacattaagctctttgagaatctcacagtggcatattcccttccctatctgatctttgggttgtccatgatatactttggatacgttcttttagaggcaacaatgccaaagtcaatcgagaggctcttcccctacggcctaatccttctgggagccctcaacctcacgtatcctgtgacccggtttattgactggtttgcacccataggtttcctcctgggggcgctgttcaggtttatggctgcggtcggtgcggttaagtacgtcttttatcctatgagggcagtttcagtctctggtgcgagcgaaccaatcaagggctcctttatgttcaagggcaaggaagaggtagttcaggccattggggatgtgtggtcaaggccgggtaccgttattatcaccagggaaaacatcatggacgttatgagtaagattcaccctggatcgctggtgttctgggtgacccgggcaaaagagggcgtcatctccgagactccccaggtttatgccgtgagtccaaccagcatagacatactgacggacctcgtggcaaatgcccttcgaaaaggatacagaacagtttacattgactcggttgagtatctcatcattgagaacggctttgagcggaccatgaagtttctcctaaaccttaaggatatgacgctaaacgccaatggccttatgatactcgtgatcaacgaagaaacgctagatgaaaaacagaaaggaatgatagaaagggagttcgagaccttcaggcaaggccaagcttctcgatgaagcgtttcgcgtaccttacatctttttcaagctcggccttctggaggagctgtctctcaatggccctgagggcgtcgtgaactgcctggatggcaccccaggtctcgcccgtggccacaaaggttcccctgtcggtgacgaccctcatcctggcctggtagaggtgaactcccctgagcttctcagggaagcggcggatgtagaggtagatgatgccctcctgtccaaggagatcctcgtatccatcaacgaagcgttttatgtcctgtattatgcgctccctcgtgaagtcgctgagtattgaagcatcaccgccgagctggaggtagaaccttgcctccttctcggtcatttttgatatcggcaggaggaggtccttgaccgtgaggattccgactaccttgttgtcctcgttgacaacgacaaggccgtcgatgtcgttgtccttcatggttgcgacggcttcccttacggttgcgtcgggcagtatggttatgactccccttatcatgacgtccctgaggggcatgctgaagggcggtatcttctcgcccgcaacctctccagcctgggccctgaagcgcggcttgatgaacctgattatgaggtcgtggagggtaaccagtccctcaagcttgccctcgtcgttgactatgggtatccttgaaatcgcgtggtcgcgcattacagccagggctttggcgacggtgtcgctcggcttgagtgttatgacgtccttggtcatgtactcctcaactttacctttgccgaacttctcctgggcaactctctcaaggacggccatatcgtttacaacgccgattatctcggccttgctctccccaactgggagcgagcggagatcaacctcaatcatgagtttggcggccttgctcagatcctcatcgggcttgataacgggagcgggcttgtaaacgtccctaaccttggccttggttggatcccacttgaggtgggagcgtatgatcaagtcctgggtcaatacacccttgtacaggttcccatcgaacacgagaatgagatcggggtcttccttctcgaagattcctatggcctcagaaagcggggcattgatgtcgatcttctggaagttgtcggtcattacctcttgcacctggattccgaccatgctgtcacctccttttcagttattattagggcggcatatgatataaacctttgctaggccccgtcagaatttaagtaacgttaggttaataaatctttcgcccagcgcccagtgaagagctaaaattttatcatggaattattactttttgtagaattctatgaactctttcggcgtgaggatatagaactcatgtcttccgagcttaaacttcttctctttgttcctgattctcaacaaatgcttacggtcataggttatcagcacgtcggccttagcgttatacacaacgtccagaaacggaatatccttcggatcacggactttctcaagaatagttttagacttctggaatgaacgcttaatttgaaccctttttgataatgccttcattgattgaatataccccttagcttcctcaagggaaatatacctcagcgccttttttgaataaagcttctcttcatattccttgagagtttttgaggaaatgtagtttgttattttccccgtagctaagagttcgagaacctcaaaagcataacctcgagtggagattgcaccagagaataatactgaagtatcaataactactctaagccgagtttctttagttttctttcgattttctcccatttcttgatctcctcctcagcttcataatagagtttaatggcctcttcctcgcttatcttcctctttcccttctgggagagtatgaagtttttagcctcctttttagtcatcctcgtgggtttcattttctttagcttctcccggttagccttccactcataatactcgataagctcttttggtgaaacaccaacggccttcgcaacctcctcaatgagaagttttattccctccgaattcttcacactcacggccatacttaacaccttgagatgtttgggaaatctggattattaacttttctttcatatgcttcctcccttctaactcaatgccatttaaatcctctagtaggtttgagtggtgtttctatagtctcttgaagttgagaaagctgactccttctatcctaaagggcagggttttcaaaagagaaaaagaaaggcggggagcttgagattgtggattttggagaaaatatacctttcggctcaatgactaaaaaagagccgcaaacaagacgtttttacagaaaggctgtgatcgactccacagttataatccaaactttggtagtatctgtttggtcaatagtcaaacttctggtatcgcttaagtttaagaggcctctgctcaatcttactgatatctatctcaccagatttcaccaaatccactaaatctccggcgagagccggatttcaagtgccccacgaattctgagtccattggtcttgtcatcagtactttttatgaccacttttcccaccctctttaccttcgtcttctttctcttaagattaaccccaactatgagttcaactcttaaacctgacgagactaaaaccaactaagtatgtcctaatttcatcgtccattgatccagattttgtgtggcggttcttctttcagagataagggactaaaaaaatttataaagtctctcgcggggagtgttgatggttaagagcgccggggtagcctagcctgggaaggcgcgggactcgagatcccgtgggcgtccgcccaccagggttcaaatccctgccccggcgccattcaagggcctggccctccgggtctttcctcctctatccttaaattcaccaatggctcttctgagggtaaactttcacagggcaggctctcctcagtttggtttgtttaatcctgcatgaaacaaaatatgaaaacagaaaaggtgaattatgtagttatgtaagcaccctccttttctactatgacggtgtgctcgaactgggcaaccatcccaccccggacttccctgaggatcgggtaggcatagatggcgccggccttctcaagctgggccagggcgagtttgagctgtccctcaggtaaaaagtcctggagccagcggtaggcgaagggtaaggtcttgtagttcttctttatgtgcatcaaaagcctcctagcctggagcatcctcacgggtctatcgcggaggtacatgaagatgagcgcgggcggaacctcgatgacctgcccggctccagttgtcgcgaagggctctattgcgaagacgtcgccctcctggaggacgtaggtgtcggcctccctgtagacattgggcacgctgacgcccgcgtggagcttgtagcgctcaaccttgtggccgctcaggttcactattgggttaaagcccttcccccggatggtctcctcaatggctctggcgacgtcccttatcattacccctgctctaaccgttgctatcgcgttttcaagtgcttcccttgccgcttccataagctcatcctcttccattcccaccctaaaagtgacggcagtgtccgcgatgtacccatcaacgtgaacgccaatgtcgagcttcaggtagtccccttcctttagaaccgtcccgtctcctttgtagggggtatagtgtgcggcaatctcgtttattgagaggttgcacgggaaagcaggtttaccgcccagctcaactatccttctctccacgaactccgctatgtcgtagagctttgcaccgggttttatcagatcgactacctctttcttgacctgtcttgcgatctctcctgcctttatgagtgcttctctctcgtccacttttgaccaccaacttccttagtgttaggctgcccttaaaccttacgaaaaaccttttatttccacccccatagtccaggaaggtgagggaatgttagacttcaggaagcacatcaacgtctccgatgacttcttcgtcgttagaaacctcactggatcaatacttgagggtgtgggggtagcttaccttgttcccgcgctgctggtgtgggtctatcccgaggagataaaatatgtgccatacttcgccctgcccggaatggcctcaatcctgttcggggcctggctcagcagacactccagcaagattgaggatgtaaacctcagacaggcgatggttgctgctgcatttacctggctcctcgcttcactcgtcagcgttgtcccctttgtgaagatcgctcacatgcccctgctggattcctattttgaatgtatgagcgcttggacaggcactggtctcaccatgatgagcaacctgcagagctatcccaagatgctgctgttctggagggcctggatgcagtggttaggtggaattggtatagtactggttgccctcaccgtccttattcggccaggtgttgccgcggccaggctctacagggctgaggcaaggagcgagagaatccttccaaacctggtgaacacggccaaggtcatatttgaaatatacctcgtcctgacgcttgttggtgtctacctgtactacatcaacgggatgggcctctttgatgcgctcacacactccatgacaggtcttggcacaggtggtatgagcacccacgacgagagcatagggttcttccacagtccggctataaacgccgtgacgatcttcctcatgataatgggtgccgttaatttcacagtccactacagggtcttcaaggacaggtctctcaaaccgttcttcgcggacattcaggtcaggtacatgttcttcttcctaatccctgcggtttccctcatcgcctatggactagtccaggttggggattccctcgcccaggcgctccaggacgctgttttccatgcggtttcagctataagctgtactggattccagatatccgacctctccaagtatccggaggttggaaagtttctcctggcggtgctgatggttatcggcggcggtgccggaagcactgcgggcggaataaagctgataaggataaccctgatgtacgagagcctcaagtggacgatcgaaagcgccatactcccgaagggcgccgttatcaagagaaaggtcggaaactacgtcttcagtgaggaggatatacaggaggtaatgagctttacgatgacgtacgtcgcgttcttgcttgcgggagtcctctacacaatgcttagagtccacgccaacctcgcggatgctctctttgaggtggcctccgcccagggcaacgtcggtctcagcgttggtataacatccccggcgatgccagctgaccttaagttcgtctacatactcctcatgtggataggcaggcttgagatattctcgacgctcgtgttcataataagcgtgttcttccttctccctagggggctgagaaggtgaacgttctggaggtcaggaacctgcgcttccagtacccgcgctcgaaaaagccggccctcaatggtgtgaatctgtcagttagaaggggggagatggttgggataatcgggccgagcggaagcggaaaatcgacccttgttctgacgttcaacggggtaatcccccactccatcaggggcgatttctctggggaggttctggtcagaaatccctcgactggagaggaattgagaactctggaaacaccagtttctaagctctccacagtggtgggtctcgtgctccagaaccccgaaagccagctgttcaatatgacggtggaggatgaagtggccttcgcccttgaaaacctgggccttccaagggaagagatagaagagagggtcagctgggcgctgagggtcgtcggtctggaaggaaagcgggaggagttcccgccaaacctcagcggtggggagaaacagaggttgggcatagcatcagttctgggcatgaagacgacgattatcgtcatggacgagacaacttctcaggtcgatcctgggggtaagaaagaagtcgagaacgtgatacttaggctgagaaaagagggggtaacggtaataatcgtcgaacacgattaccgcttcctcttcagaaacgcagacagaatagttgtgctcaaggacggaagagtgtttttagagggcacgcctagggaagtcgccagaagggtcggggaacttttggggcttggaattaaactgccgcactcccttatactctcccaccgtcttggccttccgccgcttctttctccagaggagtttcagccgagagtaactcaccaacgctgagcggttcgcccattatctcgtgtttaaggtcgtgaagcttcagcatcagctcaaatctggtttcaggatcttctattctttccgctatctttatcgctgactctatgaactggagcgctttccccctatcgcggttctcctcaagctgtgccaggtgcatcagcgcaacggccctgtggaagttgctcgttatgtggcttattattgcaagcgccttttcgatgtctcccctctcgtagaacacctccgccagatatgacaggacaacgtctagcttttccgggtcttttacgaatttcattgcgtaggcagccttttggagaagacctgccttaatcagggaaaagagaatgtccctcagtatgtctggatgctgaagggcaaggtttatcgcggtctttaatgtgaaatccccttcaagctcggagccagcgaggtaaaacccaatggaaatctcccctagaaggagggcgcggtagcgctcattttttatcccgttgatgtgagggaggagctgttttatgaggggaagtgccctgaatgattgaccatctcctttctccagcatctgggttatctttcttaaaatcagccgtaccgctatgacaaggttctgctctttctttagttcttcaagaagggcaattgccccgggtatgtcgtccactaggagcctgtcttctatctccgtgagtacctccgtgtctggccgtccaccaataaaagaaccaaagaactcgtcaagcttccccatttgctccctccttttccagcagaagttccagataggatctgcgttcgaacctctcaacgccgagttcagtcagtattgccctcaacttgtctataagctgtggaacgtcttcagttctgtccgtcatcgcctctatctgtataaacttcccaagccccgcaacctcgtccagggctattattatccctttctcgacgtagtacttctccctcaccttggaaaccgtgagaacctccacgaatccaaggctttctaatatctcagcgtgtttgtcgggatcgctgagcgggacttcgatttccttccgtgtttttgaatgctcatcaatttttggacccttgtatgtcataaaggcctcaaagtggccgttaaaccgccttattctgattctaagtgcctcatcggtctccgaaaagtccctgcacgggtgctgatagtaggtatcctcgtggtactccttccttatgaactcgaactcgtcccgtaccctctggaagatttcatcactggcgtatcccttcagttctacctctatcacaaaaccacctccagattcctcaagagtttccgctcacagtttgggcagtagtaggggagtttgatatccgtatcatcgaccgagtttgagaagtgcataacacagcggacgtttggacagtgagaaagcccaaaaacgtggccgagctcgtgcatgacttcctttacagtcctctctatgaggagctcgtcgttgcttggccttccatagaactcgggccttagccggtggattgaaacaacggcactcctcaacttttcactggctacaccaaagacgaagttcatgcccttttcgtagaggtcaacctttgtgatgcccactgtggccagcgctcctgctctccttccaatctcggaaagcgtgggtagaaacgcaccacctaggaactgacgccggaatggatgatacgctgatagaaacaggctctcgcttagggaatcgccagctttaacggaaactccccttcgtgagtagtaggaatccacgaattcagccacatcctttatgagccattccgggatgtagccgatggggactatgagtatcacgcgcacacccaaaaagagattaagaaaaggttgaaataaaccttttgctcatggggttaggtccatcggcctgagctcctcgaggaagtgcttggcgaactttatggtaaggtcgatgtccctgaggtcggccgtttcgacctggctgtgcatgtaccttatcggtatgctgagaactgcagttgccacgccctccctgttgatctgcattatgttggcgtcggttcccgtcggcctcgggcttgcctcgacctggagcgggatgtcgtacttcttggcgacttcatcggcgaagcgcctgaccttggggtggatgttggggccgacctcgtccataactggcccgccgccgagctttggaacgatcttgcccttgtcgccgacctgcttggcgaaggttacgtccatcgctatgccgatctccgggtctattgcgtagctagcgacgcgcgctcccctcagcccgacctcctcctggactgatgcgacgaagtatatgtccgcctcgtggttctcaagtgccctggcagcctcgatcatggcgtagaggcagacgcggtcgtcaaggtagggggtggctatcctgttctcggtgagcttggtgaaggctggtgcgaactcgccgacggttccaacgcggaagcccatttcctctgcctcttccttgctgtctgcaccgacatcaaccactatggtgtcccagtcggcggccttctttctgtcctcaggcttctggaggtggggtgggatgtgtccgacgacaccgtagcgctcgcccttgtcggtgaagaaccttatcctctgggccacgagcgtcctcgggtcaactccccctatcgggacgacgtggaggtagccttcattgtcaatgtggtttaccatgaggccgatcttgtccatatgggccgctaccatgacctttggcccgttccccttcttgtgggctatgacgttgccgagcttgtcgacctttatctcgtccacgtagtccttcagtgcctctattacgacgtcccttatgccgaggaactcaaatccagaaacgccaggggcttcaacaaccctcttgagcaactctatgtcaaccatctcaatcgcctcctttagatgtccgtctaaatgttttcgaatttcttaataagctttgctgccaaaaatagggaaaagaaaatttcagcccagaatggcctgaagataggcctcctccccgggttcaaggtcaagctcccaggttattccgtcgtcattcagcgtcgctttacccttagtgacccgaacctctaccgctttcacaggcctctcgagtttgtagtcctttaggggtctaaggcgcggtgcacggacttttacgaagtagtacctgtcgagggtctcctcgtggactgtgggcattgcaagcgcgaagtaagaggtcgcagctagcagaatgcctgatattacgagaattaaggccgtctctgtactaattcccgactttttggagggttctgagctggttgggggatactgggtagtcgtagtggttggaatagttgtcatcgtgtttgaggttttgggcgtcgtggttgatgttttcgttggtgagggagggctgacagtggtgatgattgtctcggcgggaagatacgatgcgctttcagccttcacaattagtgtcccatagccaacctttgaaaggttgaagagtgcaaagccagtggagttcgttattccaaagtccttccctttggggccctccacagttaccgtgacgttgggaacctctttctttccatcggtgacctgaactatcagcctctccccttcctggatgctgcttatgtggagggactttacgaccagttcttttgaaacgatttttccatcaaggttcaatgtgacccgatatactccaggcgtgctcacggagtatgtcaccgcaccgttggggtcagtttttagttctactccgtttacagtgacagtgatatctggaactccccttccggaacggtcgtagacaaaaatccggattgcaccgtgctcaaagctgattgagtagtttagcgccctcctatagacttcaaaattctttgaaacttccttgtagactccgctcatgttcgcccagagcaccacagtgtagtttccgagcggcagtgttttgaactccagcttcttttcccagggggagtcgggctttacataagttatcgtggtctggttaattattgtcctgttcccaactaggtagtatcctattctcccagatatcacagtgtttgactttgaagtcagggtcaggtagatttccactgacctgccgtagatgtatctatcctgggccgttatagtcaggtcgtagtcgatgagcgccttgacggtaactataaccggggcctcaaagtactggtccccaacgcgagctataatgcgaaggagatactgcccaggttcctggttcagaactttcagaattagggtatcgttgtaggtatcgtttggaagaaggggtatccgaatggcctttccgctgtattgaaatccagtcgtggggcccgttatgtagactgtcatgttggttatcgtcgtgttacccgtgttctttattgaaaatggaatcacaagggtgtcgcctggaagggcagtgaactcattgttcagaacggttatcgagagggaaatccctcccacattcccttcggaggagacaggtttgatccccatcagaatgactagtaaaattagcagtcctaaaacaggctttttcctcaactacagcaccccctcaagggttctctgtttccccaagagcccatcaagagtcatgaaaggcgtttcgaggtcgatcttatagctcttctccccgtgctccaatctattggggccgtaaaagcgccaccctacgttcacgaatttaaccgcaaggacgggcctaccgccaaaacgtccggcaaactcaacaagcttttcaacgtcctcgatgggaaggtagagcttcctgctcctcgtgctcttgacctctatgcagaggtattccttcccgtttccggccaccaggtctattttgtggctccccgctgaacggaggactgcgaatcctttactttcgaggagctttacaagctccctctccgcactggcgccgcgtctgtacctcattgcgcaccctcacagatattctctggttacatttataagctctccccgggaggataactcggtgatactcatgccggtttacgagatagagggtaaaaagcccaagatacacccgacggcttttgttgatgaaaccgcctcaataattggagacgttgttcttgaggaaaaaacgagcgtttggccctccgccgttcttcgcggggacatagagcagatatacatcggctgctgctccaacgtccaggacaacgtcagcattcatacatctcacggccttccgacgaagatagggaagtacgtcaccatcggccacaacgccgtcgttcacggtgccaccgttgacgactacacgataataggtatgggtgcgataatcctcgacggtgcgaagattggaaagcacgtcataatcggtgcaggtgccctcgtcccgccgggcaaggagatacccgactacagcctcgtcgtcggcgttcccggaaaggtcgtcaggcagctcagcgaggaggaaattgagtggacgaagaaaaacgccgagatatacatggagctggcggagaagcacctcaagaggaagaagatagagtgagggcaaatgctatacagattggtctcccacatccctcacattctttttaagccggtctatgacgcttatgaaagctacctcctggagaaggttaaatctgggaacatccctaagcacgttgccataataatggacggcaacagaaggtgggccaggaagcttgaaaagcccccctggtacggccacctattcggatcaaagaagctcgaagaaatccttgagtggtgcagggagctaaacataaggacgcttactgtctatgccttctcaaccgagaacttcaagcgctcaaaggaggaagttgaggccctcatgaacctcttcgaggagaagttcaaggaactcgttcaggatgaaagggttcatcgctacggcatcagggtgaacgtcctcggcaggaaggacatgcttcccgaaaacgtgagaaaggccgctgaagaggcggagagagcaacgagaaagtactccaactacaacctcaacatagccctcgcatacggcggtaggagcgagatagcggacgccgtcagggaaatagttagggacgtccttgaaggaaagattaagccggaggacatcgatgaggaggccataaagcgctacctctactatcccaacatgcccgatcccgacatcgtcatcaggactggcggcgaggtgagaataagcaacttcctcctctatcagatcgcctacagcgagcttttcttcgttgacgtttactttcccgagttcaggaagatagactttcttaggataatccgtgagttccagaagagacagcggcgctttggaaggtagtttttaaatttttccgctaaagcttattaacttcgaagcaaaccttctccggtggtgagagaatgtacgctgagctgagtccaggaaccaagaaggtgtacacgcaggttcgctatctcgacgactaccactgggagatagaggggagcacgataaccgggattcacaagaagagcaacgttaaggtagtcatagacgtcgcaaagaacagggaggaggcagactcactcgcaggaaaggacgtcaatggaattcacatcgtggctattccagacaacggagttttctacatcaagaacggcagctttgtcctcacataccgctacctcaaggccactctcgctgatataaacgaccacatagtctggagcggctttaaggtcgttgaagataacgggaagctcgtccaggaggacgtttatgagtatctcggcgccgcgctcgtgaaccacataaagaacaacgccctcgccggtcaggactacatcttctggcagttctacaagtgcgaggagtgcggaaagtacgttgacatcgagaaccttgaagcccacctcagggaacacggcatcaagctccacgagaagagcgaggaacactatgaggtctttgagctgaacttcagggagggcaaggtcttcgataagttcggcggggaagtgcccatggataagttcagcagcgaggccagggagttcataaaggaagtcctctccggaggacaccagggaggataatcatgagggccatactagacgccctcaacgcagaaactctcgccggctccgtggtatcggtaatatacgacacatactcctccgcttggcagatcccctttctcctttttgaggcattctctcgaaatgggttattttccggtaatctccaactacagcagttctttcagcggcctcgtccgccgagccaggagcgttggcttggacatgatgaaggagctaaaaaaaggtagaatggccgtgattgatgtcttcggttccaggtactcaccggttcatgtagagcttcctggggttttctacttggacagtgccgagccggagaccattaatccaaaaatagatgcaatctactcaaagctcgtggaggagaaaggcccgagactgttcaggatgatatacaccctcgatggtgtggccgtaatgtttgacgagggcaggacaataaagttgctgaaccagacaatagccgagaagagcgttacaactcccgagtccgtgctattgatagccctgaactcggacgtggtgagcaggagcttcctggcatggacagttagccttagtgactacgctatttttgtctcctccaaagtcacggaagagggcataagagaactcctctatacggttaaatccgtgaacattgactttgaaccgggcgtgtactccctggaaatcagaaagggagaagaaaggatacacctcgaaaagctctcaacctctgaacttcggccttctgctgaggagcagtggtaggggcctcggcttgtacgggaacccctctgtctgcccctttatctccctgatcaggtcttcgagctgcatctcgacctgccttccgtcgctcctccttctgacggtgacggtgttctgctccttctcgttccttccaacgacgatgatgtacggaatccactccttctccgccttccttatcttcttgttgagcctgtcgcccgtgtcgtccacgtcaacccttatcttggcgccctcgagcttacctgccacgtagagggcgtagtccattacctcgtcgctgaccgggataacgcgaacctgtatcgggctgagccagagcgggtacatcggtttgatgcccttctcctggagcttggcctgcttctcgaggatagcgtacatgaccctctcgattgctccgctaggcgagcagtggagtatgagcggggttctctccttgccctcctcgtcgtagtactttatgccgaagcgctcggcgttctcgacgtctatctggacggtgctcagagctgcagccttgtcgaggttgtcaacgaagttgaactcgaacttgaggatgaagtagaagaacctctggtcccacatctcgatgaggacgggcttgcctattatcttggccagctcgacgatgaagtccctgttctgctcccagaagtcgcgcgtgaaccttattgcaacctcgtaatcctctggagttagtccaacgcccttgaggacttccatgctgagcttgtactgcttcttgaactcgtccatggcctgcttgaggtctctagctaccgtgtgcatatcgggcatcgtgaaggccctgagcctcctgaggccagaaagctcaccgctcttctcgcgcctgaaggagtacctcgtcagctcgtacatcctcagcgggaggttgcggtagcttatcgtggcgtccttctttatgaggaactggccgaagcaggccgcaaacctgaggaagaacttcttgtccccgctcttgacgacgtactgcctggcggggaagcgattcaggtacttctcaagcgcagggtgctcgaagtcgtacatgatcggcgtctcgacttccatagcaccgtactcgatgaccttctcggtgacgtactgctccaggagtgattttatgagcctgccctttggatagtagcggaggtttccggcgtcgcttcccggctcgtagtccacaagctcctgctcaagcatgagcctgacgtggggcggctccctatcggcgaccctgttcttggctatctcgtagttcacgaacttcttcaggttctcgtggccggtgaaatcgaacttgtcaacgtcaatcagctcgccttcgggcgtgaggatgtaccagtagctcttgagctccttctcctccttttcgagggctatgttgcgctcctccttgcttaccgctttctccggaactatcgtcctgctgagctcagcaagcgggtgtcccttgcagcttaacttgaaggccttgtagtagccgaagggagcgcgcttgacctcgtagcccttctccctcagtttttcctcgatcttgcggagaacttcgagggctacgtcaggcttggcgagctcactgctgaggtgggcaaatggatagacgaatatcctttcggcctttatctgggaagcaacgtcctctatctccttaacggccttctcgacaacttcgtcggggtttgtctcatcaaccttctcaacgctgataaagaccgccagaacctcgtcgagccttcccgtcttctgctcgtcgcttataggctctgggttcttcagggccttgtccttgacctcgtactcgaggtagtccgagtgtataaggagcattctcattcttaaccaccaccaagacatcgtcggcagattactaaaagttttcccaaagggaaggcttaaaaaatcctcgctggaaacttttcggaggtgggaggatggatgagaaaaagaccgtgaagaacggcgacctcgtactgcccggggattatcttggtgttatcgaggagttccttcctggagatggtgtcagggaggagaacggtgagctttacgccactagggctggtaaagtaagaatagactccgacaaaatggagataagcgttgaacccgtaaccgacgtcccgccgcttcccagggttggagacgtggtcataggtagggtcgttgaggtgaagcctcaggccgtaatagtccagatcatcagcattgagggcagggagaacgacagggagatagccacttcaaagctagcagggatacacatctccgagataaaggagggcttcgtcgaggacatcaccaaggagtttaagattggggacgtaataagggcgagggtaatcgccaacgagaagagtccgatacagctgagtacgaagggtcctgatctgggtgtcgtctatgccctctgctcccgctgcaggacgccgctgataaggcgcggcgacaagcttatctgcccgcgctgtggaaacgtcgagacgagaaagctttcatcactgtatagaaaactgaaggtgtctctatgagggccaagagggttataacgatccacgttagggacgacagggagaaggaggagttcatgagggaactccagaggctccgtcttccagcgttcatctacgttcacggcaagctggactcgctcaagataaacgtccagggcacgaaggacgagatcagggaggccattcagaagatacgagaaatccacacgagggtcagggcaaagctctatcccgacagaatgggtctctaccgctacaaggtggacgacctgctccgggaggctggaaccagcgtctcaactcccataatcgtcaaaacccttgagctcttaggcgaaagggttgagctaaaggacgacgagattgttacctcaatgccctgggaggaggctgtggaagtaacttcccgcctcggagaggctttagcggagatagcccttcagacgaccaggcagataagggaggtcgtcctgcccgttgcaatagcctacgaccttgaccccgaggaagttcttgagaggctcgttgagctgggtctggccgagtggaaggaagataagtttaaatacgaactcgtgaagaacaaggagcaggcgcttgaagagttgctgaaagcccttgaaggtgatgagaatgaggattgaggtcataaggcgtgaagagaacctccttgagttctatcttgagggagaggatcacacctttgccaacctgctcaccgagaccctccacgagaacgagcacgttacctttgcaggatacaccatcgagcacccgataacgatggccaggaagccgcgcttcaaggtcgttaccgacggaaaaataacgcccgagaaggccctcgaagaggcggcgcagaagatatttgacagggccagagaagtccttgaggcctggaaagcggctatagagtgatggagttgatctcctacacgagggacttcaccgacaaggggctcgccaagctcggcgactccctcatcaacctcgtcttttctcttgccttaagtgagtacctcggtaagcccacgggagagcgggttccaaacgcatccctcgccatcgcgcttgagatggcaggactcaggcacatcataccccccagaacggacaaacacggcaagggagacattgccgaggccctctttgcctacgcctggctggagaagaagataacaatcgaggaggcagttgagatactcagccagaacctcgatgatgacgtcacgcacttcacgagaaagaaagagacaataggaaaggcctttgccgtcctgtacgaagaaataggaaagagacttggactcaaagactgaggagcaggtctatgagaccctgcttcgtcggtatcttcgggaacttctcggggtctttgaccttcaggagtatcggcacgtcgccgaagagcttcagaacctttccgaagggtatcttgccttctccaggaaggaggtggaggtcaccgactccgtacgccagggcatcctccggctcgacctgcgggaagagctttccaaagttgtcgtgcaccatgaggattatcgttttgtccgttccgagcttgacgtcgtcgaggagcttctcctcgttgccctgggcgctcaagaatgcgtgggcaacatcaagggcaaagccaacgttgtccctgttcacgttttcgacgacgtagagcgtgtccttgacgctgaaggtgttctcaagggctatcttgatgtcgaagggcttcagcatgtcggcgaggctctgaagggcctctatttcgaggtccagccttccagtttttccgctctgcatgacgatgacctttgcaccgagctttatggctacgtctgcaaccgcccttgccaccctgaagtgcctgctgtggtagacgtggtccctgaggttcattgaggtgggcatcctgatgatgtagtttattcccactcctttgagggtggtttcaaggctgcggagcttcttctcaactacaacaccgttctttatcaggcctagagtgtgcgggaacagtgaaacgaagtcgtagtccttgatttttatgtccgccagaatcgatgcgaggctcttgtcctttgtgatgaagtgcgggtagatggtcactcctatctccacgggtatcacctaactctgaagtcgccagaatggatataaaagtttgtccgttctgggacaggtttaaaagttcacgcgtgcacaacttgagggtgggaaaatggacgatcggatatggaagtacgtctcggccgttctaacgcttctgctggccctatcaatcgtgagcgtcgcggttctctactaccaggtcaatccccccgctgttcctgccaatcaaacgggctttgtcatagaaactccctcaaactttacgctcgtgtgtgaaggcagtgttaacactaccagcaccgaagttgccgagctgagggatcaaatcgctttcctgcagagactcgtttcatctaaccagggcggcacaaccatcgccgtggttccaatatttggaatcatagacgactacacggccctccaggtcatcccgcttttgaggaacctggccatgaacgagtccgttggtggggttctcctctggattgaaagtcccggtggcgtagttgggcctgttattaacatacactccgaaatcaaaaagttgtctttagttaaaccagtcgtcgcttacagcggggatatcatagcatcagggggatactacatagcagttggggctcagaagatagtggccagcccgctggctgaggtcggaagcatcggagttatctacgttcactacgacctggagaagaactacgagatgaatgggataaaggtaaatgtattcaaaactggtaaacacaaggacatgggggccgagtggagagatttaacgccagaagaacgcgagaagataacggagatggtgaacacttacttccaggcgtttatcagcgcagtgagcgaggggcgcaacatgaccattgatgaagtcaaaaacttctcaacaggagagacgtggttcgctgagaacgttactggagccctcgtcgacgagcttgggggtatggacactgccatagatgtcctcgaaaagttaatgaacgttagcggtgcaaaggttgtggtgtacaaggaccttgagacccccgaggagtttggggtctacgggagcactgccctctacatagaccctcgctacctcactcccctcattgggggtggttgaatgctgtgcgaggagaagcttgaggtgtttgaaaacggctttgaggacgggaagttcaacctcaggatagagtactatggaaaggacgccaggaggcttctcctcgcagttatacgcgagctctatctccctgactacggagaagactacgtctatccctttgaatgtgccaaggagttctggggaatctatatggatgcctcggagatacgcggtgaagaacctcgccttgcccccgtgaagttccttaaccagagcatcctcaacaggctcgaaaaagtcctctctgagatagatgctcctgcggaggttaaagagctcatagactttgaaaaggccgaggttgcaaagcttggaaagggcctcctcgcccttgggaagaacttcatactcgatgagcggggttacctgttcattttcaacaagccctcggtaagagaactgatactgaaatacatggggatgcttgatgagagttgaaactgcagtgtgggttgccgtctccctcggggttctttacctgacgtgggaaacgatcagcccaattctctcaccaattataatagccgcgactacagcctacatcctctatcccgtccatgagcgccttgaaggaaaaattgggggacggtggtcggcacttaccctaacggggattttgacagtggtttcccttctgtttgtctttggcttcgccctcctcataaacgacgttaaatactccctggcgaactacgttgacacctttgttggctggcttcttggcttaaacctgcccccatccgcctacgaagtcctccagagaatttcactcggcatctcccagaggtttaacagctacgtccttgggtacacctactcactccccacactgcttctgcaggttatcgttactgtgttctcgttctacggcatccttgtgaacgccgacgccataaaacaggaggtttactctttaattcccccaaccaacagggaccttgccagaaaactgatagacagtggggcagaaacgctccacatagttcttaggggctggctgctcgtcggtgttgggaagggcatattaatggccctgtttttcagggtcttcggaatctctgacgtgggtggtgccgttgccgctggaatcctaacggtggtaatcgagcttcttcccgtcgttggcggctggatcgtttgggttggtggtgttgcctatctgatcaatcagggccacatcctttcaggtgtccttctggcggttcttgggttctcccttgtttcgccccttcctgatatcctgctgagggataagataagccgtttgaagtggggagtaaacgctatcataagcctcctgggtttcatcggcggatacatagcctttgggttcgttgggataataatcggtcccgtctcactcggccttctgaagaccctcgtagaagagtggaaggaaatcaaggagagaacttcctgatgaagctggcgaccttaactgtatctattgtctccttgacatcatgggtgcgtattatgtctgcccctttcagcaccgctatggccgttgcagatagactacctgccagtctctccgaggggtcttgccttcctgttattgcaccgatgaaagactttctcgagacacctaccagaattggcttcccaagggacttaagcaggttgaggttggctatgacctttgagtcccagacgtaccacggcggccattcggggcgtagaaagccgatggcaggatcaactgcaacgtcttcaatcccgtgtctttcggctatcctgaggctttcctgaaggaagtccatgacggtgcgaaccggatcgctgaggttccttacctcaccgtgggcgcagaggacaacgggggtaccgtagtcagcggcgactttgggcatctcgggatcccctttcaggccagttacgtcgttgattatatcagcgccagcttttatggcctcttccgcgaccttcgcgtttgttgtgtcaatgcttatgggaacgtcaacgtggttgcggatcgttttcactgcccagaccgcccttctaatctcttcttcaaccggtatctgggtctctagatagggagccgtggactttgccccaatgtcaatgaagctcgctccctcttccaccattctcagagcagtttctatcagcttttcttcatcgtttctgacgcttcccttgtagaagctctctggagagatgtttatcactcccattatcctcggctcgttgaggctgatccccgcgaacttcatggttccacaccacttcaagatgcaccgcgtacaataaaaacgcgatggttgccatcgcagtcgcgaggattgccacctctgagaacatcccatcattcgagcgtaccgccaatgccagcagtccgttgagcgctataaatccgccgaggacgccctctcttgtgaactctcttcctcctttctctagcacataatacaggtaaagctgcgagaccattgcaggaatggttatgattccaaaggctccaattagtacgtttatcatgctcagtattatttctaggtcattgttcttatttttcatagtaccacgtctttcagtagaaatcgaagaatttaaaaatttttgcataagctctttaatttatgcatcattacgtttttacttcgattcttctgatgtgcatcttgagccattactacatttatgtacatccatcctgccaaaatcagcaaaattttcgttcattgatgtcttttattattcagtaaggcttttaaattgaaactgatgcttttcactcggagtgattaactggaggtgatatcatgctcgcgaggatcgtttactacagaaccgattccctccccgaggaagtcatagtcgtgaccaacgaccctgggaaggcagaggaaatagcaagaaagaagatgagggactttagggcagttgattatgaggttgagtgggtcgcctgacgctcctcccctcctccgattgctcaaatcagaacaaaagaaaaaggcagtcgctagtttccggttttcatactgtttttctcggcttcgctgctctctgccctatttatcagggttcggcgttcatgagcacggtgtagagccgctctatctcctcaagctcctcccaggttatgccgtacagctcggcgactttctcgtctatctccttctcgacttccccaagcttcttctcaacctcggcgagttcttcttcgagttccctaatctcgtcctttattctcttcctctcctcgcctctggtgcccttcagggacttcttgagggactttatccggtcaaggagttcgtacttttccttcgctatttcgtgcgccttctttgaaagctccgcgagttcgaggtggagttggttagatgggtcgaaggtcggaatgtaaattctctttggaacgtcagttgttatgtggacctcgaggccatagctggcaacgataaagcgggctattgtggagttgagtatcgaggcgatgtagtgggcttcgtcttctgaggatgtgggaatgtgcataatgccatgagttggaatcattggtttgtcctgtaaagttggtatcacgaaaacatccaattgggcttttccgcttatagctccggatatatgtttccaaccaactttgtatggagctattgagacttgtgagttaaggactgcatagaaaggcattcctgatctttctgctatttcaattggcttttccttgtaaattcttaactttgttttaaagggttctgcatttctgcttatgagttcatctaggagcgctgtaaagaaatcatatgtcagtggatacttgagtttgagctctgaaggtggaatgatatcaccgtttttgtctattggcaggagtatccacccttctgggttgcagtaccatttttttgcattctttccgcgtagaactggaaatataagatctgtttctacaactttctggactcttttgatagactttttcatggttttaccgacattctgaattagtactctccctggggcaacttcacgaataatttcaacccagtaagctccatctaatcctgtaaaaactccagcataggccctatactccgagctccccaaagctttcttaagcccctcgtaggccttcaccgtcgtcatcatccacgggctctctggcttcccctcctcgatcggcatgaagacgagctggtgaatcgccgccttttccttcacttcttcaagggttgcctcaacgtccgcccccctggtgtccggccagttccagacaatcaacggaaccgggaactcggtcttctcggtcttctcgatgaccaataggccagtcctcgtggtggccccctcgaaggggtaaagtgtaacgaggtcgtgaaccttcaggagcttaacgggtatcctcggctcccgtcttcttccgtaggtgaggaaccttctgaatcccgctcccgcctgcgttttgaagagcgtgaagggaacaagaaaggccagcctcccgccgggcttgaggtagcggtcgaatgtcctcgcgacgaagagcatgctcatgtccctctttaccctgcccatacccttacccgagcctttttcaagcccgtagtactcccagagcggtttcgtcagctctcgatagttctctggcaggctctcccagtttatccacggcgggttcccgatcacgaagtcgaagttccctatcgtgagcggtgcgaaggcgttcctcagaaccctcgtccatatcctatccttgccctcctgctcaagcttccacagtttctcgtacagaacggagatggcatcaatggtatcgtcgctaagcctctttccgccgagcttcatgtgaaggtaaacgatgaactgccccttcttcatgttccgcctcaggccgtcctctatggcctggaaaaccttgtccatcagctttgagtctatgacctccttgggaacctcgaactcaccggcaaccgtcttgagggctatcctcttgcctcccctggctgatgttttcgtacttactgttatcgagtcggctagataaactggtatcgtgatgtcgtcaaccctgtagcgtatgagcttcccgagggcgatgagatagttgcccctcgccgccaggactgccagcgggttgaggtctatcccgactatgttgctcgttattgactcaaggagccggagctgggcatcggcagaggttccccagtgcctcagcccccactccttcgccctctttatcgccagcacgaggaaagtcccggagccgcaggccgggtcgagaaccctcttttcggggtttccatcgtaaccagcttcgtccagcgtcagctccgcgagccagtcgggcgtaaagtactccccgaggctgtgccttatctccctcgggacgaggttctggtagagcctcttgaagaggtcttccaccctctcaggggtttgttcaactgtcgcgggttcgtagtccatgagtgccttagtgatttcataaactgccctagccacctctccgctccactcctcaaggtaccaggcgaagtagtccgcttccaggaagttccttatgcccagctgtctgaacagtcccccgtcctcaagctcggtgagcacgaacctgaaggactcaacatcgctcaggtagctctcgttgagcctcgccagtacggaaccagtcaggccctccgagaggacgctgactatctcgctgacgatgagcttcatcagaagggtgtagtaggtgtgcagtgcgaaggtcagcctctcggggtcggcctccttgaacccgtagaactcggccagcttcttcagcttctccggggtgtaggagcagacctgggagaatatcctcctccagtcctcaaagagcatctcagttctatccgattttggcgactcaagggcgctatagaacgctctgaggacttcttccgttatccggctttttggcccaaagtccctcaaaagcatctccgcatcgaggggcttcctcgtcaggcccctgagggcatcaacgaggtgctcaaaggcctcaaacgtgaacggaagcgggccgttgaccttgaaactgcctccccagtacctaacaaacgctatcgttgaaccgtcgaagagcactccaaggtaatacggataaaactcctcgcttttggcctctgatttgatgtagtttatgacctggtcgagggcggagttaaatgcctgcttttccttcagttttcctggagacttgtactctataataacaccgccatagagggcgtctatcctgcccctaaagaccttctttgattcaaggagctgagttgacttctccagcctgccagatactccaaattctctcgcaatctcatcaagaaccttagaaacgttgtgccgcagttcctcctcatttgaggcctgtttagcggccagttttatcctctcataaacctgttccaggttctccaaaagcaccaccgcaaaggtttcaactggaaggcttaaaatgttatctccacggtcgagttcaaaagagctcaaaaagagataaattaggggatgggggttacgacccctggatcatccgcgagcctgtttgaactgctcctggatcttcctgtagtactccatggtctccttgctcactgacggcccgatcttcttgagggcctcctcgaagtccttcatggtgaccttgaccttcccccttatctcgtcggccttcatgccgggtcttatgatgccctcctgcagggccctcctcatggcgagcatcgcagcctccctgaccactgccgctatgtctgcgccggtgtagccttcggtcttcttggcgagctccctaaggtcaacatcacctgcaagcggtactcttctggtgtggactttgaatatttcgagcctggccttctcgtctggagctggtacaagtatcagcctgtcgaaccttcctggcctgaggagtgctggatcgataatgtccggcctgttggtggcaccaatgacgaccacgccactgttctcctggattccgtccatctcagtgagcagctggttgatcaacctgtcagtgaccctgttcacgtcggttcctcttctcggggcgatggcgtcaatctcgtcgatgaatatcacggttggtgcggcctggcgagccttcctgaagatctcgcggatgttcttctcgctctcaccgacccacttactgagcacctctggacccttgattgctatgaagttggcctcgctctcgttggcgactgccttggcgaggagagtcttaccggttcccggcggaccgtagaggagtattcccttcggcggtgttatgccgagacccatgaatgcctcgggatacttgagaggccactcgactgcctctctgagctcctgcttgacatcttcaaggccgccgatgtcgtcccagcggacgtttggaacctccaggagcacctctctgagagctgacggctcgaccatcttgagggcctcgtagaagtccctcctcgtgaccttgagctcgtcgaggacttccttcggtatgtactcggcctcgaagtcgatcttgccctcgttgatgagcctcctgagagctgccattgcagcctccctggcgagtgctgccaggtcggcaccgacgaagccgtgcgtaacctcagccagctcgtcgaggagtgcatcgataagcttcgccctgacctcctcgtagagcttctcgtcggtctccctgaggatcctcctgatctcctcttcgtctttggccttcttgaccttcatgatagccctctcagcggcctcgcggtaggtgtcgttcttctcaagctcctcgagtatctcgattaccttgtccctcctgaactcgggctcgatcggcattcctctggtgtggatctggagtatctcctttctgccctgcttgtcgggaacgccgacctcaatttccctgtcgaaccttccaggcctcctcagggccgggtcaatcgcgtccggcctgttggtggcaccgatgactatgacctttccgcggctcttgaggccgtccattagcgttagcagctggctgacaaccctcttctcgacctcaccgtgggtctcctctctcttcggcgcaatgctgtcgatctcgtcaatgaagattatcgccggcgcgttctcctcagcctccttgaagacctccctaagcctctcctcgctctcgccgtagtacttgctcattatttccggtccgttgatggctatgaagtgagcgttggcttcgttggcaacggccttagccaggagtgtcttacccgttcccggtggtccgtagaggagcacacccttaggcggctcaatgccgagcttctcgaagagctccgggtgcttgagcgggagctctatcatctccctaaccttctggatgacgtccttgaggccacctatgtcctcgtaggtcactccgagggcggttgccttgctgacctccttaactggcttctcgctcacctggaagtcggtgaactcggttatctgaacgatccccgctggagttgtggcggtaactacgaatgtcagctcctggccgagtatgccgatcttgatgtagtctcccctgactacgggccttccgacgagcctgctgtggagccactcgacgaagtcagcgccgaagcgtatcggctcagtcggagcgactatgaccttctttgcctccttgacgtcggcctttctcacggtgacctcgtcgccgagaccaacaccggcgttcttcctgatcgtaccgtccatccttatgatgccaagcccctcgtcctctggataggctggccagacaactgcagcggtgttcttggtacctatgatctcgactatgtcacctgactggacgccaagctcgcgcatggctttcctgtcaatcctcacgatccccctgccaacgtccctctggtaggcagaggcaaccttgagcttgacctctctcctctcactcatgagcatcacctcttagtttttggttaccgtaagttactaaaggacaaaccctttataaacttttcgatttttcttaagtgaggttaccaaaatgtggcccctgcatcgcggtaatgaaaggcgtgcgtagaggcagaatagactaagaagagattgggctggatcaatgagtcaatgtttttggagtacaaaaatgtgcttgcaaaaattttgcatttttgtttatggttttcttatgtatggagacaccactactaccccaaacccaaacaccacaaccaacacccaccaacaccaccaaaacaccaacttcctgttgcttttttgctgatgccaaaagtaccgccaacactaccgtacaaaaaccgtttttgtcccgggaaattttcgtttttccaattttaagaactctggaggtggtaccaaatggtaggaaaagcccaaacaactctctccgacgtgatgccggttgtggtagcgctcggcccgaaggggttctacgtcatcaggcccaaggacggcgaaagtgagattctcgccagctttcctgaagatctcaaccgggtcgcctttgccctcttcgaaacctatgccgagccgttgccctttgagtgggtcaggcagaagctcaagcaactcctacactacctcgaccttcacgaggcgtacctcatagacggtgacctcgtggcaatcatagacggcaagccctatgggctgaagacatacccggaggtcatcgccgacacccgcaggctgttcggcaacgacatggagctgttcttaaacatagtgtacgacctgatgaaggatctgaaaaagcactttgcgagcagcaggtgatttcaaactaagaaccggcaatactctgctaggtacccattcaagccccatccaattggcagaatccggctgttgcagagagtaaagcagaaaaatcagaaaaactcaaaatcactcgatcttgacctcaacgccctccttctcgggtttggtgggcttcttcttcggaatctcgatctctaggacgccgttgttgtagcgggccttggccttctccgggatgacctcctctggaagcctgatgaccctcctgtagccgctgtagtagcgctcgatccttatggcaccctcctgctcgagctccttctcgcgcctcatctgggcctcgatgtaaacggtgtcctctgtaacgcggagcttgatgtcctccttcctaacacctgggagctcgacggtgataacaaagcggtcgcccctgtcgaagatgtctgcgaacggctccctccaggtctcgctgacctctattctctcacctggctcgcggtagctccagagcctcgggccgcgcatgaagtcgcggaatattgcatcaatctcctcctggatttccctcatgatgtcgaacgggtcccagtagcggtccctcctccagaccatctttctcaccccccgcctttttctcaccaattgttattaaagaatagccctttaaaaatttttctctccgaaagttaccaaaatggcaaaaagtttggggtttgagaactctgaaaaactcaaaccctgctcagaaagcccattagagagtagtatatcccctcaaggctctcaccgttcttgatcgggtatatgaacctcagctcgttgccctcgacttcaactatcggctttttaacccgcccgccggagaacttgagctgggtaacctccaccatgtcgcctcttatcgttcctcgacctaccaacagtccctccccgatggccctttcactgaagagtgtctcaagtctgggcctgagtcctgtcacccacttcggtttcttcctcagcctctgcattccaccacctccgtgttcaaaataactaaacagcacttcgaatatgtgaagcttgttcgaaaataaccttcaattttagaagtttattaggtttttggcagtctgtttaacagttgttcaaaaaagtagtccgtatatatcggagtccttgtcaattggatgggcttcgtatccaagcccggtcaaaatcctggaaaattccctggagaagccgtacaccgtgaagatcctttcgggctttaccttctctatgattttcatcagctcccaaaagtccgcgtggttgctcagcttgagccttccaaagccggaaacggtaagctcccagggagagagtgagttttcgaccttgggggagcggtacgaccttaaaactacgtccccttcatgggtgatgtttccaaatttgaccccaaattttgaataaaccctcgccactttcagcatctctctgcttggcctcaccgtgatcccgtgaacgtccaggattttcataacttcctgcgccttccccatctggttcacatagagggttgggcgctttcccctgtcaagagcctcttcaacgaatgcgaccagttttttctcagcttccctgggggatggaaacgtgaagctcggaacgccgaaggtggcctcgattatgagaacgtcggctttgggaaagcggcttttctccgccgttctcagcttgaaccacttggtatctccagtgtagaacagcgtcccgttttcgagccagagctttattccggccgagccgagcatgtggcccgctggatagagcttcgctttgaaatcgccgatgtagaaagtttttgcaaactccacttcccgatagaagccccccttcctgagatgactgagatatttggtcgcctttgttgcgaagataacttcaccgctgacaaagtgatccgtgtgggcgtggctctgaaaggcaaaccgtgccgaactgtccagaccgatgtttctaagcatcatcggttagagagtaatgccgaaacctttaactaatttcgtttcgatgttcctttgggtgttgagatgggaacttacgtcatagaaacaaacaagctcaccaagttcttcggcaagaggaacgtagtgtaccacctcaacctcaaagtgcctaagggggtcgtttacggcttcctcgggccaaacggtgcgggaaaaacgaccactataaagatgctgaccggggcactgaggcctacctacggcgagatacggatttttggcctgaggatgcccaacgacagggttgagatcatgaagcgggtcggatacatgcccgaggtgccgatagcttatgaagacatgacgattttcgagtttctggtctatatgggccgcctggctggtatgaagaaggaagacgccatggagcaggcgaaggagcttatggagtacgctggaattggtaagctggccatgaacaggattggggagctttcctccggtcagaagcagagggcgagcttcgccgcggcgctgatgggaaacccagagctcctcatactggatgaaccaacagcgaacctcgaccccctcgggagaatggagtttattgggaaggtcatccagctcgccaaggcaggcaagacgatcttcataagctcccacatagtcagcgaggtcgagaaaatgtgcaactacgtcgggctgataaaccgcggtacgatgctcgcccagggcagggtcagggagcttgcgagcattgaggaggacgactacgacgttctgaccagcgacaatggaaaggcgatggcgttcctgcgtgagaagccctacatccgtgaggcctgggaagaggagggaatcctcagggtcaaagttgatccgcgctttcttgacgagttcttcctggcctttccgaagtacctcgtggaaaacggcatcagactgaagctcttcaggccgcacacgagtccgcttgagagaatcctgatggagaagtttggagtgggcgaggaggtgtgaagtttgaaagattctcacttttcctttgaatcgcggctcgggataatatacgggatggaagtgaaaaggttactgcgctcccgccgcctcaagctcatgaccctcctgatgttcctcccagttgtcgtctacttcttcacccacgaagagatcaccgagtacagcacgcgcgcgctcaggatatccttccaggttaacttctccacttacctcgtcaacttctgggcgagcgtcataggccagctcgtggtcataatcctgatgagcgaactccttggaagcgagatagacaagggtacgataagggttctcctgacgaaacccgttagaaagagcgaactcgtcatcggaaagttcctcggcgggcttacgggaatgttggtggtcttcggactgccctacctggtcatgcagatttatatggttctgctttacaagcaaggtttcaccggccttagggcgacgttcggtgacctgctctactcccttgaggtgaccatcctcctgctcggctctctaggagcgttcgcaatggccctctcagtggttctttcgaggcccctctacgcctctctggcgagctttggagtgatattcgtcgcccagttcatcctcccgcagttgcctttcttcgacgaccccgagaggttcacgctcaactaccagctcggagttctcttgagggacaggttcacgctccacacggggcttgacgtctacaagggcgacccgtcaacgacgctggtgttcttcgcatcggtcatgctcctgagcctgatgcttgcgatcctcgggctttacagaagggagtacaggggatgagaacgatggcgcgcgtgaaaaccctcactttcgcggtcttcctcctcatcctgctggccgggcaggctacagctctttccattgaagtaggaatcgatgaagtcctcatagtggacggccaggtctttacctttgaccccggccagagcggggacaggttcctcgtgagcgtttcgagtcatggagaagaaacgtattccgttctcgctttcggcgaaaacatcacagtgggcaacgtgacttacgtcatcggctcatacgaccgccagaaccagaggctcaccgctcacatactcggcaactatacaagcgtgagagttatgaagaagtacgacttcggtgttgaggtcatagaagccttcgacacctacgccaaggtaaagattaaaaacacgggcttttatccgctcaacgacactctttctgtttcgtcgtcttctcaaggcgcttttcccatttcctcaagcactgtcctaaaggaagtggagctgaaccttgcaccaggcgaagagatagttttcaaggttccaaacccgggccagacgctggtctttagtctaaaggagaagggcatctcaaaggatgttttccttggaaccttagagcctcaggttgaaatcgaggaaataacgggcagtaaaggtgttaaggtaaaggttcttaacaaaggcgacccggttaacgccaccttcagcctcctttacagcagtaacatggttttggagtcgaagaaaatcctgctccagcggggaaccagctgggtggagttctccaactttataaaccagggagcggtagtggttgattacggaaaagtaatccagcagaccttctacttcaggccggcgcttctggttctcgaaaacatctccagggagggggagcatctcagggttgtcctcaaaaacacgggggagtctcctttcaggggtttcgtcagcgtgacccaaaacggcgttgtggtgggaagtccaacatattcagaggtctccatagggccaggggagagcgtctcgctgaccttcaaggttcccgaggaggttaggtatccaaccatcctagcttcctccgactcgggaactttctccttcacggccgaggctggcgcttccggcatctcggtcgaggcgctctcaacgagtataaaagtccccctcggtggaaagggcagctatgcactcgttctctccggttcgggcagggtgaagcttggcgtcgaaggccttccggagtcggttggctggaagttctactccggggaaagcgaggtcgaggagcttaacgtggacggctcggcccaggtggttctggttattgacgtgccctctctgcccaggggattctccgttggtgtgccagtcggattcaacgtaacagtcagggacgagaatggaaacctgcatgtaatccctctggagttcgaggcatacggtctggcgttcctgcccgtttacggcgacaactggctggcgaagatgaactttaccgccgagacgcactttgtaggaattccataccgagtcgccgctaagtctctgaccccaccgattcagttcgaacactatcctggggagaagatagccttctcatacggcaattacgtccgctcagggctggacatcacccttcacgttctctcttcgagtggggagattctgcactcctcaagccaggggaagggaaggccagattttgtagtgttcaacgagtctgatttcatgcttatgctcgagggcgacaggttcgacgccgttcttcttgttgcggattacctcaggaagcctgagaacatcagctttgagctccttccaaagcagttcggagagggaattaagacgttcatcctaaacgctacatcgctccgcgggaagaagcttgcccttgatgttaacgctgatcggccggttgaggttagggtctattacttcaccctcaacagggagagggaagactttgacccgctctccgctgatttcaagggggctttcagaggtaaaggggagcatgtgtcgggagaagttcctctaaggccatacgaggatttcgtagccatatccataattggcacagggaacgtttctctaactatgacagcgaaggaagttcccgtttcagtgagcggcattgggaagtactccggcgagctaacagtggctctcctggccctcctgttggtggtggtcattgctctcgaacggcgcctcggctgatggacaatttatccaatagcaaggtgaaacttgagctatgtaaaaggtttttatactccagtgcccaattagggtcaggtgatcaggaatgacgttcgataaggaaaagctcaagaagatccgcgaggaagaggagcgctggaacgagaccaccgttaagaagttcctcgagaaggctcccgagagaaaggagaagttcatgactgatgacggcttcgagataaagcgcctctacactcccgctgacctcggcgaggactgggactaccttgagaagctcggcttccctggtgagtatccatttacccgcggcgtttacgccaccatgtaccgcggccgcttctggacgatgaggcagtacgccggctttggaacggccgaggagagtaacaagcgctacaagtacctcctcagccagggacagactggtttgagcgtcgcctttgacctgccgacccagatgggttacgacagcgaccacccgatggccgagggcgaggtcggaaaggtcggtgtagctatagactccctctgggacatggagatactcttcgatggaatcccgctcgacaaggtctcaacgagcatgacaatcaacgccaccgcggccaaccttctggccatgtacatcctcgtggctgaaaagcagggcgtcccgcagaacgttctgagaggaacagtccagaacgacatcctgaaggagtacatagcgaggggtacctacatcttcccgccccagccgagcatgaggctcaccacggacatcatcatgtactgtgctgagaacgtgccgaagtggaattcaatttcgataagcggctaccacatcagggaggctggagcaaacgccgttcaagaggtcgctttcacactcgctgacggtatcgagtacgttaaggcagtcatagagaggggcatggacgttgacaagttcgccccgaggctgagcttcttcttcaacgcccacaacaacttcctcgaggagatagcaaagtttagagccgctagaaggctctgggcatacatcatgaaggagtggttccacgcaaagaacccgcgctcaatgatgcttcgcttccacacccagaccgccggctcaaccctcaccgcccagcagcccgagaacaacatagtccgtgttgcgattcaggccctcgcggccgttctcggcggtacacagtccctccacaccaactcatacgacgaggcgctctcactcccgaccgagaagagcgtgaggatagccctgagaacccagcagataatagcctacgagagcggcgtcgttgacaccgttgacccgctcggaggcgcctactacatcgagtggctcacagaccacatctacgaagaggccctcaagtacatcgagaagattcagaagatgggaggcatgatgagggcaatcgagcgcggctacatccagaaggagatagctgactcggcatacaagtaccagaaggaagtcgaggagaagaagcgcatcatagtcggtgtgaacgagttcgtcgttgacgagccccttgatgttgagatactcaaagtcgacccgagcatcagggacaagcagatcgagaggctcaagaagctccgctcaacgagggacagcaagaaagttgaggagtccctcgacaagctcaggaaggcagccgaaaccgaagacgagaacctcatgccctacatcatcgaggcccacagacaccttgccacgctcggtgaggtcactgacgtccttagggaagtctggggcgagtacagggctccgctgatattctgaaggctttctttttctccctcaatttctacgacttttgcaggccaccacatttgtgaaaatttttcgccctcatcacacagaaggtttttaaaccgacgcttcaagccgctcttggtgatgggggtgaagttcaaaggtaaagcctttggaaacgtcgtgaggattgagtttgatatactcaccctcggcgagcttaagatagacgacctgcgagactttgacgttgattcccttaagattgagcttaagccgacttcttcaggtatcaagatcatcggcatatgggaaggcccggttgagaaagcgggtgagggtataaagaaggcccttgaggagagctacaagctccgtgagagagttttaaacaggataaagagcaagaccgaagccataaggagcacgatgcttcagcttgggtttaaagaggacgttgagggctatggaaacgctttccgcttcaccaagaaggttggcccctacgagatagttgttgtggcctcaacgactgacgatatagtccgcgttgaggtttacggcaacgacaaaaaggtgcttagccccgaactggagagcatcttcgaggacgttgaggtcgaggagcttgaaatctacgacttcgaggacagcaaggaagagaggctcgtcataaaccttgagataccaaagaacgaggagaagcccgagaggaagatagtggaagcaataaaaatgatagagaacatgctgatggcctagtcacttgtacttgctctccagctggagctgcttcagctttgcagttattccttttatcggcgctctgtcctcgctcagtattttcccggttttcgtgtctattctcgcatagtaaaggctgttctttcctgcgacctttatgtggatgtacccttcctccttgtagtgcgtgagcctctccgtcttcaactcggtctctccgtaaagcttcttcaggtgttcgtggaaagcctcttcaagcgccagctctgtaaacctgacgttttcttcctttacctcacccgtttttctgtcgagtacgagctttccgaccttgctgcctccctggaactcaacgacccaatctccgtctagccttatcccctttatctctgcggtttcgtctatgtccttaactttctcctccgctattttctcggcgacttcttttttcagaaccctgtctgcctcttcgaggatcttcccgtccttggttgccttcacggtaactttatgcttgtcgttttctatttctaccgtgtaaacctcgtccgattctgatacgccaagtgttctgtagcctggatatttggcgagtacaagctcttctgccttctgaggtgtaatctcgacgaagtagtcaaggacgtcctttgtatccccgtctatttttgcggtcgcctttccaccttctccttccattgttatctctaagaacttgtgttcgaggactctgctggagaccagcttcaggttcttcactgggaagttgttctctattatcggctttgcctttttgaaggcctcctccggcgaaggaagcgtggtaatctctttcaactctccgttctcaaggttgacctcgaggattactatgccctctttgagcccaacctcaacaatcgcaaccttcttgcccttctcgatgtccaaaatggttccggctggatacttgttgcttatgagctccctgagggcctcatcggtgataagggattcttcatataccacggcaccggtatacccgttgaacttgaactcgaagttgaagcgctcggttttgccaaaaaccttcaccttcccgttgttcctttcaatctttgactccaggggctcctcgccgattctatccatgagaatttctgtaacggtctgcaggaagtactcgtcgggcaattcggacacatcaagctggacttcgttggtattcggatccaccacagccctcgccctgttggcacccaccttaagctcggcctccgcttttgtgggcacgtacacttttttccgctcgtggatcgttatattgctctctggaacgccgagcttctccgaaagggtgttcttaagcacaagaacggattcgctgggactgagggaggattcaatttctctctcagttgcgtatatctcagacctgtcgtttagaagggcttttttaacgggtgttgccagtttggggtctgactgagcttgggaaactattttttcttccgagaacaccagggcttttcccttttcttcgctctccccctctctcgctgaccaggaaattatgtatgccgtcgagagatacactttgaggaaggagatctttatgtcctcgggctttatgggatattttctgctggcttccctggctatggctttgaggaccccttctggcgaaaactcaaacaggagaggcgcgtccagctcaaacttggtgaggggagtttcttccgctttttcctcggattcttggggtttgatttcgggaactttgatcccgtagttggaaaacgttttcgcgagcttttcggcgtcccagagtataatcctcgccctatactctttagcaacaactgttctcgcgtcctttgtaaatcccaggggagatataagaatccctctatcggctttgtatctgtcaataagatcgccaaaaacgctaacttctttagaagatgccagcgatccggtatgaacctttatcagaagcttttcggtgcccgccaacggatcatcccttaccgctactatgtcaacaccccacctgctccgatctgcaaccttctcatggtttctgaatcccatcttatcaaggacttctgctaagtactcaatgatatcctcgcgggacagcatcctcacgatgtcctgagtccaaggcatcctctcaccgtcctcatgtactctggattgtaaccaccaagagtgttcaaataaacttttattaaaacctctatttaacactttctcggtgatgtgatgttcagaatcacagatttcacctacgagggaaagaccgtttttctgagggctgaccttaactcccccgttgaaaaaggacggataacgagcgacgcccgctttcgggcggttttaccaacgattcaacacctcctcgacaacggggcgaaactcgtgatagcgacccaccagagcagaccctacaagggggactacataaccaccgaggagcacgcccaaatcctgagcagacttctcggccaggaagttgaatacgtcgaggacatctttgggaaatacgccagggagagaataagctccctgaagccaggggaggctataattctcgaaaacctccgcttctcagctgaagaggtattcaacaggtcaattgaggagtgcgaaaagacgttcttcgtgagaaagcttgcgccgttaatagactacgtcgttaacgatgcctttgcaactgcccacaggagccagccctccctcgtcggcttcgcccgccttaagccgatgataatggggaagcttatggagacggaggttgatgcactgagcaaagcttacgagagcgaggagaggccgagagtttacgtcctgggcggtgcaaaggtagatgactccctccgcgttgccgagaacgtcctgcggaaggggaaagcggatctcatcctcactggtggtctcgtcgggcagatattcacgctcgctaagggctttgacctcggggatgccaacatagagttccttcacaggaaaggtctccttgagcttgtggactgggcggagaagatactcgacgagttctatccctatgtcagaacgcctgtggactttgccattgattacaaaggcgagcgccttgaggttgatctcctgggcggcgaaaagaggctgtttgaccagtatcccatccttgacataggctcaaggaccgtggagaagtaccgcgagatactgataggtgcaaagataatagtggctaacggcccgatgggcgtctttgagagggaagaatttgcggttggtacggtcggtgttttcagggccatcggcgaaagccccgccttctcggtggtgggcggtggccattcaatagcaagcatctacaggtacaacatcactggaataagccatatatcaacgggcggtggggccatgctgagcttcttcgcgggagaggaactccccgtcctgaaggcgctgaagataagctacgaaaggttcaaagacagggtaaaagaatgagggagccctccccttcaacctatcgttgccctctcgaactcaaccatggccagccccaccaggagggccgccaggacggtcagaacacctaaatcaacggcgagcgagaacttggcaacgttggcccccacgaggaagtgcctcgcgccgtcaacggcgtaagttaacgggttgatgtaagctaaggccttcatccagcctggcatggtgtctattgggtatatcgcgccgctcaggaaggtcagcgggagcatgaggaccatcatcaccatctggaagccctccatgctctccatcttcaaagccaggctgacgccaaagcccgagaaggccatcgagagcaggaagccgactccgagggccggaaggaatccgctcagcttgaggctctccgcgagcgggtaggtgagggtgaggattatcgttccctgagcgagcgtcacgagtgagtcaccgattatcctccccaggatgctccccctcctcgatgcgggagcaacaaggacttccttgagaaagccgaactgcttgtcccagataacgcttactcctgctatgaagctcatgttgaagaccgtcatggcaaagatacctggcgcgaggaacgttaagtagtccactcccccaaagatcatcttcgtcatggggttgtcgaagaccttgctccacccgaggccgaagaagacgagccagatgagcgggttgattatcatcccgattaccctcgacctcgccctgctgaacctcttgagctgcctgtaggccattgtggttagtgcctccatcctctcacctcctcctcatcctcattctcacgaaggaagccatcgggttctccggcccttcgtcccttatctccctgccagtcaggtggaggaagacgtcgttgagcgtgggtctgtggtaggtgacctcgaggattctgatgcccctctcatttgcgagctcgaagagtcccgggagcgcttcggcagcgttttccacctcaagcgccaccctgccgtcgggaagaaccttacagcccctgatgaagccactttcgaggcacttgagctcttcgggagcgtcgagtttaaaatagatcacgtcgtttccgacgagctttttgagcttctccgcggtgccctcggcaattatctttccgtggtctatgatggctatcctgtccgctaacatctccgcctcgtccatgtagtgagtcgtgaggaaaatcgtcatattgtgctcctccttcatggcgcgaatgtagtcccagatgtgcgccctcgtctgcggatcgaggcctatcgtgggttcatcaaggaagagaacctcgggctcgtggaggagagagcgcgctatctcaagcctcctctgcatcccgccgctgaaggtcttgactggtttgtccttgaactcccagagctcgacgaacttgaggaggcgctctatcttctccctcagttcgctccccttcagcccgtatattctcccgtggatgtacatgttctcccacgcggtaagctccctgtcgaggctcggatcctgaaagactatgcctatcctcttcctcacctccatcggctcctcaaccacgtcgtggccagcgacgatcgcccttcccgaggtcggcctcaaaagcgtcgtgagaacgtgcacggtggttgttttccctgccccgttcggcccgaggaaggcgaatatctctcccctcttaaccttaaaggagacccctttaacggcctcaaagtccccgtacttcttaacgaggttctcaacaactaatgcttcgctcattccgttccctcctttatctcacccaaaagaattaacctaaccctcttcgtgaactctgcaaattccttcgcgagggcccttctctgctcttcacccaattcgttgatcgagttgaatgtctctttgagaacctccgccagctccctgccgccgagacgggcgaactccctaaagcgctctgcggtctcaatggcttcattcacctcgtattcatgctctttgaggtactctcttcccttctcggttatgcggtagagcttcttctccctttttccctcacctgcgacctcaatgaggcctgacctcttcagggaggctaggatggggtatatagccccagggctcggctggggcatgccgtacctcttctcaagctccgccattacgccgtacccgtggagcggaccttcctcaaggagtttcaaaacgaggagtttgaggtgtcccctgaacttcggcttctccatttctttcaccgatatatcgtttgatatgtcgagtttataaagctttcttaggaacgcttattaccctccgccctaactcacggttaggtggggactatgaagatagtactcaaacccctcttcgacgctgagctcccggctggctttgaggagattatccgttcgaaattagtgggcagagaagtaaaaactggcgagacggttgagatagacctcctcgggaggcctttggcctacaaagttgtcctcgccgatccaagcccgatgaaggtctcgaaaaacacccgaatcgagataacgagaagcgaggtgaaggagataactctcgaattcgatgaagaagttcgggaggtgctccccttctcaaaaggtctcgtcatcgtcctcgaaaacgaagttcgaatctacaactggagcgggcaaaagatttatagcagggagttcgaggaactgaaagaagttagggtggcagaagggaaggtggtggtagtccatggaagcaaagtcacggtcattgagccttgagggcttcacctttgaggagagctgggaggaaaagaaaaagcgggccgagaagatagttgaaatcctcatgaagacccacccgagggaaaagctcctaatcggcgacccctaccgaacgctcgtccactgcataatctcccaaaggatgcgcgatgaggtaacctaccgcgtctgggaagagctgtttaagaagtataaggacattgagacaatagcgaacacccccgtcgaggagatgcaggagtttctaagaaagcagggagttggcctctggaagacgaagggcgagtggatagttaaggcctccaagataatccttgagaggtacgggggaaaagtcccggatgacattcacgagcttatgaagctcccgggaatcgggaggaagtgtgcgaacatcgttctggcatacggctttggaaaacaggctatcccagtggatacgcatgttaacaggataagcaaaaggttgggcctggcaccgccgagggttgcccctgaaaaggtcgaagagtacctaactgcactcatcccgaaggagaagtggatatacgtcaaccacgccatggttgaccacggaaggagtatctgccggccgataaaccccaagtgcgaagaatgtccgctgagagagttctgcccctacgcgaagggccttgtaactgacgaggatatcaaagggaatgctagaaagcccacaaggagatgatattgaggttttcctttggtctcttctttaatcttcaaagaggaaatagaagagataccctcagtcctgacaacatttctctttcatgtgtgctggcagtatctccttgaagccagtgtacttccagagggccttcgggagctttactacaccttcttccgtctggtggttttcgaggatagcaacgatggctcttgaggttgctatggcagttgagttgagcgtgtggacgaacctgggcttctcgtgggtcttgtcgcggaagcggatgttaagccttctcgcctgccagtcggtacagttgctcgccgaaaccacttccctgaacttgccctggccagccatccaggcctctatgtcgtacttcttggctgctacgtagcctagatctccagtacaaatgttcacgacgcggtagggaatctcaagtgcctggaatatctcctcggcgttggcaatgatcctttcatgccactcccagctctcctccggccttgaataaacgaactgctcgaccttgtggaactgatgtacgcggaagattcccttcgtgtcctttcctgcagttcctgcctccttcctgaagcacgggcttacgccgacgtagaggagcggtaagtcctttccgtcaaggatttcgttggcgtgcatgccagcgagcgggtgctcagcggtcgggatgaggtaaaggtcctcaccctcgaccttgtagataacgtcttcgaagtcatcgaaggtggttgcaccttcttcaacgaaacgcctaaccatgtatggggggattactggagtaaagcccttctcgatgagcttatccagagcgaagcgtatcaaggcaaggtcaaggataacgagctcgttgaggaggtagtagaacctggcaccgctcaccttagcggccctctcgaggtcagcaccgcggaggagttcgagcatgtcaacgtggagcctcggtctccagctgagaacctcgtattccatcttcccaaggctctgctccttgaaggtttcgaggaagccctcccagaccttggccttgccccagaaccttatcgggacgttgtcctcgtcgctctcaccaacggggacgctctcgtgggtgatgttgggcaagcgccagaggtagtagtcgatcttcttcttcagctcctcgttctccttctccagctcctctatctgcttcactatctcgttgctcctcttcaggaggtcgtctatcggctctccggccttcttcctcttgcctatctgcaccgccagctggttgcgctccttcctgagctggttgatcttcttcaggttctcgcgccacttcttgtcgagttcgaggatttcatctatccacttcagcttttcggtttcaccgcgctttatcaaatccctctttactatctctgggttttcgcggatgagctttatgtcaagcatgttctccacctcaactgagaagggtctacctataaaaaaggtttttgggtgataccacatacataaccacctacacaaaattcctataagaagccgcgagaatcagaataagatgcagagatcccatgagatattgatttcaaaatacgagagagcgtattgggacgctgtggagaggggagaattttcaagggcaagggtacttgctattaaatgcgccggcttgttccgagaactcgcttctctaaacctggagttctccgactactacctggagatggccaagcaatgggagaaaagagcgggggagctggagaacggccatagatattcccagagaaagtccgttaatctgcccaacgttgtgcagacatcgagggttgcctgggacgatgtaggtgggctatgggaagcaaaaaaagtactatcgaggactataggtcttcacctcgccagggttcctgggaagttcgaaccctggaagggtattctcttgttcgggccacccggcactggcaaaagccttctggcgagtgcagtggcgggaagcctcggggcgacgtttctgaacgttaaggtcagcgacgttctgagtaaatatttcggagagtcgtccaagcttgttgcctccatttaccacctcgccagggagaaaagtcctagcatagtctttatagatgagttcgatgcgctggccatgaagcgctcctccctcgaggatgctgccagaagggttctttcgacttttctcgttgagattgacggttttaagcgttcagacaccaatgagcgtgttgttaccctcgcggcaacgaatcggccgtgggatcttgatgatgccatcctttccaggtttcctcttagggtatacgtaccgctccccgacgaaagttccgcggttgaaatactgaggatacatttatccggctttagggttaaggctaatctgagagccgtagctaaggaagccgtgagacggagatactcgggaagggatctcgcaaaccttgccagactggccataaccaaaatgctgagtgacatgaaccccgaactttcggagcctcagcttatcccatctctagtagggaaggagctcactgtacgcccaattgagatggaagattttagatacggattgcggagaataaagagtccaattacgcctgcattaatcaaaaagtacgagatgtgggctcgggaatatggatcgtattagccagatcggtgattttaatgttgggagttgcagttattgcgtgttcagtccgcgctcgatgatgaacttttcctcctcggaaattctccgcctttcctgaacgtatatccagcccaagacgaagatgagggcggccattccgatcagcagttcccagcccaaagctttgtaatctatggtaataacgagtttcctaaccagtgccacgacgccaagttctgcaacgcggcgcatacttacgtggtgctcctttatatagagggttaggagttcaaacagctctaggagtatgatcacgagcaggaactcatgaagggtttcttcaatgtcaaatccctggagcatgatttcagccagatcgtagatggcgtagagaacgtatgccatcgtaaggagggctaggactatcacaactaggtcgaaggcgaagttcatccacttgagtgcggtgttctcaaggggtgtgagctctttcttctgtctcggtactattgacattagaccaccctaacgatttgtatcctgaaccttatatcgttttcctgtgggaaaaggttatgaagaagattggagccgggaccgggatttgaacccgggtgaaagggatctgcagtccctcgcctcgcctctaggctatcccggcattgaacccgaagaaagtaagctggcgccgcggcggggatttgaaccccggtgggcaccgcccaccggcttagcaggccggcgccctaccaggctaggctaccgcggcattcgacgcccagcttatatgagccagggagggtttttaagttttttggccgctctgaccatgctccatattaaccccatcgggcccccccatatgttggcaacgttcacggttgtgcaaacagcacctttcttacttcctcgaaattcaccctggcagtcatatcaatgtttatcggtgttacgctgacctttctctcgatcttaagagcgtaagcgtcggttccgggctcaaactcttccctcttctgtccaactatccagtagtagggatgccctctgggatctaccctttcttcaatcgttggacagtagcgcttccttgctaggcgggttattgcaatttccgtctctggagttgcgttgcttggtacgttgacgttaagcatgtcgactccctctgggagacccttctcaagtactgcccttgttatccttttaaggaaatgtgaagcaactgagaagtcaatgccctctccttccccgagggtctttttccagtctacctcaaggcttatagctatacttgggacctcatgggttgccgcttcgatagctgccgatgcagtccctgaaaccgttatctcggtgctgaggttctcgccaaggtttataccgctgacagctaaatcaaagtccccaaacctggccagggcaaatataacgctgtccgtgggagttccgtctatcccgtaggcaacctttgccccagggacgtccacgagccttgctcttataggcctgtggagagtcatggcccttccactggcgcttctctggaagagcggggcaaccacatagacttctccaagacttgagagcgcttttacggcagcacgaatgccgtttgaatatatcccgtcgtcgtttgttacgaggattcgcatggttgagtatctgctctttgtcctttttagtcttgcccaagtggtagaaggagaaaagcaacatttttatactcccacttggtaatgttcactgagggtgatatacgtggagctactgaaatcaagaccactgatgactaaaaatgaacttttaagttatgttaatagtgctagtggattcattcttgttgtctctgagaacataaaacccgtgctgttctcgaacggacagccagtatcagccaattttgagttgcccgaggtaattagaaacgtctcgatctactccctagacaaactagaggccctcgactttctacacggagacctgaaacttccaaacgatactcagccaggcgatgctcagagtgaaacccagtcccaggacactctttccgaagcccccaggatagttcagctggatatcaaccttgaggttcccccagagtttgctcttccaatcgagaatggtgtaatagaagcagttaaacatctcttccagaaaaaatccgtggccttaagtgtggttcatggaaagggacgtgtgagacagggctttactgggacgaacctgctagtccttagagttgccgttgaagggtactcccttggtgaggttgggcctgaagtcattgcggactccctcaaggagcacatcgagagggaacttggattcaggactacggtttcaatatccgagctgggtattcagagagtaaagaagctcccgctcgtaaggttccaacgcaggaaagtgaacttcaggggtggaagagtcttggaagttccgctctccacaaccaagggttcagtaaaggttgacatggataaactgcagaaggaagtggagaagatccttcaggaggcggggctttcagaggagcttttggagctgacaaagaaagaagaaaagagcgaatcagccggtctcctggaaagaagcttggtatccaagctttccagcattaagggaataactctgaactgggttaaggtaaccggcagtggtggcaactacagcctcgcgttgggaatcaacagaacgtcgaagtcgctctcggacgttcagatagttgaagcagttaaggaggccataaaaggcgctgagtcggaagcccatgccgcaggagtgtccggaaggttcgtgagtgcgtacgttgtcattgagaaggacatctattagccctcacatttaaaaaccctggttccaagcccgcctcaggtgagagaatgacttactggacgagcgaggacaacgtggccggaaagccggggacggcgctcttcataatcctgcctacgataggatgctaccgctaccgtataggtcaggcgtgctacatgtgctcctatccaactgccgcgcctaaggtaaagtggactcaggaagcgatagtgaactacgtgaaggaggccctcgagaagatagagggaacggaggggccgttcgcggttagaatgtttacctcgggttcattcctcgacaacggtgagcttaagcctgaaacgaggagaaaaatcttcgaaatccttgcggagatggataacgtcgaggagatcgtcatcgagagcaggagcgagcttgttaggtatgaagccgttaaagagcttgccgagatagtcccggataaacattttgaagttgccatcggtcttgagactgccaacgacgacgttgctgacgtttccataaacaaggggaacacctttgccgactttgtgaaggcggctgagataacacacaaggccggcgccaaggtcaagacttaccttctcctcaagccgatattcctctccgagcgcgatggagtagaggacgctaaagagagcataatcaaggcagaaccctacacggacaccttctccatcaacataacggacatccagaaggggacgctctacgagaggctctgggagaagaaggaataccgcccgccctggctctggagcgcggtggaggttctcatctgggcgaagaggaagtttcccaacaagagaatcctgagcgatcccgttggtgcaggctcgaagcgcggacctcacaactgcctcaccgactacgacagagtcatcggcaaggccataaagaagttttcagccacgcaggacttaagctatatagagaacctgaagccagaatgcagagatagatgggagtacatagtcgagaacggcctcctcgactggcagctggttacgtggtgaagctctcaggacatgtttggtcttctctttctctgtttcaaaactcaacacgtgacgtgaagtcctgtgcttatgatcatgagaaccatcaacgctgggaagaagccctggactgccaataggactttctccagctttccctctccgagaacaatgccgctcaggatggagacgatgaggatcccccacagccatttagtagtctcatcagaaaaaatgggcatcagcaccactgtgagtattggcgctcctattgacaaaccagattttttgaggatagggctcctaagatagacatacaatgcaaggatgactatggccgggaggagaacgaggatgacgaagattggagttggcgagtaccatatatggcacgtaaagatcctgtcccagagcttaatactctcgcctctgatgtagtatttctccagccagcgctggtaggcaagaaaaatctcccaaacggtagccaaaccgagaatggaaagatgtatgaggaaatctcggaacttcatgggaatccatcacccctcactcaggatttccgcaactcttaaaacgtcctcatgactccccttcactagtattaagtagaagttagcatcgtcttcaatttccagagcgagcagggtatcgtcatctctctcaaagatcgctcccttcttgagctctctaactttggtgtagccggctttttcgagagagtctaggtactccgcaacgtactcctcggggttcttggggtattcgaggcgaaaagcttccactatttttgaatcctcaggattctccgcatactcaatcttcgagatcacgacggaggtctccttgggatatacatagagggctaaataaaccttactggagagtgtgatgctctctgtggaagctcctggcagaacaaagccgatccagttctctgaaaagccctccagcctcttaaagtagcacttcggctttttttcggtccagtttaagggcttgaagttgaagaagccgacgagtacgtgcctcggacttccatttacaacctcgtcgagggttattcccttaaaccctgcctctggagggaagcccggaccgctgacaataggaggtttgatgccgctcacgttcaccggcaccttggagaaacaatggattttctcagaaggttgggagacttccacagcaatcagtgcccatataacaaccagcaatatgaaggcaacatggggtcctctcattgaactctcctccgtatgttgtgagtacggcatctttcttaaaaacattatggttgtctatcgtaaaatgatccctctttttcatcggtattaggacttatattggtgctgtatcctacttcacaccgccacagatgttccaccccataccataacacaaatgataaacgaaactatgaatgatgtggttgcccataccagtctctccactctttttgtagagtaattcagtcttatacccatgcctggaacactatacaagaccgcagaggttattccggccccagccgggggaatccatgacttttcgaagaggtctaagagaaggagcgttaccagtacaacggcaagcgaagggattccaaatgctacaagttcaccccattccttccagaggccaaggataattgagattaggaacggcgccgttacgaggagaacgaaagttgctgatggactaaagtggaaggcacagatcggatgaggacgaatctggaggcaagaagctccgacgtagtattctgaagggagcaaaatcatgagtaggaactcccatgcggggaagaggaagagataaaggagagagcggggcttcatttgctcacctccactttggaattaaccatgtggatttactcagttgggtcacaatgtactactgtaatataataagttgtgagtagatataagattttccatttcatgattatgatatttagtaattatttacaactcttatcgattcaaaataccgtgggcccatgaggaactttgaacctatgtgcctgcgattgttattgacgtgatgaattttcttctcttttctgctccatgtcctcttgctttttcttggggtgtataaacccaaccagtacatcttttatggacattaatgttctctcacgaaagctttaaatgttgacaaacgtaaacggggttagcaaatcgcgggtgatgattatggcagatgtcgaaaccaagacaaccgttgaaaaggaaggatacctcgttatcggcaaagccgagggaatagttgagattgacatcgatacttttctgtgcaagggatgcggaatctgcgtcgagatgtgcccgagaaaggtcttcgaatggagcaaggagctgagcgaaaagggcgtccattatcctgttcccgtcaacgctgaaaagtgcgtcaagtgcaagctctgtgagctgctctgcccggacttcgccatagcggtaaggtggtgacgcatgataatccgcggcgacgagcctgagcagatcaggctcatcaagaagctctacaaacctggcaactacttcatgcagggcaacgaggccgttgcctatggagctatcttcgccggctgccgcttctacgcaggctatcctataaccccctcaagcgagatagccgagacgatggcgagagagcttccaaagctcggtggctactatctccagatggaggatgagatagggagcatagcggcgatggtcggcgcatcctggacgggcctcaaggtcatgacggcaaccgcaggcccgggcttctcgctcatgcaggagaaccttggatacgcggtcatgactgaaacacctttagttctcgttgatgtccagaggagcggcccatcaaccggtcaggcgaccaagggagcgcagggggacttcttccaggcccgctggggaacccacggcgatcatccgataatagccctctcgccgacgagcgggcaggatgccttctgggagataatcagggcgttcaacatagccgagaggctcaggacgccagttgtcatgctcttcgacggcgttctcgcccacacgagggagctcgtcaagatacccgatgtggaagaagttgaaattacctaccgcaagctcccgcagaatgaagaagaggccaggcttccctttggagacccgcacggtgacggtgttccgccgatgcccctcttcggccacggctacttcacccacgtcacgggttcaacgcacaaggagaatggccttcgtgatgtctacacccccgaagtccacgacaggctcgtgaggagacttcacaggaagatcgagcagaacaggcacgtctatgaaaagtacgaggagtacttcacggacgacgcggaaattctcgtcgtcagctggggtgtaacggcaaggccggccctcggggcagttctaaaggcgagggaagagggaatcaaagccgggctattcgtacccaagaccgtccacccgttcccgggggagcggatgagggcgctcggaaagaaagtccgggccgtactcgtcccggagatgaacctcggccagatgatactggaggttcagaggtatgtcaacgacgacgttctcctcaagggcgtgaacaagataggcggagtccctctaacggttaacgagattctccgcgagataaggggtgttgcctgatggcaaaggaaatctactcacgctatcctatggtcaaatacttgagaaaggaggcacttcccactgccctctgcccaggctgtgggggtggaaccgtcctcaatgccttcgcaaacgccgttgaccagctcaggatagacccgaaagacctcgttgttgtcagcggtatcggctgttccgcctggatagcctcaccgtatttcctcgccgacactcttcacactactcacggaagggccatagcctttgcaaccggcgttaaggtcggacttcccgacaagaaggtcgtcgtaataagtggggacggtgatctggccagcataggcgggaaccacctcatccacgccgcgaggaggaacatcgacataacggtcatcttagttaataatatgatatacggaatgaccggtggccaggttgccccaacgacacccttcggtgcaaagactacgacaactccctaccgcaacatagaacacccgcttcagataagcgaaactgttgccgccgctggggcctcctacgtcgcccgctggacaacggcccacgtttaccagctcattgagagcataaagaaggcccttcaggttaagggattctcgctcgttgaagttgtctcccagtgtcccgtccagttcggaaggaggaacaggatgaaggaacccgccgagatgctccgctggttcctcaagaattcagttcccataagcaaggcgaagaagatgtcgccagaagaacttgaggacaagttcgtcatcggggagttcgtgaacagggagaggccggagttcgttagcgagctcaacaagctgatagatgaagttcaagagcactttgggcttaagggtgaagatgatggagtttgaggccatcggcagaaggctgagggaggcctttggtgacagggttgaggaagtaatcatcttcggttcaagggttagaggggaccacagagaagacagcgacctcgacgttcttctcgtcctcaaagatgagataaaggctgaggactgggacgagataggaaagctgagtgcggagctcaccctcgagctcgggatctcggtcatgataatgccccacacttccaagaaggacagcctctacaacacggcaaaaacggagggaatcgcagtatgaacgcggatgagatcagggcgcttctcagaaaagccgaagagaggctcgctgcttcaagggagctttttgagaggggccactacgccttcgccatctcaagcgcctactacgttatgttctactgcgcgagagcgcttctcctctccaagggcataacgccgaagagccacgctggagttcatgcccagctcggaaaagagttcgtgaagaccggggaaatgcccgcgaggctttacacgggctactcaaaagccctcaacatgcgccacactgccgattacgatgctttcgtcgagtacactgaaagggacgcgagagaagttttgaggtatgctgaggagtttttggctttcacaaaatcttatctggagggtaagaacgatgcagattagactcgctggtataggcggccagggcgtcgtcctggccggtgtcatcctcggtgaagcagcagctattgagggcctcaacgtccttcagacgcaggactacagctcggccagcaggggcggccactcgatagccgacgtgataatctctaaagaacccatctacgacgtgatggtcaccgaggcagacgttctggtggccctccaccagctcggctacgacaccgttaaggactccctcaaagaggacggccttctcattatcgacaccgacctcgttaagcccgatagggactacatcggtgctcccttcacgaggctcgcggaggaaacgacgggacttgctctgacggtcaacatggtggccttaggttaccttgttgcgaagacaggcgttgtgaaaaaggaaaacgttgaagaggccataaggaggcgcgtcccgaagggaaccgaggagataaacctccgcgccttcagggcaggttatgaggagggattgaaatgagatacccgtttcccgttggaaaggctgactttatccaaggcgatgaggccatagcgagggcggccatcttagccggatgccgcttctacgctggctacccgataacacccgccagcgagatattcgaggcgatggccctctacatgccgctcgttgacggcgtgagcatacagatggaggacgagatagcgagcatagcggccatcatcggagcctcctgggccggagcgaaggcgatgacagctacttccgggccggggttctcactcatgcaggagaacattggctacgctgtgatgaccgagactccaattgtggtcgtagacgtccagaggggtggaccgagcacgggtcagccaacgcttgccgcccagggcgacataatgcagtcgatctggggcacccacggcgaccacaccctcatagtgctttctccatctaccgtccaggaggccttcgacttcacgataagggcattcaacctagccgagaagtacaggactccggttgttcttctcaccgacgcggaagtggcccacatgagggagcgcgtttacatcccgaacccggacgatatcgaactcgtttaccgcaaactcccgcagaacgaggaagaagcaaagcttcccttcggcgatccacacggcgatggaattccgccgatgccgatcttcggaaagggctaccggacgtacgtcacgggactgacccacgacgagcgcggaaggccgaagaccgttgatgcggaagtccacgagaggctcataaagaggatcatcggcaagatagagaacaacaagcacgacataatcagttatgaaaagtttgagctcgacgatgcggatgttgcgatagtctctacaggtatcgtctcccgatccgccatcagggccgtcaaaatcctccgcgagaagggcatcaaggccggactgctcaagctcaacacgatatggcccttcgacttcgacatgatggaggagctggccgagcaggtgaagaaaatcttcgttccagagatgaacatgggacagctctaccacctcgtcaaggaaggagcgaatgggaaggccgaggtcgaactgataagcaagataggcggcgaggttcacactccaatggagatagtcgagagggtggtgggatgatgtacctgaagtccgcttacgagatacgtgagaagtacctcagaaaggacatgctcccgacgatattctgtccaggctgtggtataggctcagtcctccagttcacgctcagggcaatagacgatctcggcctgaaccaggacgagatagtctgggtgagcggtatcggctgttcctcccgtgttccaggttttgttaacttcgacggccttcacacgactcacggaagggctttagcgttcgcaacgggaataaagctgaccaacccggacctcaagataatagccttcatgggagacggagacgcagcagctatcggcggaaaccacctcatccacgccataaggaggaacctcgacgtcaccgttatcctcatcaacaacttcacctacggaatgaccggcggccaggtcgccccgacggcactcaagggtctcaaggggacgacagctccctacggccagttcgagaacccgtttgacatagcccagctcgcggtttctgccggggccaactacgtggccaggtggacggtcttcaactacctccagggcataaacagcataaagaaggcgctccagaaggagggcttcacgctcgtggagttcctctcgccatgtccgatcagcttcggaagaaggaacaggatgaagaccgccccggagctcatccgctggtaccagaagataaccgtcccgctggcaaaggccaagaaaatgtccccagaggagcttgagggcaagatagtcattggcgagttcgccgacagggacaggccggggctcgttagggagtaccgtgagtacataaagagggccaagaagatgatggggtgggaagaatgaggaaggaagtcctcttcagcggctttggaggtcagggtgtcatcctcgcgagcgtcatcctcggaagggcagcagctgtttatgagggtctctacgctgtccagacccaggcctatgggccagaatcaaggggtggcgctagcaaggccgaggttgtcatcagcgacgagccgatagactaccccaagaccctcagccccgactacgcggtcttcttctcccaggaggcctacaccaagtatctccacaccgtcaaagagggtgcaaaggtcatcgtagagaaagacctcgtcccgcacagggaccttgagttcgagaagaatctcgatgttttggcgctcccgctcactgagatagcggaggagaccaccggcctgagcctgacgatgaacatcctcgcccttggcgtcctgactgcctggactgagatagtgagcagggaagcgatagaaaaggccgtcctcgatgccgttccaaaggggacggagcagatcaacctgagggcccttcacaaagggtttgaactcggagagaaggctaagagaggggagctttgagttttgacagctcttccattatttccttctcccttttcttgagcttctcgatctctctcttgtagacgagcctgctcctctcgatgtgctctatggcttcatctctggttatctcaaccagaagatcgctgaaggctctgtagattctcctctcggatttcagggaagttattatcccttcggcgtattcaagctccttcattttcagctcaaggctctgcctgagggttcttatctgctggagctctagctgaagttcgtaggccctaacggcctccatagaaaccacctccaaataaaaaggggtgatgggagtcactctctcttctcaggctgcatctcctggagctccttgaggagctcgttgaccttcctggtgtcctcctcaatcttcctcagcagggccaggcggaggtccatgagggccttgatcctcttctcgatgttttccctggcctcgtcaacggttgccccaacgagtattcccgctccaacgtccatgatgacatcgtccggattctcgatcttacccctgattgccacaccgcttccgagcgggatgtagatttctttgcccttgcccttctccttgaggtaggccagggtcgcgtcaaccgtcctgaggtcagttatggtagcgtcaataacgccgacctggctcctgaggtactcaatctcaccgaggtagctcctaatctcgtcctgaatctgctcaagggttctggtcttcttctcctcggccattcccatcaccccctcaaactttttcttacccattgttaaaataacttttggtatttaaaagttttttggtaaggcttattaaagatggtcttgaacgcatcatcatgataatcaacgagactaaggggaaagcatggcacggaaaagttaagctcgcggataccttcctcaaacggtttagggggcttatgctggtcaaaaacgttaaccatgcactggttttcgtcctcccagctgaaacgcgggcaaacgcttcaatccacatgtttttcatgctgagcgacatcgacgttatctggcttgactcctccaggagagtagtggactttaagactgcaaagaagtggcgtctctacactccgaagaaagccgcccagtacataatcgaaggccccgttgggctgataagaacccttgaggtggaggaaggggacttaataagctggacgcctaccgaagaaagggagaaggcagttccagtcaagtcgctaattccaggaaaaataaacttaaacggctccaaaaacagtattgcaatggttgaaagcgttaaagaagtaaaagccaatgaggtttagaactcaaactcgactccgttctcgtcgccctcccagaggactatgcgcttgagctgcactcctccaggaagtttctcctgaatctcttctgctatccagagggcgatgttctctgttgtcgggttcttaaagagggagttgaggtttttgtggtcgagttcctttattatgttctccacaattctccgaagctccagaaagtccattacatagccgttcttaagcgggccttcaacggcgacctccagccggaaggtatgaccatgtatctcctctgcttgaccatctatgatgaccgcatgggctgcctcaaacttgaagcgctcgacgacgcgggatttcatggctgcacctccagctcatttagatatgacactagtaatatgccttctctgttacaagcatctgagaaatctgaatcaagagatactaaggcctctattccgtagtattctgcagtggcaagcagaagagcatcgttaggcagcagactgtactcagaagacagcctaacggcaatagtggctacatcataattaacctcaagaaagtcgggtattgcaaggagaggtagaacaacctcctcaaactcctgcacggcagatttaacgagttcgggtttctttttggccttccagtaagggccgaccttaatgcggagataatggtaaaaaacctcgctgaaaacaacgtcgtttatgaaaacccgccagtttgagtgaaacagcttcgtgaggaggttttctgcggtagtatcgcctttaagggcttcaatgaacacattactatcaactagaaagctcctcatagagctcagcctccagctcgcgccaggacttctcggactttatggagccaaaagcccgttggaggacgtcatcaaggttcgctcttgctcttgctctgagctcgtccattttagcccgccactctcggttgagggctacatatccagttttctccacttcccccaccagtggtgaattagaaccgaagtaaataaaactttcttaccgaaaggctaatctgtgggtagggatactattcagtttgggtgagacctatgggccgtgggatgaccgttgatgcaaaccgcgttatagctggtggcgtcctggtcttcgtcgagcctgaaacattcaagaagtttctggagctgaaggagaggccccttgtcatagtcggtgaaacggggggattcaagaaggtcaagcttaccatgacgacctacgatggggcgctgataataacccggggcgaagttgagctgtctgagactgcaatagtcgtaaaggctagggagctttcccttgggaaatgactccattgggcaacgacgagcacaagatatcaggaaaaagccgagttagagcggaacattaatgcttcctttttaagcttatcacggcttcaacgtgcggcgtgtggggaaacatatctattaatactgcatcctctatggtgtatgccttcttcaggtggttctcatagtctagcttgaaggccttcgggttgcaggagacgtagacgacttttcctatctcacttctcgcgagggtttccgctacctcctttagcccctttctcgggggatcaacgaccaccgtgtcgtacttccctatcggggtctcctccgccctcccaactttgaaggttgcatcaacattgttaatctcggcgttcttattggctatctcaacggcgaacgggttgagttcaatgccttcaacctggaatcttctctttgccagccacactccaaacgtcccaactccagcgtacaggtctaaaatcatctccccggaggcaaaattctcgacggccttaatgagaagcggaagggcatagctgttggtctggaagaagctgttgggatgaataaggtacgtgacttccccaattctctcgtggatgtaaggcgatccgccgattagttggggctcaccccttgggtcgtctctcttatcggtcttgacgctccagtatagagaatctgcgaatgagaagtatcctaagaacgcctccgtcgtgttgggggaaggaggggagtgggatatcaagtttaccattatctctctcgtgaacttcccctccctcacctggaggtagtgaacgtctccagtttttctcttcaaatcccagggcttcaagccagtctcggcgagaaagcttctcagagcacgtagataatctagcgttttttctgagaaaacgggacactcaaagagatcttccacgtcgaaaggatttccatactttttaagtccaatgcctgtcgttgaaacgatgaagttgctaacgtttctgaagccccaaacttttggagagccctttatatcggcacttatcccagtgatcttttcaaaaagctcgactttgagccgcaactgctccttgtacttcaacccctgccagaggcatcccccgcagaatccgaagtgtctgcacctcgggcgctggcggagtggggaaggatcgaggagttcaaaatccgtaacaattctccttccaaagcggcgttttactcttctggcctttacaaaatcataaggatatgcaaatggaacgtagaggggtttctcttcccgcctcagtatgcccagcccatcctcgcttaagtcccaaatctttccttgaatcttcatgcccctcactactctgtagttttttaagagcttcccgcaggaccaaaaagaagttgagtataaaaattaagtggcaaaaatggaacatcagagctcggcttccccgagcagttcgagcatctcgaggaggcgtgggtctttcactttctcgatggccttcttaacttcctcatcttcgatcttgccgtccttgaagagcgccagggccttgactgcctcgaaaaagtctgcccactccgggaacgcatttatgaacatgtctatgttcaggtaaaccgtctcgaagtcgtcgtcgaggaagagctgccacaagacatccataagcgccccgaaggctatgtcttcgtagtcagtgcccctgccatagaccagggcgtacaggcactcctggagtgccgcctcataatcttcgtactcctcgaagatttcctcaaagctcaggtgagcctcaacgaggagctctctgtcttcgagtatcttcggcaggacacctgcgattatggctttgcccctgtaagtgtcccctgcctcgaaggttacgtagcccttgtatattctgagcctgagaagctccctttcgtcccccatcttctcgtacagttcctctgccttctcgatgagttccagggccttctcgtactcctgaatctcctcgtgtatcatggccatgctgtagtatatccttgcagcgtgctcaacgttacccttggcaacctcttcctcaagaagccccctgaacagctccaggctcttttcaagctctcctatgaggtagtacaggtcggcaaggtggaatttaagctcgaattcatccttctcctttgcgagcttctcgaactcgcttatcttgtcgattcccagtatctcgtggtagtagtagagcaccagcttgtatagctcccagtcgttgcactccttggcgatctcctcggccttttcaaggacttctttgagctgttcatcgctcaggtcgtccaccctgtagtagagaaccctcttgagttccccacagtttttctcctggatggctttcatcagctcttccatgtttttcaccatatctggttagccctcagaatatttaacgctttggcttaggtttttaacccctggctgaaactatagaccatgcttgaagtcttcttcctcggtaccggcggcataatgccgacgcgcgaaagaaacgtcccagccatagctctccgctacaagggcgagataatcctcttcgacgccggagaaggtacgataagacagatgaacacggcaaagctcagcccgatgaaggtggataaaatcttcataacccacttccacggcgaccactacctaggaattcccgcgttgatccagactatgaacctgtgggacaggcagaagcccctccacatctacgggccgaagtacaccttccagtttgtccagaaccttttgaacagcggctttttcaggccgggctttgatatccacgtccacgagcttggagagacgaggctgaagtttggagactacgagatatggagcttcaaggtcgagcacggtattcctgccctcggctacgtcttcaaggaaaaggacagaagggggaagttcctgaaggagaaactgagggagtacgggcttgaggagggcccgatacttggaaagcttgagagggagggcaaaatagagtggaacggcaggataatccggcttgaagacgtgacagggccaagaaggaaaggtttaaagattgtttacaccggcgacacggagccctgtgagagagtgaaactcttttccgagagagcagacctgctcatccatgaggcgacttacctgaaccctggagacaggggagacagctaccactcaaccgtcgaagaggcctgcgacactgcaagaagggctaaggtgaagctacttgcactgttccacagggcctttcgctacagttatgaagactacgttgaagaagccctcaagatatgcgaaagccttggagttagggcagtagtcccgagagacttcgatgtcataactttcaaatcgggcacgtgggagcttagaaaccttctggaggagagagaatgaactacctacgttacgtcaaaataataggaacgatgcacgtttcgccaaagagcagggacgaggtcttcaggacgatattaaaggagagaccgcacgccgttgccgttgaacttgacagggctcgatttatcggaatgcagcagaaaatagaaatgaccctctctgactccctcaggctcggaagaaagggcgtgataaactacgtcctcgccaaggtcgaggagaagctcggtgagacgttcggaatggctccgggtgaggagatgaaggcagcgatagaggccgcccgcgccattggagtacctctctacctcatagacgaggacataggtcttattctcgccaagatatcccgcgcaccagtgagggaaaagctcctcatggcgctggaatccctgggggtcttccttcccatcaaggccgttgacatcggcgacccttttgaggaataccgctggatgatgctggagttcaggaggaggtatccgtacctttaccgcgtcctggtggaggagaggaacgaggtaatggccagaaaccttatgatgatagtcgattcactgctcgctgggggagtacaacgtccgaaggttgtggcggtggtgggtctgggacacaagcccgggatagaacgcattctgaacagaggaaagactgaacccgttacttttatattctgaaacgtcaagaacctttggagggccagccatgaaggagaggcttgagaagatgctcaacgtggagataatcaggatcgaagaggccgacgacaagatagttgtctacgttcccgctgataaagtcaggattgccgtcgggagcggcggtgccgctgtgaaggccgccgagctcgtcatcggcaagaagatcgaggtcaggcctgcagagtgatatcactcagggtgataaagaggctaaaggttaaatacccacactccctttttttaacggtgataccatggagtacaagcgccctattggtcttgatattgaccttgagaccggagtgattcccggcgctaaaaagctcgtcaggaggctcagcgacctcaagggctatttccttgatgaagaggcctacaacgagctcctcaaggaagacccggttgtctatgaggtctacgcaatcgagcaggaggagaaggagggcgacctcaacttcgccaccacggttctttatccaggcaaggtcggtaaagagttcttcttcacaaagggccacttccacgccaagcccgacagggccgagatatactatggcatcaaagggaaggggggaatgctcctccagacgcctgaaggcgaagcggaatggattccgatggggcccggaaccgtggtctacgtcccgccctactgggcgcacaggactgtgaacaccggaaacgagcccttcatcttccttgcgatatacccagcagacgccggccacgactacggctcgattaaagagaagggcttctcgaagatagtcattgaggaagatggggaagtcaaggtcgtcgacaacccgcgctggaaggagtagcccgaaatccttattagtcctatctcttttttcactcttggtgatacatgtgaactgggatgggctttacgcttctgcatttgagaggattcgcgacaacataggcaaggttggaaacgtacttctggcatacaacaccaacatcgacgcaataaagtaccttgagagggaagaccttgagaggaggatcggagcagctggcagagaagaagtccttccttattcagagaagctccccaagaggatagagagcgttcctcaacttctaggctcaattctctggagcatcaggaggggcaaagctgctgagctcttcgttgagagctgttcaacgcgcttttacatgaggcgctggggctgggacgagctgaggatgggcggccaggtgggcataatggcgaacctcctcggcggtgtttacggtgtccctgtcatagcccacgttccgcagctctcacgccttcaggcagaactcttcaaggatgggccgatttacgtgccgaaggttgagggtgggaagcttaaactcgtccacccgaaggagtttaaggccgacgaagagaactgcatccactacatctacgagttcccgcgcgggttcagagtttttgacttcgaggcgccgagggagaacagattcataggctctgccgacgactacaacaccaacgttgttataaggccagagtttgaggagcattttggggagatagctgaaaagaccgagctggcgataataagcggacttcaggccctaactgaagggaactaccgcgagcccttcgagacgataaaggagcaccttgacgtcctcgaggggaagggcattcccgcccaccttgagttcgccttcactcccgacgagaccgtgagaaaggaaatccttggagttctcggcaagttctggagcgttggcctgaacgaagtcgagctggcctcgataatggacgtgatgggtgagaagaccctcgctgaaaagctccttgcccacgacccggttgacccaatagtggtcacgaaggccatgcttaagctcgccgagaagacgggagtaaggagaatacacttccacacctacggatactacctggctttaaccgactaccgcggcgagttcgtgagggacgctctcctgttcgcggccttagcggcggctgcgaaggccaaactgggcgacgtcaggaacatagacgacgtcgtgaaggcgatggacgtccctgtgaacgagaaggcaaagggcgttgaagaggccctcactaaagagtacggcatggagaacggtattgcggaggttaacggctaccagcttgcattcattccgacgaagatcgtcgccaagccgaagagcaccgttggaattggggacacaatatcaagctcggcctttgtgggcgagttcgctcttcgttaacccctttctttatccttaagagttataagaagtgctgtcaacttgctccggtgggaatcatgaagactgtactcctcgcgggtgggaaggggacgaggctctggccgctcagcagggagctgatgccgaagcagttcgtccgcttcctcgacgatgagagcctcttccaaaaaacagttgagagggcactgcttttctcaaagccatcggagatattcgttgtgaccaacaaggactaccgcttcagggttatggacgacctcagggagattaggatagagttgcccgcggacaacattctgcttgaacccgtcggtaaaaacaccctccccgctatagtctgggcggttcttaagattgaggagaagtttggaccttcaaaggttgccgttcttccgagcgaccacctgatagagacaggtgaagcctacgaaagagccttcgagaacgctgagaggcttgctgataagttcctggtgacgtttggaataaagcccaacagaccccacacgggctacggctacataaagcccggtgagagaatcgaagaaggcggaaggctcctcggctacagggttgacgagttcaaggagaagcccgacctcgaaactgcaaaaaggtacgtggaaagtggatactactggaacagcggcatgttcgcgttctcgacgtccctcttccttgaggaagttgaaaagcacgcgcctgaagtcttggaggcctttgagtctagctcgagcattgaggaggcctacgagaaagccccagagataagcatagactacggtgtaatggagaagactgagaaggcagcggtcgtgccgctcaacgttaagtggagcgaccttggaagcttcgacgcgatttacgaagtccttgaaaaggacgatgctggaaacgcagtccaaattcgtggtaagaagggctaccacatcggcgtgaactcgaagaacaatctgataatgactgagaggctcaccgcaacggtcggcgtcagcgaccttgttattatagacaccggcgatgcccttctcgttgcccacaggggggagacgcagaaggtcaaagagatctacagggcactcagagagatgaacgacgagagggctatcgtgcatagaaccgcctacaggccttggggaagctacacagtccttgaggaaggcgaccgctacaagataaagcgcctaacggtcctgccgggcaagaagctttcccttcagatgcactaccacaggagcgagcactgggtcgtcgttaggggaactgccaaagtaatcgtcggtgatagggagcttctcctccgccccggcgagagcacctttatcccagctggagtcaaacaccgccttgaaaaccctggaaaggtcgttctagaggttatagagactcagattggggaataccttggcgaggacgacatagtccgcttcgtcgacgactttggaagggattaaccttttaatttatttatcactctcagtgataggggtggttgcaatgggaaagctctttggaacgtttggcgttagggggatagcgaacgaggagataaccccagagttcgcccttaaaatcggcatggcctttggaacactcctcaagagggaaggtagagaaaggccgctcgtcgttgtcggcagggatacgagggtgagcggtgaaatgctcaaggacgccctcatcagcggacttttgagtaccggttgcgacgtcatagacgttgggatagctccaacccctgcaatccagtgggccaccaatcacttcaatgccgacggtggagcggtcataaccgcctcccacaacccgcccgagtacaacggcataaagctccttgaaccgaacggcatggggttgaagaaggaaagggaagccatcgttgaggagctgttcttcagtgaggacttccacagggctaaatggaacgagattggtgagctgaggaaggaggacataatcaagccctacatcgaggcgataaagaacagggtagatgtggaggcgataaagaagaggagacccttcgtcgtcgttgacacctccaacggcgctggcagtctaaccctgccctatctattgagagagctcggctgtaaggttgtttccgttaatgctcatccagacggccacttccctgccaggaatcccgaaccgaacgaggagaacctcaagggtttcatggagatcgttaaagctcttggagctgacttcggcgttgctcaggatggagacgctgacagggcggttttcatcgacgagaacggccgcttcatccagggcgataagacgttcgcgctggtagccgacgcagtcctcagggaaaacggcggcgggcttttagttacgaccatagcgacttccaacctcctcgacgacatagcgaagaggaacggagccaaagttatgagaacaaaggtgggtgatttaatcgttgccagggctctcctcgaaaacaacggcaccataggcggcgaggagaacggcggcgttatcttcccggacttcgtgctcggcagggacggggcgatgacaacggcgaagatagttgaaatctttgccaagagcgggaaaaagttcagcgagctgatagacgagctgccaaagtactaccagttcaagacgaagaggcacgttgagggtgacaggaaggctatagttgccaaagtggcagagcttgcagagaagaaaggctacaagatagacaccaccgacgggactaagataatcttcgacgacggctgggttctcgtgagggcaagcggaaccgagccgataatcagaatcttcagcgaggccaagagcgaggaaaaggcaagggagtaccttgagcttgggattaagttgcttgaagaagcgcttaagggctgaagctcccatcctctatatttttccttccgccagcaaaaaaaaaagaaaattaaaagctttcagccgctctttatgtagaagcccatcggaatttccgctgagcatgagctgaaccatcccgtcttgaacttgtacttctgggagctttttgtggcgttgatcgttattgtaggcccattttcttttattgtgccatctatggagatgcttcctgcattctcgtactggagtgaagctgtgaggcccgcgacgggagctggtgctccgaacgcaacggcaatggctcccacagggattccgattccaaatttgacgccgcagtccccactggtgcccttcaaaaggtatttcagagttattcctttgttctcctcaagtggatgtaatatgccctccttggtaaatttgaagaatgtccagtcgaaaccgggacttccaatagatgcaccgccatctattatgtatccatgaactcccttactagctttcacatcgtagataccgacgtctatcctctccctaccggtttcactgcattttgctccctcgcagaggtactccttttcgtgtctgtagtagggtttggcccagatgtagatataacccatccttcccttgggaacgtctactatatctccaaagtaatagttgccctcaacaggaacccacctctttccgtatatgtctactgaagatgatagcacatttactgggtctccacttctgaactttttctcaaggtcaatcccgtaggcgatggtcgctgagaactccgtcttgtacgatgcttccagagacacggacccctggagctccccctttccgttcctgttgtcaatgatgaggatgggaacctttacgtattcttctgcttcccaggagtcatctgcgggcctccactcgtagtagtaccacctttcgcgagcaggttttgggagaggttctttttcgaggagctcaaccgataccctcttggtagctcccctcaggtcttccgccgagaggaagtccgagccgatccccctgtagagctggccgttttctctgtctatcacccataccgagaccctgattccgtagcgcttctcctcgcttatgctcgataggaacttccggatgtcctcaactttcaagacactcctcgtcgtgtcgaacttccagaacccagagcgcttgatccggtagtggccgagggtcttaatgccggagggcgtggcaacgtcaatttgaacctggatttcatagtctcctgaaaagcccctcagcatctttccgttctcgtcagtcaatactactctaattcctccgtctggtggcatccattccgccgatacgcctgttcctatcaagagtgctgttaatattagtatgctgagcatttttaaaatccttctcattaggagtcactaaaataattaagatcaaaagtatttttaaagtttttggctattaatgaggataagaaaggagttggttcacagcaaaatgtcaatccaagtcggagaccttccacattttcagcagctcaaccccttcttccacgctccgcggaaccttcaggccgagcctcaggaaaagctccacgagcggcggtacgtcgaggttgtgccccctaagaagttcagggtttccgagcacttcttcaggagaaccaactttcacgattttacccccgtccatcagcgctatcctgtcgcagaggaagaggtattctgcctcgtggcttgcgaggatgactgtcttcccctcccgcttcagcccgagtataatctccctgactgccttcttgcccttaaagtcgaggttcgcgaagggctcgtcaaagacgattacttcaggttccatagccaaaacagttgctatcgctatcctcttcttttcgccgaagctaagcgccttcgtctcccggttgatgtagtcgagcatcccaactctcccgagagcctcttcaacacgctttctgagctctttacccctcagaccgagattgtatgggccgaaggcaacgtcctcgaacaccgttggagagaagagctggtcgtttggatcttggaagacgagcccaacaatcttccttgctttcccgggctttttaactgggttgatcccgtttataatcacttcacccttcttcggctttagcagtccgttgaggtgcaggatgagggtgctcttccctgccccgttcggcccaaggaggccaaaggcttcgcctttcttgatcctcaggttcacgcccctcaggacttctctcccgccgtatgagaagtgaaggcctttgatctcaatcacagtatcagtccccctgcggcgagtgccatcaggacgaccgttccgggtgttggcctcggctcctcaaaaaccggaaactctccaaagcccctcgcgagcatggccctgtaaacccttccactcctcaggtaggccctcacgaagacctctccaaagagagaagcgagcttcctgtagtattcggcccttcccacaccgaaggctctggaatcgagggcccgcttcatcctggtagtttcctcaacgaagaggtcgaggtagcggtaggtgaaggcgagtgtgaggatgagaacccttgggaccctcagggcctccatttcggctagaatcctcgtaaaacccaccgattcaacgacgatcagagctgtaccagccgagagaaaggccttccccagaaggaggaagaacgagttcagtccttctctcgtcacatccccaaatggagtgctcaaaatagtctctccagggttgaagagcgcgagaaggaaaagaaatccctcaaagccgaggaggaaagtgagctttttgagagtgcttttctccgggcggaatgctacgacgaccgccgcgaaaagcaggaagaagtagactaactcgcccaggctcttcctcgttacgaccccaaaagcgtagagaaaaataaagggcaggtacacctcagacacccttcagggctctgctcagcgcgtaggccactccaaaggttagggctattccgaggagtcccatcgcgaagctctgcccccacgtttcgccgtagtcgagcggtgcctcatagatgggcttctcttcgagtccgaccttctccatcgttgcctcaaggccgtcagggttgctcgatgcaaggggaaggacgatggccagcacaacggctattatcattagaccctttatcacggccttcatgcaggcaccccctctatctcgggaagcctcgccttgattgaataaactatcagaaccgttagaacggcctcaccaatcccgatgagggcgtggtagccgaccatcaaggaaagaaccttcgtgaaggggaggctgtggctgaggcctatctcaactgaagccagcgccgcaccgagcacaacggagagccaggcggcgagtcccatcgcaaagccctcgtggatgctcttgagcctgctgtaaacccagtagccgatgaaggccccgatgagtcccatgttgaggatgttggcacctatcgcggttattccgccgtcgccgaagaggagagtctggatgaggaggactgatgtcatgacaatcactgccgcgtaggagccgaggagaaccgctaccagcgttgcaccgagcagatgtccgctgaccccgccgattatcgggaagttaaccatctgcgccgcgaatatgccggccgcgaagagcccgaggagagggattttctcttctggaacctccttcagctttctggaagagtacgcaacagccagtatcgttatcgcgtacgtcaccactatcacgggcgtgcttaacagtccgtcaggaatgtgcaactgggacacctcctattctaatcgtgctatcattatcaaaaaaagtagcatcaaataaaagcgtttttaaaaccgcgtattaccaacctaaggtttgaaactggtgtaaacaccaaggaaaaagcaagaatttgggaaaacagaagaggcggagttcagaggtagcccctgtcctcctcttcctgcgttgactggggcattccctgctccagcatcgccctctgcatctcctgaactttctggagtatctcctccgtctccttggcgcgctcttcgagggcggtcatgtcaacctcgatgccgagtatcttggttactgcgctcaggactgccttggcggccttggggtcaactatgtagccgaggctctcaccgaggaggcttaccccgtacattgagcgaagcttgcccatgccgaggagaaggcccgccgctcctacgatcgctccaccctcgtcctccctccagatgacctcgaccgaacagccctcaagcttcttcttgtagtactcgacgagctcttcatgagttaccgccgccagaaccctcggttcgccctggagctcaggcacctggtagccgcccatggttattatttccctgacgccgagctcctgaacgaggtcgagcatctttccaacgacctcatagtgcccggggctgtctgttggtggaacctgctggtcgccggttattatgatgaggtctctgccgtcctcgtcggggttaacccagtagtagaactcgttcttcatcagctcgactatcgagcccttcttgatgagaacctggtgcatgaagtggggtgagtatagctcggcgaacttgactgcttcaagctcctggatgaggtggtcagccgcgagctttccaacgaggcctatcccgggaaggccctctatgaagactggatctctaagctggggcctctcaagcaggtaaatcatcgtttccttcatcttcaagacctcctaccaataccgaggagttcacgcttgagcctccgcctgtactcgccgtacgggtcttccggcgagaagcgtgggggatgagctaccttggtctcgcttccacagaccgggcagacttccttcagcgtgtacctcccgcagttgggacacttccttatcctgaagtgcatcaggaacccctcttcttaactttcttaatcctcttctccttccttatcagcgtcgcctctccgcccgcttccttgatgacgcggaggatctcctcggctatgtcttccagaacctcctcggccttgtagtagtctggagcggtgatgtcgatcctgtacctcggagcgccctggtaggagaacttgacctcgatgtccttctcctggttggccctgtcgcgggcctttatgagcgcctccttgattatctcgatgccgttgggcttcggaacggttatctcaaactccgcatctatcgtgaccgtcggaatctcgacgtaggcctcgattatcggctttagagcctcaatccactcgtcgctgatgagtcccttgaggacgtccataccgttctgggccgcgtcctcaaaggcagcataaacctcgccgtactcttcctcaagcgggacccagacctctctccaggccgtttcaaagtcctttccgagcttttcggcagccattttgagcaggttctctgccttctgagccctcttgtactcctgaagcttcgccttcctctgctgctggttaaccctctttaggctcaggtcgatgtgtcctttctcggggtcaacgcggatgaccttggcgactatcttctgtccctctttgaggtagtcccttatgttcttgacccatgtgggagcgacctcgcttatgtgcatgaagccctcctttccagggtactcgtcaagcgtgagaaaggctccgtaagggtgaatgttcttaacggttgcaaccacaaactctccttcctctgggtactctttagccttccttggcatctcaatcacctcaaagttttctctccgagaagattaacgagaagaggttttaaaagtttggtgaaaaggaaaggaatcactcaagaacttcgagaaccttggccttgatgatgccctttccgccggtcggctcgacgagggtggcaccgcagaccaggcacctgacgggagtggccgggtggctgaagactatctgctcgttgccgcagtcaatgcacttaacgcggaggaacctgctcctcggcatcggaatgaggttcttcgggagggccatcgcatcacacctccaccagctcgaacttcttcacacggaagccctgtcccctggtgtgggcctttccgcagacggtgcagcggaacctgaggtcgagctttttgaccggcttctcccttccagccgggttcggcctcgggaaacctgtgtaacccttgagctttctcctgaacctcctctggcccgcgctcagctcgctcctcggcctcttcttgaccttctcgaccttgtgaatggtgtgtctcttacaaaacgggcagtacgtccttatctgcttcgggtacttcattcctctcacctccgagagaggcccggtgggttcctacttgccttcggatacccccgagccatgaggcatgatcgcctgcaggcatcggtatgggaaaggctttaaaaaagtttttccgcggggaaaagtttaaatacaaaatgttattaaagtcttctggagagccgaaggaggtgagaccatgaagctcgccgaggcagtcacaaacgtgaaggaagtcgaaaagaaggccgaaaaggaatacaaggcccttctcaaaaccctgaagagcccggagtactctgatctcagagtcctccttctgaggatgaccgttgacaccattctccacaggaggcttgcagaggcacttgagaaggcttacaaagaggccattgagctgatcgaagagttcgggtacgttgacgtgcccgagacgcccgaaactgccccggggaaccaggtgtccagcggtctcgtcctgataccgggaattccggccgtccaggtcgccccctacgggctccttggaagcagaatcccgcctgaggacgccctcgaagagctgctcaagaaccttccggataacgtggcgcttccacccgagaagctcagggagataagggacaagctagaaaagctcagggccctctgcgagaaaatgagtgagaactacagaatccttgagcagaacgcggttcacccggtcgtacaggcctttgcggagagcgcgaggaagaacgaggagcagcacaaagttgttgttgacgggctgttgaagaggtattcggaggagaaatgagcttcagaggctcaggataaacgacaccacgaacggaaccaccgccgtaaggatgaagccgtggacgaaggcaactaaggctgtttcccttcccccgaattttgttattatcggcagggttgtgtccatggtcgttgccccgcccatgacaacggccttctctggagatacccactttatgacaacagggtacaggattatcgtcaggatttccctcaacaggttgcccaaaaacccgatagcaccgtagattgccgagtactgggctatcagcgggccggttattgagtaccacccgcaccctgcacctattgcgagtccccacttcaggtctattccaagcaccaacgctccaacagccccaccaagaagagaccccaagagtgtctccgtcggcaggaggagggacttctttccgagttttttcagctcctctgcgttgaggctcatccccagatcgactcctatgaggagtataaggagatcgagcataacctcgtaggcgtttccaaaatccggactgaagaaatgcccgacgagcagcccgaggacaagagacccgagcacaaggtagagaaacctcaagttctcacccccagagccagcaccaaacttccgagaatcgttagaaccgcgaatacgagggaagaagcgaggagccacagggcgctgactttaacggttccagtttttacgcccaggaaaaatatcatcaggaggagagcaacgcttatggccgtgtcaactttcaccctttttcctgttctcctcaggatgtagccaattaacagacctccaagcagaaatacgaagatgttcatggtcttgaaaaactgactgccattaataaaattatcgaagggctcggagggtgttcacgtcatcatctccgggttcagaatgcttgctactcgtcattgcccatggaaagtccagcccacactttaaaacccttcctgaaaaacgttcgattccagagtacccaaaatcgtgccaaggtttttatgatggacgtcttaatggtgggtggtgattcacatgatcaaaccttccgaaagggcgatgggcgttgagtacgccataagggatgtcgtcctcccggcgagggagcttgagaaaaagggcatcgaggtaatcagactcaacataggcgaccccgggaagtacgacttccagccgccggaacacatgaaggaggcatactgcagggccataaaagagggccacaactactacggaccgagtgaaggtctccccgagatgagggaggccgtcgtccagcgtgagaagaggaagaacggcgtggacatcacccccgatgacgtccgcgtcacaactgccgtcaccgaggcacttcagctcctctttggtgcactcctcgaccctggagacaacatcctcgttccaagtccgagctatccgccttacaccggcctcgtcaagttctacggcggaatacccaatgagtacgatacaatagaggagaacggctggcagccggacattgacgacatgaggaagcgcataaacgagaggactaaagcgatagccgttatcaaccctaacaaccccaccggagcgctatacgagaagaagaccgtgaaagaaatccttgatctggccggcgagtacgacatacccgtcatcagcgacgagatttacgacctcatgacctacgagggggagcacgtctcacccggctcgctcacaaaggacgttcccgttatagtcatgaacggcctctccaaggtctacttcgccacaggctggcgcttgggctacttctactacgttgatcctgaaaacaagcttgccgaggtcagggaagccgttgacaagctcatgcgcataaggatatgcccgagtaccccggcccagttcgcggccatagcgggtctaactggcccgatggattacctggaagagtacatgaaaaagctcaaggagaggagggactacatctacaagcgcctgacggagataccaggagttagcacccagaaaccgcagggggcgttctatatcttcccacgcattgacgagcgctccaagtggaagagtgacaaggagttcgtcctcgatgtcctccacgaggcccacgtcctcttcgtccacggttcgggcttcggaagggctggaaactggcacttccgcatagtcttccttccgccggttgagatactggagaaggcaatggacaggttcgaagagttcatgagaaagaggctggcggagtgatttctcccttccctttttcatccgccagagacgacggggattacctcgacgtaagcaccgtcctctaccttttcttcctccagggcaacccttccgttcaccctcgctatggcgctctcggtgttgaagcccacagccctgagcacgtcagcgacagtaacccccttctgccactctatctccttttctattccccttccgaggactttgacccttatcatccctcaccacctgttctggctttgagcgtgtgaataaaagggtttctctaatagaagaggagtgtcctcctgaaaacgtccctgtggtttccaaaggcctcgaacatcgcccccgagtagctttcaacggccaggtcgaggagcctgttcaggttcgagtttatctcgtcgctcatcggcatgtagagcggagccggctcgtagtagtccattcccttgaggagggaagttgagaagtaccagagggtctttttgatcttcctgcccctcactggagaaaagctcgcgtctccaccgccaaaagccgcgtgaaggacgattatcttctcgatttccacgccccttctcagtgcaatcctcctctcggagctcgatatgtccacgatcctgtatccgctcctcgtggtgtcttggtattccacctttatcccatagatctcctctatcttcgggtcgtacactaggacgtcggtgcctcctatgacgaaaatcctcccgtcccttacgtccacaacggtgttttctgtgctcagaaggggaagaccctcagaaagggccagggcggaaatcgtgctctttccggtgtggggatacccaacaaagagaacggcttttccgttttcgtttataacactgacagaatccgtgatgaaaatcctgcctttccttgcaccggccctcgcggttgcctggaggaggaagaacacgggggcctcgtttttgtacgcctgcgggacggcggattcgagcttgtagtagtcctttgaattgacatcgtagagagaactgaagaccctgaacttctcgcccttgaagcgttcgatgattacgtttgggcgtgcatcaccacgcagaacatccggaagatagcgcctggcaaaggttgtccgaaagccgtcctcaaaaccgtcgtcaagctccccttcgaagagtaccccaacgcccccgacgctgatcatcgccatcgttcatcatctatggtgcagggttataaatcattcggagaatttttatacctcacatccaattccctgagaggcctatggtcacgctcatcatagccgagaagcccaacgtcgctaggaagatagcctatgctttagctgaaggaaagcccgtgaggaagacaatcggcaaggttagctattacgagttcacgcgggacggaaagaaggttatagtcgccccagccgtgggacaccttttctcccttgctccaaaaaccaagacctacggctacccggttttcgatatcgaatgggtccccgtctatgttgctgaaaaggggaagagctacgcgaaggactacatcaaagcccttgcgaccctcgctaagcaggcagatgagtttgtcgttgcctgtgattatgatactgagggtgaagtgataggttacacggccctgaagtacgcctgcggcgttgatccatcaaaggcgaagcgcatgaagttctctgccctaaccaaaaaggacctcctcaaggcctggtacaacatggagccgacgataaacttcgggatggccgatgctggaatagcccgccacgtcctcgactggtactggggcgttaacctttcgagggctttaacttccgccataaagcgcgcgagcggaaagtggatggttctctcgaccggaagggttcagggcccgaccttaaagttcctcgtcgagagggagaaggagatacagaactttgagccgaagccctactgggtcatcaagatgctcctcgaaaagaacgggggacagtatacagcggtctatgaaaaggagaaggtgtgggacgaggaagaggccaagaagatagtggaagaagccaagaaggggccagctttcgtcgagaaagttgaagtaaaacagcagaacaggaacccgcccgttcccttcgatctcggaaccctccagagggaggcctactctgcgttcggctattccccgaagaagactctagacatcgcgcagaagctgtacgaaaagggttattgcctgcatccagattcactaataccaactccccagggggttaagagaataaaggagcttccagagaaaggagaggtctttgcgcttgactttgacctaaaactctcaagggccagatacagactccttgaaagggatgcggatgagccgatgtacaaggttaccttaagtgacaggacggagctatacctcacggcggatcatcccgtcctggtataccgggatgaccagttgatctttgtcccggcagaagaactgagagagaatgatcaggtcgttctttttataaacagaagcgagtactccccaagaaccgaatctccgacgctcttgggcttccttcttgaaaatgccacttcaatgaaggattacatcctctatgacccagaatttggcggcgtcctgaggaacagaataaaagacgccggtttaaaaactgagattctgtggcgcttcaggattagggagccgacctattacaaatacctgaggggcaagatgcccgttccgatagttaggttcctgctggaggagggtgttgtatccatcgaagagctgagggaagtatttaggggattctcctacagcacatcactgacccctatttcctttgaattcagcgaggagttctggtacctctttggactcgtggcgggagacggtcatctcgcaaagaagggagcgataacgataccagcaaaggacagaactgaggacaccgtgaaggctgttaaagagatagcgaactctcttcaagttccttttgcctttgacgaaaagtacaagatgataatccttcgtagcaagtcgctaacgaggcttttcgaattgctcggttgtccatatggcaataagaccgaaatcttcaggatcccaggagagataatggctaagccagagtggatggcggcgtttctggccggttattacgatgcagacggccacataggaacgaaaccaaccggtgggaagaaatctcattctccgcagatagttctcacgtccaaaaaccgcatggccatatatactgttaaacagatgtggcagcttcttggggtcggaacgtatctgtgggaaaagaaagacagaaacgggaacttcatggcctacgagcttaaggtatactcccgcgatgcttggaggttctatgaagtgatgaaaaatcacctccggatcaaaagaaaggatttggaacacgtaaaggaagttgccattaggaaaagaaaagcgtactcgcaccactacagcgttcttaacgtcaaaagctgggaaggaaagataaaatccagcaacgttctttggaaaaagttcgatatgtctaaccaaaccgcacacggcagaggaataagcctcgacaagctccagcggatagtggactatctcacggacactgatctgcgcagaatagcaatgggcgatgtgtacgttcttggtataagatccattgagaaattccactaccgcggtaaggtgtacgacctcgtagttgatcaatatcacaacttcattgccaacggcgttgtggttcacaactgctcttatccaagaacttcctcccaaaagctccccaagaacctgaacttccgatcgataatccagaatctagccaagctaccagagtacaagcccttcgcccacgagcttttgggtaaggaaagcctcaagccggttgagggcaagaaggacgacccagcccacccggcgatatatccaacgggcgagcttccgaagcccggcgagctgaccaaggacgaggggaacctctacgacctcatagtgaggcgcttcctggcgctcttcatggagccagccgtaagggaaaccatgaaggtggtaataaactccaacaaccaccgcttcatcttgagcggtgcaaggactctcaaagagggctggctgaaggtctatggaaagtacgtcaagttcgacgaggttatcctcccggcctttaaggagggtgaacccgtaaaggtcatccagataaagcgcgagaaaaagaagacgaagcctccagcaagatattctccagcggcggtcataaagaagatggaagatctcggcattggaacaaaagccactcgcgcccagattctcgagactctctaccagaggggctacatcgagggcaagaagaagatcaaggtgacgccgctcggcatgagggtcgttgaggctctcgaaaagaacgtaccggatatagtcagcgtcgagcttacccgtgcctttgaggagaagatggaggagataatggcaggaaaagcggacaaagaccaggtcatcgaggagagcaaggagcagctgataaagatactccaggtcttcaaggaaaaggagctggatatcggtaaaatgctcctcgagagcactggaaccggtgtaactacgagcaaagaggccgcaaagaaaacgggggcggttaaagatgccaacgacgaagaaaaatctgacggcaaggctggggagggaactactccaaaagccgagaggaagcccctcgtcgtgggcaagtgcccaaagtgcggcggcgatctggtcatccgctacaacagaaagactgggaagaggttcgtcggctgctccaactggccgaagtgcgatgtcacttacccaatcctccagcgcggtcaggttatccccactgaaaagacctgctgcaacggtgcaccagtcgttaagatacgtgagaagggcagggagtacgagatatgcctcgatatgaactgcaaggactggaaaaagaaatgaattaaagcgccgccagcagggagattccgaggaggagcttgaagagccacagcactatgacttcgattattatggccattaagaaagccagtgtagccctcagccaatccgtgtcaaacacgacctttatcacccagatgtaggctactatcccaagtatccaaccgagcactgggattatgaacaggatccctgccaggattccaccgccaacgacggccactattgatttcccaaggctcgcttttttgatccctgctagctctgtaccgaggtacagaacgaagcccgctatgaccagtgcgatgagtagggctattaaacccgctatcccgattgccagcaatccaagaccgagtgctccgtgcatggtaccacctctttacttttggaattttggacattaaacctttgtggcctcaaagggaaaacgtttatctggagaagcgctacttacaaacatgctagatgaggaacgtactgccagaacgttgctggaaaactctaagagtgttctaaatgaacttaaaacccgggtttccgagaacaacgttacactagccttcctcctggacatccagtcactcttcgtccttggactcggagatgccagtctctacgctttcgcattaaacatggacgacgtcgttgaggaatcctacaagatctttcgcgaagggtattccctgctgaagaagaacggcctcttagtgagcaaccctgatcttgatcttcagttaggtactctgaaaaatttggatgtcgagcgcggtttttccctcgacagacggctttcaatgctcggaagcccaaaggagatgcaggtgtgggtgaacaggataatcaagctgcgtaatgctcttcacggtgtttttccgcgcgatccccttagggagcttggctacggaatgtcaaaggatgaccggaagtttccactcctcttgaaagccgttaggcggatctacgggatgaatcctccgacaatcgaggccctatctagacttttataccttgagatggagcttgggcttgaaccctctaaactgtcctgtaaagatggtctctgtgaggagattacatccattggggacgttgagaacttcgaagtggtgagttcgggcgatgttgggctttactatcgcttcaaaaacaagaaacacctggacgctccctggggaaggctcacgatgggggagccggttgaaataatagtgttctcaaaggaaaagaagaaggggttcagactggttaaagaagctccttgaggaggctgagcctcctcttgctcatcagaaccttcgggtgcttcaatagggccttgatgacctcggcgtaatctccgctggctatcttctcggcatctgcaccgctgaggatctgtatgaagaggtcgaggtcctcatccgtgagcttctcggtaacgcgcctgaccttgagaaccttttcgagccgctttccgtcggtctcccaccactcctttgtgtagttctggaggagtgagaggttctcctcttcgagggccttgacaatccacttgctagctatcgtcccagcctccatcgcctcggccattccgccgccgtgcatggggtttacctgtctagcggcatcccctacaacgaccacgttatctttagcgagttctttgacaaagcctccaacgggtatgagtccgacatttatttcaaggagcttctttgctggaatgttgttttcctcgagccacttgtcgaggtagtatttagctgtctttggattgtccgagttgatgccaatgccgacgttggccctgtcttcgtccttcgggaagacccagacgtagcccctgggagcaacctcgttgccgaaccagagatgaatcaagtctggatcaaagccctctatgagcatctcgtactcgtagcctgagtcgaactcatgcggcggagcgtaggtgtttatgcccgctttcctcgctatggtgctctcaacgccgtcggccgcaactatgatatcggcgtaaatctcgaccggctcgtcctcatgcttggctttgattccaactatcttgccgtcctttcttatgacatcgagcgcctcggtcctcgcgagaacatcggcgcctgctttggctgcataataagctagcatcttgtcgaagaccttcctctcaaggatcactccgctgacttccttgtagcgcatttcgagctcgtagccgctcggggagtagagcttagcaccgtaaatctcgcggttgatgaagcgcttgtcgtaggggatgtcgtacttgtcgaagaccttaatgcttattgcctcggcgcactgctttggagtacctatagcccacttcttatcgatgagaaggacggagaaaccagctttagcgacgttcctggcaactatggggccagcgataccagaaccgacaacaacgacgtcgtacttccaggtcattcgctcacctccaggggtttagcgctcagggctccaacggggcaggcgttgatgcatatcctgcagcttatgcacttgtcttgaaggaactcccagcctgttgagtgcacctctatcgcgagtgtcgggcagacaccggcacaaccgccgcagagatagcatctatcttcgttcacgaccactttaatcttctccggcatcggtttcaccacccagcttcgccttcagcctttcctcatcaatctcaattacgccgtcttttattcttaacggtacgaatctgtccagctcttcggccttctgcaggacttccctctccttcaggttgagcctgtcggagagctcatctaccgtcgcccttccattcagaagaacgtagtggaggatcgccagctgggtcatgtcgccgatctcattaaggtaagtgtcctttatcgttttcatgagttcgtcccttctgctttcgatagccctaagggcttcaagaactttctcaagctctttggttaccctcataaacagctctaccatctcaagaaggctctcgggattctccttcagaaggtcgaggtttatttccacttctccactcctctcgtcgccgaggtcaaggccgcggtaccagaagatgtttggtgttattgtggcgacgtaagttttggctatatcgatgttatagtacttcctcgctggtccgagaaacgggccttctttttcgtaggacttcaaaatcccttcgcgctccatgattttaaggtgctttgcgactgccgtcgaggaaacgctcatcttgttgctgagaaagctgaagtagcactcagtacaggtgaggtggcttagtaaatctctcctcaccttgttccccagtatgtaaaagatgtctggttcagacatggccaacacctgcccaaatctgtgacgtaaggtttatatagtgaacattcaaccttaggttgcaaacctggggattccaggctgaagatggtttcacacggctggttataaacctttagatggaggtgtttggtatgggactcattagcgatgctgacaagaaggtaattaaggaggagttcttctcaaagatgactaacccggtcaagctcatagtattcgtcgggaaggagcactgccagtactgcgaccagctcaagcagctcgtccaggagctttccgagctcaccgacaagctgagctacgaggtcgttgacttcgacactgaggagggcaagaagctggccgagcagtacaggatcgaccgcgctcccgccaccaccataacccaggacggcaaggacatgggcgtcaggtacttcggccttccagccggccacgagttcggagccttccttgaggacatcgttgacgtcagcaacggcacaaccgacctcgctccggacaccaaggaggcaatccacggtgttgataaggacgtcaggatactcgtcttcgttactccgacctgcccgtactgcccgctcgcggtcaggatggcccacaagttcgccatcgagaacacccttgccggaaagggcaagatactcggcgacatggtcgaggcgatagagtaccccgagtgggccgaccagtacagcgtcatggccgtcccgaagatagtcattcaggtggacggcgaggacaaggttcagtttgagggagcttatcccgagaagatgttccttgagaagctcctcgctgccctcgagtgatttcttccctttatatcttcccttatgtacactttagtccatcatgggactcaaaacggcctcacaagggttcttaaactttgcgcaaccgatataaacctctttcatccagataccactcgaaaagcttatatataggaagtctcaggtggggggtagtgaatcgttctgtaaaaaacgttaagggggcaattctcggtggcggcgaaaaaagagtttaacatattcgatcacgtgttagttcccgagcatagaatcctcagcgaagaggagaaagaggagcttctcaagaagtacaggataaggatatcccagctcccgcagataaaggcctctgatcctgccgtcgttgctctcggcgcaaagcctggcgacgttattgagatcaaaagaaagagtcccacggcgggctattattactactaccgccttgttgtggaggactgattttggggtgagacgttatgagcaggggagttaccgtaaccgagcccactctaactcctgatgagctctggcttgttatggagtcctactggaaggagaagggattcgtcaggcagcatcttgactcgtacaacgctttcatcgatcacggccttcaggatgttgtaaacgagttcggggaagtcgttccagacataccgaacttcaaggtcaagttcgggaagatccgcataggacagcccgagttccaggaggcccagggccagaggagacccctctacccgatggacgccaggataaggaacttgacatattccgccccgctctaccttgagatgatacccgtcgtgaacgggattgagcaggagcccgtcgaggtcaggattggagagctcccgataatgctcaagtccaaggcctgcaggctctacggtttgagcgacgaggaactcatcaagctcggcgaggacccgaaggaccctggaggatacttcatcatcaacggttctgagagggttatagtttctatcgaagacctcgccccgaacaagaccctcgttgagagggatgagagacagaacaaggttgttgccaaggtcttctcgtacagacacggttacagagcgctcattaccgttgaaagaaagaaggacggcattctctacgttacgatacccaacgttccaaagcctgtcaagttcgtctatgtgatgcgcgccctcggtctcctcacagataaggagatagtcgaggcagtcagcgacgacccgaggatacagcaggtactctttgacaacctcgaggacgcgagcgacataagcacccaggaggaggcccttgactacatcggcaggctcgccctcccaggacaacccaaggagtacaggctcaggagggccgagcacatcatagacaacaaccttctcccccatatgggtgttgatcccgaaaacaggcgcgccaaagcctactatctcggcatgatggccctcaaggttctcgaactttcacttggtctccgcggtgaagacgataaggaccactacgccaacaagaggctcaagctcgctggagacctcctcaaagacctcttccgcgtcgcctttggtcagctcgtcaaggacatgcagtaccagatgaccaagacctaccagaggaagggcgagaggtacacctttgagaacatccagcgctttgtcaggaactccataaggcccgacgtcctgagcgagaggattgaacacgcattggctaccggctcctggccgggcggaaggacgggtgtcagccagctcctcgacaggaccaactacatgtcaaccctttcacacctcaggcgcgttacctccccgctcagcagggatcagccgcacttcgaggcccgtgaccttcacggaacccactggggtagaatctgtccgacagagactccagaaggtccgaactgtggtctcgttaagaaccttgccctcatgtcccagataaccacaggaattcccgagagggaagttagggaatacctaatgaagatgggcgtagtccccatagaggagagaaggcccgcgcctggcctgtatcgcgtttaccttaacggtgtccttattggaactgttgaagacggcagaaagcttgttgagaggataagggccgatagaagggctggaaagataagcgacgtcatcaacgttgccctctacgaggacgaggaagtcaaggaagtctacataaacagcgatgacggtagggtgagaagacccctcatcgtcgtcgagaacggaaagccaaagctcacgagggagcacgttgagggcataaagaacggcacccttacctggagcgacctcatcagaatgggcgtcatcgagtacctcgacgctgaggaagaggagaacgcctacgtggcaacctggccctgggaagtgaccgaggagcacactcacctcgagctcatgcccgctgccatcctcggtatccccgcttcactcgtcccgtatccggagcacaacgccgccccgcgtaacacctacggagcgggtatggccaagcagagcctcggtctcggctgggccaacttcaggatcagagttgacacccgcggtcacctcatgcactacccgcaggttccgctcgtcaactcgaggataatgaaggccgttggattcgaggacaggcccgctggtcagaacttcgtggtggctgtcctcagctaccacggatacaacatggaggatgccgtcatcattaacaaggcctcgatagagcgcggactggcgaggtcaaccttcttcagaacctacgaggccgaggagaagcgctacctcggtggtcagaaggacaacttcgaggttccgtcaccgaacatccagggatatctcggcgagaagtactaccgccacctcgacgaggacggtctcatcttccccgagtcaaaggtcgagggcaaggacgtcctcgttggaaggacctccccgccgaggttcattgaggagcagagcagcctcggctcaatggttctccagggaaggagggaaacgagcgtcaccgtcaggccgagcgagaagggtgtggttgacaaggtcatagtcaccgagaccggcgacggaacgaagctggtcaaggtcaccgtgagagacctccgcatacctgagctgggtgacaagttcgcatcaaggcacggtcagaagggtgtcataggtctcatcgtcccgcaggaggatatgccctggaccgagagcggaatcgttccagacctcatcgtcaacccgcacggtatcccgagccgtatgaccgtcggacagctgattgaggccataggtggaaaggtagcttcactaacgggcaggcgcgttgacggtactgccttcatcggagagcctgaggagaagctcaggaaggagcttgaggagctcggcttcaagcacagcggaagagaaattatgtacgacggcataaccggaagaagacttgaggcggacatcttcatcggcgtcatctactaccagaggctccaccacatggtagcggacaagatgcacgcgagaagcaggggtccggttcaggttctcaccaagcagccgaccgagggaagggccagggaaggcggtctcaggttcggtgagatggagcgtgacgtcctcatcggccacggcgctgccatgctgctcatcgagcgtctccttgaggaaagcgacaagacagaggtctgggtctgtgagagctgtggacacctcgcactagaggacaagcgcagaggaaaagtctactgccctgtctgtggtgaggacgagaggataagcaaggtcgagatgagctacgccttcaaactgttgctggatgagctgaaggcgatggttattaggccgtctctcaggctgaaggatagggtgtgagagccatgcagtcgatgaaaaaggtcatcgggagtattgagttcggtatcctctcacctcaggaaatcagaaagatgagtgccgccgagataaccgttccggatacctacgacgatgacggttacccgatagaaggcggactgatggacaagcgccttggcgtcatcgacccaggtctccgctgtgagacatgtggagcaagggcaggtgagtgtccgggtcacttcggccacattgagctcgcaagaccggttattcacgtcggctttgccaagaccatccatcgcgtcctggagagcacgtgccgcgagtgcggaaggataaagctcaccgacgaggagatagaggagtacatgcagaagttcgaggtaatgggcgacaggaaaggggccgttgacaagctcattaaggagattcacaagaaggccaaggagagaatggtctgcccgcactgtggagcaccgcagttccccatcaagttcgagaggccgactatctactgggagctcaggaaggacgaggagggcaacgagtacaagcacaggatgatgccgagtgaggtccgcgataggctcgagaagatacccgacaaggacctgcctctcctcggactccaccccgagaagtccaggcccgaatggatggttctcaccgtccttccagtcccgcccgttactatgaggccctcaatcacgctcgaaagcggcatccgcgccgaggacgacctcacccacaagctcgtcgacatcatccgtatcaacaaccgcctcaagtccaacatcgaggcaggagcaccgcagctgattatcgaagacctctgggacctcctccagtaccacgtcactacctacatcaacaacgagacctctggcgttccacctgcgaagcacaagagcggaaggccgcttaagaccctcgcccagcgtctcaagggtaaggagggtcgcttccgtggaaacctcagcggtaagcgtgtcaacttctccgcccgtacagtcatcagtcccgacccgatgataagcatcaacgaggtcggcgtacctctcgcggtcgccatggagctcaccgtccccgagaaggtcaccgagttcaactacgagaagctcaagcagagggttctcaacgggcccgagaagtatcctggtgccaactacgttattgatcctgagggaaggagaattcgcctgatggagagcaaccgcgagcttatagcggagaagctcgacatcggttggaccgttgagagacaccttgaggacggtgacgttgttctcttcaaccgtcagccatcgctccacaggatgtccatcatggcccaccgcgtcagggtaatgccatacaggaccttccgcctcaacctgccagtctgtccgccgtacaacgctgacttcgacggtgacgagatgaacctccacgtcccgcagactgaggaggcgcaggcagaagccaagatactcatggaagttcagaaccacatcatttccccgaggtacggtggtccgctcatcgcgggaattcaggaccacatctctggaggctacctcctcaccagggagggcgcactacttcacccgctatgaggtcgagcagatgctcatgttcgcaggcatggacgttaacgaactgcccgaacctgacaagtacgagaacggtgagccgctctggagcggaaagacgatattctctctcctccttccggacgacctgacgatctggtacaggaacaagctctgcgacgagcctgaaaggtgtgaggcccttgaaaagctcatcgaggagaagctcatccccgacccggaggaagtgagaaagcttgcctacgacggtttcgtctacattcagaacggaaagctcctgagcggagcggtagacaagaaggcctacggaagggaggatggaaagctcctcgacatcatagtcagggagtacggcgtcgagagggccaggcagttcctcgaccaggttaccaagctgaccatctgggtaataacccacaagggcttcaccactgcaattgacgacgaagaccttccgcaggaagcaatagacaggatacacgagattatccgcgaggcggaggagaaggtccagagactcatagaggcctacaagaggggagagcttgagcctctgccaggtaaaacccttgaggagacccttgagagcaagattatggcagtcctcgccgaggcccgtgacaacgccggtaaggtcgccgagcgctacctcggtatgaataaccacgcggttatcatggccaagaccggagctaggggtaagatactcaacattacccagatggcggcaatgctcggtcagcagtccattcgtggaaagcgtctctaccgcggctaccgcggaagagttctcactcacttcaagccaggtgacctcggtgctagggcaaggggattcgtcacgaactcatataagagcggtctaacaccgcaggagtacttcttccacgccatgggtggtagggaaggtctcgttgatactgcagttagaactgcccagagcggttacatgcagaggaggctcataaacgccctccaggacctcaaggtggactacgacggaacggtgagggacccaacgggaatcatcgttcagtttaagtacggtgaggacggcgttgacccgatgaagagctggcagggcaagaccgttgatgttgatagggtcatcgtgagaaccctgcttaagatgaggggaggaggtgagtgaaatggtcgcagagaagaccatcaagagcatggtcagcaaggcagagctcccggacaacatcaaggaagagctctacgctaagcttatcgagtataacgagaagtacaagctcaagaaggacgagattcaggcgataatagacgagacagtcagggaataccagaaagccctcatagaaccaggagaggccgtcggaacggtggcggcccagtccataggtgagccttcgacccagatgaccctcaacaccttccactacgcgggtgtcgctgagatcaacgttaccctcggtctcccgagaatcatcgagattgttgatgccagaaagaacccttcaacgccgatcatgaccgtttaccttgacgaggagcaccgctacgacagggacaaggcccttgaggtcgccaggaggattgagggaacgacccttgagaacctggccagggaggagacgatagacatactcaacatggagtacgtggtcgagatcgaccccgagaggctggagaaggccggcctcgacatggagaaggttgtaaggaagctcactggctcattcaagagcgctgagttcgaagctgaagggtacacgctcgtcgtgaggcccaagaaggtaacgaagctctccgacctgagaaagattgccgaaaaggttaaaaagcaccgccttaagggtctctctggcgttgggaagaccatcataaggaaggaaggcgacgagtacgtgatatacaccgagggctcgaacttcaagcaggtcctcaaggttccaggcgttgacccaacgaggacgaggaccaacaatatctgggagatcgcagaagtgctcggcattgaggctgccagaaacgccatcatagacgaaatcgtcagcacgatgcgcgagcagggtctcgaggttgatgtcaggcacatcatgctcgtcgccgatatgatgacgctcgacggcgtcataagaccaatcggtaggcacggtatagttggtgagaaggcgagcgtcttagctagggccgccttcgagataaccacccagcacctgtttgccgcggctgagaggggagaggtggatcctctcaacggtgtggttgagaacgtcctcataggccagcccgtgccagtcggtacgggaatcgtcaagctggccatgagtctccccctgagaccgaaaagggagtagggaggtgtagtgaatggttgacttcgctttcgaactgaggaaagtccaggacactgggaagatagttatgggtgccaagaagtccatccacttggcaaaggtcggtggggccaagctgataatagtggcaagaaacgccaggccggacatcaaggaggacatctactactacgccaagctcagcggaattccggtttacgagttcgagggcacgagcgtcgagctcggaactctcctcggtaggcctcacaccgtttcggccctcgctgtgatcgatccgggcgagagcaagatactcgccctcgctgggggtaaggagtgatgccactcaagctcaacactgatcagatcaagtacatagcactcttcgagagcatgacgggagccacagtgctcgactgcctcatagacacgaacaggaacaggctcatatacgtcatcaagaagggtgagatgggcctcgccctcgggaagaagggagccaacgtcaagagagtccagggcatgctcgggaaggagatagagctcatcgagcactccgagaaccccgaagagttcctgaggaacatttataagagccttggagttaaggttaaaaaggtccacatcaccgaaaagagggatggtaagaaggtcgccctcctcgatgtcggcccgcgcgacaagccgagggccataggaaggggcggccagaacatcaacctcgttaaggagttgatggagagacaccacggcattgaggatgtcgtgataatctgaggtgatgatcatggctggtaagaaggccccgtatggagagttcgctggaaggaagctcaaacttaagagaaagaagttccgctggagcgacatccgctacaagaggagagtcctccgccttaaggagaagagcgacccgcttgaaggtgctccgcaggccagaggtatcgtccttgagaagatagcagtcgaggctaagcagcccaactcggctatgcgtaaggctgtcagggttcagctcattaagaacggtaaggtcgttacagctttcacccccggtgacggtgctatcaaccacatcgatgagcacgacgaggtcatcatagagggcatcggtggtccaaagggtggttccatgggtgatattccgggaatcaggtacaaggtcgtcaaggtcaacagggtctccctcaaggagctcgtcaagggaaggaaggagaagccgaggaggtgaagtgaatggccaagccgcttaccgagaggttcttcatcccgaaggaagtcaaggtcatgggcaggtggagcgttgaggacgttaccgtcgaagatccatcactcaagccctacatcaaccttgacgccaggattctcccccacagccacggaaggtacgccaagaagccctttggaaaggccaacgtccacatcgttgagcgcctgatcaacaaggtcatgaggagcggtgccagccactacaaggccggcggtcacttcatgaggcgtgagcaccgctcgataatgagcaagaagatgaaggcctacgaggtcgtcaaggaggccttcatgatcatcgagaggagaaccaagcagaacccgatccaggttctcgtcaaggccatcgagaactccgccccgagggaggacactacaaccatcgccttcggtggaatccgctaccacatgtccgttgacgtctccccgctcaggaggctcgacatagccctcaagaacatcgcccttggcgccagcataaagtgctacaggaacaagaccacctacgcccaggccctcgccgaggaaataatagctgcagccaacaaggacccgaagagcttcgcctacagcaagaaggaagagatcgagaggatcgcccagtcctcacgctgagggctggaggctttctcttctccccttgtttgtgccttttctacatctagcctatcgctctgggaaatgtttttatggcccagaggtaaaactattctggtgaaagtaagatggttactgtaaaagtttcctcaaaagggcagatagttttacccaaatccatccgcgagaagctgggcatcaacccgggagacgaggttgaggtgctagactttggcgatgagattgttatagtgcccgtgaaaaagaacgttgaccttatggggattctaaagtttgacaagcccctcaaggatgtcatgagggaagtgagggaggaggaacgggaactggaggccagaaaatggggagagtagtgctcgacagctacgctgtccttgcctatcttcttcacgaaaggggtgcagagaagatcagggacatgttcaaagaagctgagaacggtaagctggagctctacaacgccactttggtaacgggcgatgaggagtttaagactgtcgaggacaaggtgaggatagagtggctttagcatttccaaacgctttttaagtctcaaaactgagtcccactggtggtaagatgatattcctgatagggttctctgaggatgaggtaaacctaatcagagagacctttaacggtgtccccgtctacgagataccgagctactgccgcgattgggttcttaaggagatagtggagaaagcggactcgctcaaaggaagtgggaactggcacgagaggaagttcttcctcatgcacgatttaagcaacgatgaagtcagggaagcgctgggaaagatgaagtccctcggctttaagggagttatctacgcgacgacaacgccgacatctctcacgatgaagctcgatgaactgatagaggagtggcttgaggaagatgcctacttccgccagctcaggaggatgaagagggggccgtacttggatattggagggggaactggttaaatctcaagaggtataccttcggcttttaccgtttttataaagctgtcgtttctctttttgaattcatccggcttgaggagtactgggcttattagttctccgtatctgaggagcacatccgttaccagctcaatcacctcgtcaaaatcaatttccccgactatcaggacatcaatgtcgctctcctcatcgtaatctcccctggcataggaaccgaatagaaagacctcctctattgagcttccaaatcgttcctttaaaagccttaaaaactcgttaagggcctgggctttcttgtccatttttgatctcctccagaacacttttaattctctccaagaaacgttcggcggtctcaactacgttttccgcttcctcgtgagttggttcgtaataaacatcgtagtcagcttttgatctgagcgagaatgcgtaggtaaggtattttgcataaggcctttcaataaaaccactatcaacaaagtgaaggccaaacatcctgataactccagaatgcttccgcgggttaattcctttcaggagaagtagggctttagcagcatggaacattgaatagtatgctctgcttatggaatctctgagctttccgttttccagtaagaggtatgccgaggagagtcttcctctgcgattttgatatgtttctcaatctcttctgaaatgtccataatgcttcctccaacttagcctatggcccactcgatatataacccttctcccttagtcggagtttaccatcaacaatgcaattgttatggcatcttacgtcatcttaacgctttgagcaggaaaatgatcgaaaagtctaacagcaaaaagtacgagactgggttaatttcatcttatcaaactcttcccaaccatattcatcggcttctcaatcccaaagaacttcagaaccgtaggtgcaatgtccataaggctcggttcatcaagttcaacgttctcaaagccccagagtacgagcggaaccttcatcacgggctcgttcatcgagccgtgcatccctcttacccagtggctcgctcctttaacccctctgcacatcctgtgagagcaaaaccagtagccgggcttcgccgaaactatgagctcgccgctgtttggattgtctaagtgcggaagctcctccctgaagaaaacttccttgaccccaggcgcccgtctgagggcttcgaaggcttcttcgctttgattggggtctttgaggtagacgtggacgcctccaccagaggagactctcagaacgtcaatccccctctctttaaggtatgtcttcaggttcacccacgtgtgcacctcttcctgcccgtggtcggcgaagattatgaagacgtactcatctttcagcctctcccagagggttctcacggccgtatctaccgtctcgacggccttcatcgccccctcgcttagaggcccgtgatcgtgctgcattccgtctattgaggcgaagtgaacgagcaggaggtccggtttgcactcctcgtagaggtagagcgccgagttgagaacccaaacgtccttcctccagtcccgcccgtgcttcctgtacatctcgttgctcgcgaagaatggcgggaatatcctaacgtcagtgccactgaagggcggcatcgtgtagcccgaaactgacgcagtcctaacaccttttcccctcaggatgtcaactatcgtgggggctttgatgaccttatggggattaaaagccacctcgtattcgtagaagttcaccttcctgtcggctatcctgtcgtagtagccgttctcgacgacgccgtgatcccttggccatacaccggtcatgacgctcgtgtggactaaatctgtcagcgttgggaatattgaatcgacgaccgcaaactccccgttttcggcgagctcgcttaggaagggcatgtgcttgaggttgtagactccgtttccgtcgaggcttatgagggtgagctttttcctcactcttcctcctccttctgtgctttctcgatcttttcaagggtcttactgagtctctcaagctcttccctcagctttctcacttcttcggccattcttttgagctctttaatgttctcgtccatcttaatcacgtcctatcctaagattggagcacagctttgagttcacttcttgaactaaatcctccggcaactcacctagaaccccaattaacaaacccttgtgaagcgtggcgatctttgttagctttataattgaagggactttaagtccgatacccctaaattgggggtgggaagtctctatccttacatcggtgccaggatcaaacgtatctatccgagaggaaacgaaggcaacgacgacatcttctttgccctcataaagaaccaacgctggccgaagttttgtggcctttaggttagtaaaaggaaatggaacaaggacaaacttgccttttaagttcatctgagcttcacctttacgtcgttctcgctgtaaatatctggctcagactcaaggaactcccacagagattcctccgaaagcttcatgatgccgtacctctcgttgtcttcgattagctcttccagtttcttttctatttcctccagcttcttctcgatcttcattatctccaccataacctttgagaggctttcactcatttccaccaccgtcagactgacgtgcactcctcatcgatcggcgggatggaaggctcatcatccggttgggtgatcacgttaaaacctttcccagccattggtctaaagttttctgcttcgcgaggtggccgaggatgtagctcctttggaggtacctctcaagcgggtgttcgaggagcttcctcacggcctctagggcctcgttgagtatctcaaaccttccaactgggttctcaagggcctttttaacacccacccttatctgccacaccccgacgggtgcgtagtatgctggcgttacctcgcggaagacgattatcctcgcctgcctccttctcttcctcaggtgttcaagaacgctaagcctggccgcgtagtatgctccagtcgtctccttggcataacctttgattcccctgaagtcctcgtagtcgtggatgacttggggttcggcactcccgaagagcgagcccttcagccagacctcaaggagctcaaaggcgtagctttggggcatcaaaaggaccgcatagcggttcccgaggaactcgtggaagtacacctcgtaggagttgatctctggatagcccaggatttcccttctcaggttcttcccgatcgtgtcctgaactgctgtgatgctccatctcgttggaaccagctttctgtcaatcccaagcagtccagcggagaggagccttatgatgtagtactcgtcaaagccccagttgtagagcctcattatggcctgttcggcctttagctcgtcacccacaacgtagtcagttctgcgcggtatctttgggttctccgttagctcaaaatcaaggagctctgccctcggcccgagcggcggagcgaactcgctcggaacgaccttgacgacgggcttccttttcaggataacttcgctgtccactggccttatgctcatcgccagctcttgaatctcgcctaaaactcttccgctctttctgacgctgacgtctgccctcgtttcccccatcaccagaagggagcggtagtagaggatgtcctttatcgttttgttttcccacttgagcgggctgtccagatggctcgtgttgccctcgatcggcggcacaagcggccctatcctgacctttgggtagccatgttccccaacgaaaatgctcggcggagaagagccgaagagatgtcttttgttgagttttttctccacgctttgggctaccctgaaccgctctagtatcggacatgtcggtctcccgcagaggagcttcctgcccttgcatatggcgcagagttttgagttgaagagctctgtcattatggttctgttacacaggggctcgtttaaatttttgctcttggcaatttggataactaatccgttttacatcatccaagaaagtatcaaattgtgttttcctaaactcttatatacttcgatgtacttatatgttccgaggtgtttttatgtacggcaactggggaagatttctgcgcgtgaacctctccacaggagaggtcaaagttgaggagtacggtgaagagcttgccaagaagtggctcgggagcaggggtctggccatctacctcctcctgaaggagatggacccgaaggcagacccgcttgggccagagaacaagctgattataacccctggcccgctaactggtacgagcgcccccactgggggcagatacaacgtcgttacgaagagcccgcagacgggcttcataaccatggcgaactctggcggatacttcggtgcggagcttaagttcgctggctgggatgctatcgtcgttgagggccagtccgagaagcccgtttacatttacatcaaggatgaccacgttgagatacgcgatgcctcccacctctggggcaaggtggtgagcgagactgaggctgcgataaagaaggagattggaagcaacaagctccacatagcgagtatcggcccggccggtgagaacctcgttaagttcgcagctattatgaacgacggccaccgcgccgctggtagggctggcgttggagccgttatgggaagcaagaagctcaaggccattgccgttgagggaagcaagcgcgttccaatagcggacaagcagaagttcatgctggttgtgagggagaaaatcaacaagcttaggaatgaccccgttgctggaggcggacttccgaagtacggtacggctgttctggtcaacataatcaacgagaacggcctctatccaactagaaacttccagaccggtgtctttgagcacgcctatgagcagagcggtgaggcgatgactgccaagtacctcataaggaaccagccgtgctacgcctgtccgatcggttgtggcagggttaacaagctcccgaccctcggcgtgacggaagggccagagtacgagagcatctgggcgctcggtgccaacctcggcataaacgacctcgcgagcatcatagaggccaaccaccagtgcgacgagttcggtcttgacactatctcgactggtggaacgcttgcagcggctatggagctctacgagaagggctacctcacggacgatgagcttggggacgctccgcccttcaggtggggcaacaccgaggttcttcactactacatagagaagatagcctacaggaaggatctcggtgacaagctggcagagggaagctaccgcttcgctgagatgtacggccacccggagttctcaatgagcgtcaagaagcttgagcttcctgcctacgacccgcgtggagccgaaggacatggtctcggctatgccaccaacaaccgcggcggctgccacatcaagaactacatgataagccccgagatcctcggctacccatacaagatggacccgcacgacataagcgacgagaaggtgaaaatgctcatcctcttccaggatctcagtgcgctcattgacgccgccggtctctgtctcttcacgaccttcggccttggagcggacgactaccgcgacatgctcaatgccgctctcggctgggacttctccactgaggattacctcaagattggagagagaatatggaacgctgaaaggctattcaacctcaaggcgggcctagaccctgctaaggacgagaccctgcctaagaggttccttgaggagccgatgcccgaagggccgaacaagggccacgtcgtcaggcttaaggagatgctgccgcgctactacaagctgcgcggctggacagaggacggaaggatcccaagggagaaagcggaagagctcggcatcgccgagttcctctgatttcattttcacatttttgtccaataactcttttatgtccctatgttgagaactcgctttaaggtggttcacgtgctggttaagctgttcgcgaccctcatcgagttcactggaaagagaaagcttgaaataagcggcccgaagacggtgagagagcttctcaatgaacttgacagaatgttcccggggttcaagaaagagcttgaacaaggctacataatcctcgtcaacggaaagaacatcgagcaccttcagggtctcgacactcctttgaaggaagacgacaccgtaagcatattcccgccggcgggaggcggttgaggtggcaataaagttcgctccaaacaaggagtacacctttaccctctgggacgggaaggtcatagttaagccgaagctcgacatgaagtatctctacgtagagatcaccagccgctgcaacctgaagtgtgagatgtgcttcaagcagtactgggaggacactgaaggagatatggactggaatctcttcctgaagatactcgacgacgctgaggctttccccgagcttagaatgatttacttcggcggcattggtgagccaacggttcatccacgctttatggacatggtcagggaagtcaagaggcgcggcttcgcccttgggataagcaccaacgggacccttctcaccgatgaaatgatgagggagttcgcgaagcttggggttgacctaatttacttctccatggacacggttccaactgcccagaacgccataaccctcggtcacataacgtccgccgtgacagcggataaaataagaaagctcgtaaggtaccgcgaggagtacggaacccataggccgagcataggcgtcgaggtcgtggttacaaaggagaactaccaacagcttcctgagatggctaagtttctgctcgatatgaaggtcgatgccatgctcgtctcgaacctgctcccgctcaccccggaacaggtcgatgacatagtctatgatgggagcgttgatatgacgcccatactggacgagctgtacaagatcgcccacaacggtctctacataaagctaccaaagttcgaactcaggacggagagacagtgcgacttcgacgagaacaacgtcgcagttgtcaggtgggacggtgaggttgctccctgctaccgcttcctccacacctataaggagtacatcttcggcagggagaagaaggtcaacgcctactccttcggcaacgtcaaggagcagagtttagccgacatctggacgagcgagaagtacacatggttccgcttcacgatgaagaactacatgtacccctcctgcaccgactgtgacctaagggaagcttgcgacttcgtcaagacgaccgatatagactgctggggcaacgagccgagctgtgccgactgcctctggtcgagaaggatagtccagtgcccgattccacagtacatgttcgggaagttcttctgagaggtttctcgttcttctcctctttggaggtgctctctttgtgtttcgtggctcttaaacgaatgtcccttttaaaaacttcgacaaggttgaagttttgaataaacaaaaagagaaaaatctaattaaagctttacttcggcatctccttgatgtggacgtccatctgcgggaacggtatctcgatgccctccttcatgtaggcctcgtagatgcccttggtgaggtcgcctttaaccgtccagtagtcttcggtcttagcccacgccctgagctggaggtttattgacgagtctgcgagctcagttataaccaccgtcggagccgggtctttgagaaccttcgggtggttctgcatgaggtccatggcgatcttaatggccttgtcgaggtccgttccgtaggcgacgccgacgttgacgtcaacccttctagttggcatcctggtgtagttggttattacgttgccccagacgagcttgttggggatcgttatgagcacgttgtcgggagttaagagttcagtgctcattatgccgacggcgttgaccttacctacctttccagctacctcaacgacctcacccatgtcaatcggtctgagggctgcaatccagaccccggctgccaggtttgttagcgtgtcctgcataccgaagcccaagatcaggcctatgaccgccgacaggccgataaccactgaaccgacttcgatgcccagcgccctcacggccagcagtatcactgccacgtagaggagggcacttaggaacctcgcgaggaactccacgacgagcgcagggagcttcgtcttcttcaggcccttcttgaacatgctgacgacgatctttgccacgatgtagcccactatcagtactgctatcgcagttatcacctgaaccggcttcactcccacgtaggggagcggcttatcaaggtcaaacatcactgatcacctccaataatttgcgtttgtgttatttaacgcttgctcatgacttaaatcattgttagtcagttcttcgaacggaaacggaaaagttaaagtcagaagaaacaaactcccaaaggtggtagcattgggggtggagcctttagccccaacgaccttgagtcaataatgcacgaacttaaaaagctggacgagaagtcacttctggcctactggatcaagggggagtacgatgaggccgacatgtacagagagctggtccggagggcaagagaactcggcctttcggaatccctcattgagacattcatctgcctctcaaaggagtctaaagagcacggagacacgctcagaaagatgttcctccggaattacggggaagagcccactccacccgatattccacctatcgaggtcgcaccgctcctggagaaatttgagagagctgaagacgtttttgaagtgctccagcttgcaatggagagtgaactgctggcgaagaggatatacgagcgccttgcagaggaagagaaaagggaagagctcaaaaaagtctacctgagcctcgcggccgtggaaggttctcactacgagcggttaaagggcgagtttgaaatactcaaagagctgaaagaaaaataaatgtcctgctaaattcactccttgtacttagctatcagctccgccaggagcctatggtgctccctctcgttttccactatggcctcagccaggcccttgaagggcgggtgggtcatcttcacggccatcttctggtaagtctgtatcatgtccttctctatctcaaggtgcatctcggcgaagcgcttcacaagggccttctgctccggagaaagctcaacatctttaacttcctcaatgggaccctcaccagcaagcttctcaagctccttctgggcgttgaggatgggcctccatgaggtgcttgtggatgatggtgtcaattgctatcctgccgactatctcctcgaccttggtgtaccggagtccttggccccgtatcctagcaagaccgtctgtgtagctggagggggccttcttttcagtctcataggcgtgtttaacaagaatatgaaatcaaaacaaaaaacgttgagaaaccggcagggtcagagcttgacctttatcccggtctcctcctcaacttccttgaagccctctttcatgtacttggccagctcctcgtcaacctcgaagagagccgcgaggaactccccaaagtgctctttctcctcgtttgccacatcgaggaagatatgctttattttctcgtcctcaattccagcagcaagctgttcgtagatgtttatggcgtcgagttcggcctcgattgcccagcggagggcctgggctatctccctctttgtaaggggcctgtccttcgggagttcaaatgggtatttcgcgagcatggtaccaccacacaaatatcgagctcagacttaataaccctttacctcaagaacttggatacgtaggggctttctccgggcttgcttctcctgaagtggccgctcggcttcccggtcaaaagctcctcaaaccatgcctcgtgctctatctcctcgtggaggatcgccagagccaggtcgtaggttcttgggtctttgtcgaatgtatagttgcatatctctgtataaaccccaacggcgcacctctcagcctcaagaagaaccttcaggacgttctcaatcgtcggctcctcgggaaggtaggcatcgcagcaccaggccatcttcgagaagttcacgatgtctctcggaagttctccgccgagttcgtatattcttggaacgagggcctcgaagtggtttctgtcctcaagacgagcgtcctcaacgatctcctttatggtctctccttcaagaccggtcgcgtgatttctcatgacggtgtaatagtagtatgttgtaaactccgccgcggccgccctcagaagcatgtccaaaagcttctccacatctatgcctgccttctcgacgagccttctgttgtgttctgacattggtttcaccagataaacttttctatttagaaataatttctaattaggaaggcttataaactggaggggcatatcccccaaacatgtggaaggaaaaagccgttgaaatgcttcggaagaagggctacaagatgacgccccagaggttgaagctgattgaagtcttaaacgagattggaagcgagcatccctcgcttaacaccttcttgagagaattagagaggattttccgaccgttagcttctcaacgctttattccaatatcctaacccttaaagaactcggtcttgttgagctgttctccgttgggggagaaacgagagttgaaatcaacacggaaccccacataaacatcatcgaggatgaaagggtcatcgacgttaacgaccccgagatcattgaggcactaaaaaggaagctgggaaaagaagtaaagctcgttaacgtgctcgttgaaagatagatcagtccacctcaaggctgaagtcctggtagtccatccatatgcccgtctgcatgacagagtcgtactgggccttcagaagctcgtagtggcccttctccaccttggccagctcttcaaagagtctcctgacgctctcgtgttcggcctccttcgcggccttctcgtagaactcccaggtgagcttctcctgttccatgccgatcttcactgcctcgacctcgctgagggtctcgggctcctcgacgatcagcttttgggcgagctctttgtccacaggagggagttcgcacttctcaatgagcctctcaacgaacttctcctcaaagaggtcccagtgctcggcctcttccttcgccagaaagaggaacatctttctggccctctcatcggttgtttttcttgcgagcttcaggtagaacttaagctcgttcttctcgacctcaagggccagggctagggcttcaagctcgttcatgatatcaccaccttactttactcctcactccctattagctttttgacttcttcgagaaccttggccgcgtgtccttttgccctcacgtttattttcttccagacgatctctccttctggatttagaatgaatgtgctccttatcgccccctcgtactccttcccatacctcttcttcttgccccaagctccgagtgccttatgtagctctgcgttcgggtcgctcaggagcttgaccttgaggttatgcttctccctaaacttcctgtggctcccgggggaatcacgggagacaccgatgacttggacgccgagcttttcaaactcttcaatgagctcgctgaactcctttgcctctgtggtgcagccgggagtgttgtcctttgggtagaagtagagaaccgtccaccttccgaggacgaagtccttcaggggcttcccctcaccgttctcatcgagcacttttatctccagatagttcatggttatcaccagattagttaggttttcctaatatttaagctttcccttcgaaccaaaagcctcttttaaagtagtgcgaaaatggcagaggtgataccatgagaattgaaagggtcaaaaacccgctctccctcaaggacgagctcctgaagttcgtcttcagggtttaccagtcaacaaatggggcctatccggcccttgaatgggtggaaaataagccttctcccgacgattttgatggctttaagaaggtttatgaaccattccttgagttcaggctcggaaaggaattcgacgagctctacgttctcagggataacgatggaaagatcgcgggaaccgttgccctcgtttacaaccttgaaggcaaagacgtatggtgggtacctgaggagataaaggacgaaaagacgggcctcattgagttctttatggttcaccctgattacaagggaaagggctacggttcaaagcttttgggcttcgcaatagagagacttaaaaacctcggaaaggatccgtacatcataacgttccccaaccttgaggcctacgagtactacctcaggaggggcttcgttaaggtcatggattacagggggtttgtagtgctaaaatatcgcggggggtaacagaaaagtgggtttgattacttatttgatcctggggcttgtgataggctttgtcgctggacttttcggtgttggtgggggcttcctcctggtgccctccctggtaatcctcggcgttccaatccacaaggcaataggtacgagcctggcctgcatctccataagtgctctggcctcggcttacactcaccttaggagtggaagggttctttaccgagtcgttctcctcaaggagatgttttccatcccctccgctatcctaggcgcttatctttcttcacatctccctgaacgacttttgagggttgtttttggagtgcttctcttgtatctcgcagtcgcaatgctccgctcaaagaaaggagactgtgaaatggagaagggcaaaatagagtacaggaacgtccccctggtcgggctggtttcgggactggtttcgggactgttgggtgtcagtgggggtatcttgaacgtcccgctcttccacacccttgtcgggattccgatcaaatatgcggttggaacgtcgagtctcgcactgctcttcactgccctggccggaactttcgaacactggcgcctgggtcatgttcagcccaacatcgttctctttttggccccgggactgattatgggggcgagacttggcgcaaagaccgtttcaagggtcaacccaaggtcactgagagcaggatttgccgcgctacttgcgatagtggcggttagaatgctcctttagacaaactctggtggtttgaggcggggtgatgtaaaatgaacgagctgtttgaaaaagtccgcgaggaatttgggattgaggtaaaggacgagaaagacatgaccaatgcctggaaactggtggagatgctagaagataaaggctgggtaatctacatcattacggccaagggcagaaagcaggttgatgcctggcaccccaatttcggaagcctcttcgcccagttcggtgagaaccccggttttggaagcatactagaaggcatctgcaacgtcgctttgcttgttagggaactagaaaagcatggaaaagtctgatgagcattgtgatctttgttttcgctggctggaacatttggaaacgtttaaacacctcgtttctcccgaattcctaataaccttatggggcacacttgaatatggtgatgggatatgaaggagaaagtagttgccctctttatggttatgatcatgctggcatcaacgggcgccgtggtactggcggacagtgtaacatccagcagcggtgagagtgaagttctcagagatgatgttaacaatgagaccaacagtacagcaaactcaactctcggcctgctgaaggtcgtggacaggctcgccaactacactgcgcaacggatcagcacatccaacgtgagcaatgagacactctcggtttacaacagggcaaacgagctcagggaaaaggcctgggaagcttacaggttaggaaatcacactgaaacggtcaggtacgccattgaggccatgcacctctataaagaggtcataatgacgctgaagcaaggtgcggctgccggggaagaggaaaaagagatttcacctggaatggagatgtggaagctccagaatgccgtgagagtgcagcttgagatggcagtgagggagcttaagtacgccgagctgataatgaaccgcaccaacgttacccccgagttcgtctcggcatacaacctgactaaaacccttgtggagaaagttgaagaagacctgacgagtggcaacttcacccttctaaaagaggactttccagaactggtacaggctagagcggaactccacaggcagataatcctggtgacttcgcggactttcaaggttcaggcagttaaggccgttggcaggcagctcaaagcgctcgacgagctgatgcctaagctgatgggaataaacgaggctgttatcgagaatatgtccaggataagagagaacaggaacgtcatagcaaacttgacggaaaagatacaggaactaaaggcactcagaagggaactcgaacaagcctccctacggggcgatcgtgagagagtccaggagctcctcgtcgaaatcaacagaaaacttatggaaattagaatactactgatgaagaacatgagaatgggcaacctgccgtggaagccaccgattacccccaaccctggcagaggacacgacaaagcccacagctctgaaaggccgtaaagactataatccctttttactacctttttcgggagggatgaaaaggtgaaaagagtggcagtagccctatttgtgtttctatttttaatctcctcatttgtgaaggcccaggaggttgtttcgctggaagtaacagttgacccaaccgggtacgtcagggtcgaggaactcgttgccctcgataactattctgttgttaacgttgtcccgctcctctccgataaggttgatgcccttctggttcttgacaaaaacggtgagcccctattctacaacgtcaatggatccactcttgaaataatgggcagtgcaacagttgctaacataacctactataccgcgtccattacctcgaaatcgggggaagtctggactgttgctttcagttcggacgttccggttaagatagttctccccgagggggcgattatagttgacctgagcgagatcccagttgaaataacggacgaatatttagttatgcccccaggaaacataagcgtctcctatatcttacctcctccaaccgagacagagacgtcaacatcaacatccacccagacaacgcctcaaagtcaatcgagtacttcttccacaactacggcaggcgtcagtgaatcctccacaacttccagcaaaggtggtagctcgagcctagtattgataggtgtccttgttgtgctgttagctgtggtagtgggggctctgtggtatttcaagggcaagacaggcggcaatgaaaacagcgatgataccactagcatagtacaaaaaataaacagagaggagcttgagaaaaagcttgactcaatgaacctcaacgacgaagaaaagaaagcccttctctacatctacgaccgcgggggcgtggccagacagtctgacgtcaggaacgagcttggaataccaaagacaaccgcctggaggatgttccagcggcttgagaagcagggactcgtaagggtgtacaaaaagggaagagaaaactgggtcgagctgaccctctgattttttaccttatccttgccccgagctttacctctttgtccggcatgagcagggcaacgcgctcgccgtcgtccgctgccagcagcatcccctggctctccacgccgcggagcttcttgggttcgaggttggctatgatgacgacgtagtggccgagaagctcttcgggcttgtaatacttcttaagcccggctacgagctgcctgacctcgtccccaaggtcaaccttgacaacgtagagcctgtccgcgttcgggtggtcattgacctctattatctttccaaccctcaaatccagcttggcgaactcgtcaaaactcacgtactccatctttttaccctccttaaccttctcctttttctcggccttaccggccttttcgggcttttcgcccttgaactcatcaccgtagattgacttaaggagcgctagagcttcgtccttcctcttctctccgaagcgctcaagggtgaccttaacgacgtcttcctgcttgtagtacttgtttaggagaatcttcgcgctgtccgggttgcccctgccgatgtagttcactatgaagtatattatctccccgtcagttaccttcctgaacatcgggaaggccttccttaccctgtgcccggctgggagctcttcaaagctccacttcttgacttcctcgaggtttaggaggtgccatatcttctcgctggcatctggcaggaacggctcgaggagtattccaagggccttgacgatctggagcgagacgttgacggtcgttgccgtcctctcgcggttctccttagcggtcttccacggcttctggtagtcgaagtagcggtttccgaatatggccagctccatgaccctctttaaagcgtctttgaagcggtagttggagattagctctccagtctccttgaaggctttctctatctcttcgagggcttgcctgtcgaggtcgttcagctctcctctctccgggacgacgccgtcaaagtacctgttaacgaaggtcatggccctgtgaacgaagttaccgaggttgttcacaagctcctcgttgatcttcttcttgaagtcctcaaaggagaagtcgctgtccctcgtctcgggcattatggcggtgaggtagtacctcaggtagtcagcgggccagacgtcgaggaactcgtgaacccatatcgcccagttcctgctcgttgagaacttcttgccctcaaggttgaggtactcgttcgcggggatgtcgtagggcaggttccactcggcctcgacttcctcatctctgtacttgccgtaggccattaggaaggcgggccagaatatcgcgtggaacgggatgttgtccttgccgatgaagtgaatgacctttgtttcgccgtcgaggttgagccagaacttcttccactcgttctcctttccttccctctttaggtgctcgatggttatgctgatgtatcctatcggagcctcgaaccagacgtagaggacctttcccttcacgtcctcatcatccagaggaacgggaataccccagtcgaggtcgcgcgttatagctctctcctcaagcccctcgtttatccagccgaggacggtgtttctaacattgggcttccagtgctcctggctttcaacccacttcttaagcctttcctcgaagtcctgcatgcggatgtagtagtgcgctgaatccttgaaggttattgggttgccacagatattgcagcgcgggttgatgaggatttcgggcgttagcgggtgcccgcagacctcacactggtctcccctctggttttcggcgccgcagtaggggcaggtgccgatgacgtacctgtccgggaggaacatcttgtcatgctcgcagtaggcctgcttggtgacctttttgacaaggtggccgttctcaagggccttgaggaagaactcctgactcagcctgtagtggacgggaagctccgttctgccgaagaagtcgaagcttatctttgccctctcgaaggtggtctttatgtgctcgtggaattcgtcgacgatctccctcgggcttctcccttccttgagcgcgcggaatgttatcggcgttccgtgttcgtccgttccgcagatgaagagaacttcctcgccctttaggcggagatagcgcacgaagatgtcagccggcaggtacgctccagctagatgtccagcgtgaatcggcccgttagcgtaaggcaacgcagatgtaaccatgtacctgaccattttaaccacctctcgcggttaatccctcaccttataaggacttcgcgttaaaagaattacggtgggttattaatcctggctattaacatgcatatttatgtatatcctgcggtgagcactggttcgagggcagacttgtgtaattggagtaactccgaaaagttcttataattgactaactaaatactccagtgggagtatacaatgataactgccaggatatccacggggataccagggctggatataatgctcaatggcggattgattccaggcaggacgtatttggtaaagggggcacctggaactggcaagacaacccttgcgatgcattttgccatggccgggatttccaatggagaaagcgttctctacattacccttgaggagccgggggagaacataaagcaggatttcagcaggatgggcttcgacgtttacaatgagaacttcacgctgatagatgccactcccaccaccgagcactacgtcctcgtcgaggacttttttgagtcatttgcaaagaacctcaacaagctcaccgatgcaattaaagagcagtttaagacaaagcgctattccagggttgttgtggatccgataaccatgctcaagttcacgtcctcggatgaactcgagtacaggaaggcgtttctctcatttatcaaaaccatgatgcggcttagaacaacagttctaattaccgcagagggggaacaagcggacatcgaggagtacctggtcaatggagtaatagagcttgaactcttccagaaagaagggcggcttgaaagggcgcttaaaataaccaagttcaggggaagcggttttgacaacgttatacgcccatatgagataactgaaaacggaatggtcgtttaccccgacaaatcggcactctgagggatttacatgctccctcctgaaataaggtctcttcttgaggacatgagggttgagagaattcggggcgccagctggatggcgcagaaaggggcagaagcgtaccttcttctggctgatctgcttgaagggaacgagctgaagaacgcccttcaagaaatgagggaagaacttcccaaggttaacccaacgatggcatccctttacaatcttgttatgttcattccaataaccgatgaccctggtcttctaaaatcccgggctgaggagtttttgaggcttataaatgaggcaaaaaaagagattggcaacattggaagtgagctgattgacaatggggacatcgtgataacccactccttttcctccgcggttctcgaagtgttcacctccgcgaagaggaaggggcgctcgttcaaagttatcctcactgaaagtgccccagattttgagggtctggcacttgcgaacgagctttcagcccttggcatcagctatgaggtgataaccgacgctcaagtcgggttgttttcgaaggaggcaacgctggcgctggttggtgccgacaacgtaacgcgcgacggtgcagtcgtaaacaaagctggtacctaccctctggctctggcctgctatgacaacggtgttcctttctatgccgccgcggagagcttcaagttccatcctgagctgaatagcggggacgttgaattggtagaacggccctatgcaaggaacggccacagggttagaaacgttctctttgacgttaccccctggaagtacgtgagggggataataacggaacttggaattctcgttcctccgagagaaatataaggaaaagaaaaacctcaaatctctccaacgagccagagcagagcgccctttatgaatggccaattgctggctatgtacttgccatagtagctgtcactgaaggccctgctcgagccatagacgatgatccttccctttccgacctcgactgccgcggcgacgacgggctggctgcccttttcgtttacaacgtttccgtcggcgtcaacggcgtaggaggtttcaaaggccttgatgacccatacggcgtttccttctactgtcaaagtgtcgccgtgatagtaggtcatccatccatctgggatgaacttggttataggagtgttcctgttgtacgctccgacgtacggatagtatggctttccgctgttgtggtcgtcgtccatgagctcagtcttctcgagagtgatgccgtagccgctcaggagctcattgaggctcgggttcacgtacttgtaccagtctcccgctattatcagccccccaccttcttcgacgtacttcctaagggcggcgatttcctcgctggataagtcgatctttgggttcagtattataacaacgttgtagttcttcagcttgtcgtacgtgattggctcgtggttcatctcaacgttccagccgaactcctttgtgatcctgctgaccagcccgtttatccctaccttactgccatagtactggtcgtgggaaaggtctatcagtacggagacgtttcttgggattataacaacgctctggttgttctcagccgcagtgagggcgtttgagagtactttgttccagtaggccagctcatccatcaagctcttgtacaggacaaaagcctgcctcgaaaccctgaacgccgtgattattccgagtcctccctggttggagactatatcggtgatttccggcagccgggcaaagctctcacggtatccctgcattctgctgtttatctcatccacgggtacgttcttcaggtcaactcccctagcctctagctcgctggtgaggttctggaactgggcgtaggcatcttcgagctcttcgttgtggtttctgaggtagtaggtgtagaacagtgccattctgtagaagacttccgatgctagagtctttgtaactgtgctggagctctcgaaaacgacggtgacgtcggttgggtccttcttaagaaccacaacgactgcatctgaggtgatgtagtagtatccgagctcgtcggttgtgtcgttttcttcgagggtgatgttctggctgcccttggtgacgactacatccctaacggtgtcacccatccagggtaccaggagaacggccacggaggggtcttccatagccagatgaactgttacgtttgtctggatgacgtgtctctcgactttgaggttctgcttgacgcggtattctcccgttttcgtttcaacaccagagatcttggccttccagtaggccaccagtgatggggtgtctggtttgatgttctcggtgtcaactatgaggttccccgcggtgacgttgaaggtgtagttctttccgccgacctcaacgacgaagaagctctcgttcttctccacggtagcgtttcctaccaccgcaaccgtcgtgtttccgacttcttcgatattcaggggtatcctgtatgtaatcttgaggtggggcttcaggtcttggttctccttggagtaaatccacgcgtagttgtctatgctctcgtccgtcagtttgaggagtagggcaacagtttttccagtgttgttccggacgaactcggttatgttccatgaaacccatccctttgagagttctccatgggcaaggagagtatctggaatgggcggttcggagggcgttttgctctcgttccaatccgtggttgttttgtaaacgccgacgtccatgggtacatccaagtccccgatatagggcacgtagacttcaaattctgctgagattatctcggtatcccctgagagctctgggatctcgaacttgaagtacgctctctgtttggagtatttagaggagtttccaatcgcgagctctctcttctcattgtacgggtggtaatctttccagctgaactctgtaccgttgtagtagtagctgtaagcgtcctcagttgggatgatctcttccgtagccacgggggtgacattgtactgggcgaagatggtctttgtgagctctttaactgtcacgttctctcccaggctgttcgtcatcttcagtacggcgtgcatctcgtaggtgccgtatctcggggcgctccacgggatagcgaccttaatctcaccaccggcgggaacctccaggctgtcgttctggtagatgacggtaccgttcatggttacagtgaaggcggcctttttggcggtggagtagttgctggctatcgtgaagtttaggatctgcggctcctccaccaggacgacttccggaacgctgtacgaggctatgccgaaaccaaaggaaacttcaacggtcgtgttcttggagtcgagcaacctgcctgaatcgtcgtacagcttcacctcgattgtgtacttccctggcttggctgggttccactcgtagctcacggtgctggtgttctgcgggccgagggtcagttgcctgctcacggccgtgccgtcggagatcgtcaggttgagggttacagaaacgtcgtggtcgtagttgttcctgacggttacgtttatcatgctctcatcaacgtacttcgggttcacgttgagattcagtatctctggaaccgcgagagccatgtcatccgcgtctctcggctctatcttgaagtcgccatatgaatagtacacaactcctacgatgtacctgaaaacgtcccccaccttcggtaggtcgtacttgtatatcatgtcgtctattctaacgggcccgcttccgtcgtccgcttcccactctccgtatcccaaactggtgttggtcacgatggcgttttccactctcaccaggacgctctcccaccgctcctgggaaacgttgcccgttggaaggagaacagggtcaggaacttccgcggttccgagcttgacaatgtcttccatactgttgacgtcaatctcggtgagacctttattatcattcttcgtcttgtgctcgtttactttccctgtaacttgaacgaggtcgccaatggaaacatcaggggtagatcctgtataaacgtagatcccactccaagggccagtaccgttctgtatgaagaatcctctgctggtgactgttgtaacaacgccctcggtctggacggtttgacctacgtaggctgatgcgtctccatcggtggtgttgctctggatttcttggattgggacaacgggaatctgaggcggctctgaaacttcatagacgatttcgagacatggatgatttccgtgactactctcttttgagttgaagtatatgtaatcattcacgtttaagtcgctgagatttgagtggagataaaagctaacgactttgtcttcttcgaactgagatttgacaaagtcagtgacatcccaagatacatttgaatcaacgtttccatttggaagctcgacaatagtccagtttagaactcctgtataatctgtgggttgattgttccaggttaatgtgtcctcgctccatgagtcatccaatactccgtagacagtgatgttatgggacctagagccagagtggtaataggcgtgaagggttagagttgcccgcactatgatggcgttttcgggcaatgtcgagagatcaaactttaggtatgctctctcctcgcttccgtagtgtacacctactcgtaggcgatagtttttggaatcaacgtaaccatcttcgtctatccaagtgtcctcagatgcatatattttctcggagataactgcactagtcgtttcctgcaccgccgtcactggtttaatcgcccacgctgggattatactcaagagcaacagcactatcaacactagcgcagaccgtttcattggtggatcaccgagttaaaaacggcaggggtgtataaataagtttttcctacctttccagtcaatttttggaacaattcgacaggtaaattctaaaaggcgtggcaacgtatgatgatgcggtgttgaaaaaatgtctataacaacaaaaaccggagataagggtttgacgggtctcttcaccggcgaccgcgtggcaaagttctcgccgattatggaagcaaacgggacgatagacgagctggacagctttatcggggaagcaaagcactacgtccctgaagagatggcagaaaccctcgaaagaatccaggttcagctctacgaccttatggctgagctcgccagcaagggcaagtactcgaaggtcagcgaggaagatgttaagtggctcgaggggttcatccataaatacgaggaagaagtccagctcaagtccttcgtcctgcctggctctacaatagccagcgccaagctcgacgtctgcagggcgatagcgaggagggccgagagaagagtggcgaagcttgttctcgactacggcttcggccagaacgcactcgtctacctcaacaaggctcagtgaccttctcttcataatggctagggccatagagaaaagggaaggaaaactaaaagaggtcaagtaatcccttggcttctattcgtctcctttccgtctccagctcccacgtcggccagcaagacgtccctgtgcctcgcccagaaataggcaactacaatccccatcccggtccagaggccgagggcaactgttgcagggccgggaaacgctgtgcgagggagtgggcccgagacgtcgccgagtcagggtcgcgaggggggtgccctggaaatgcagtgctagtcaatagacgcggcccagtgggcgcggaggaacaccgccgtccgcccgtggagcgtcggctcggggacgggcgcggctgtatcgttagcgtgttagcggggacggttgaaaaaggccgtctattgccccccagaggacgtttatcgttgccaggaagagaaacgcccccgccttgtttagggaggatagcggacttattgcccacgtgaagaggagtatcatgactccatccaggaggagggcgtggaagaggtatctcccggcttttctgccgaattttataccaaccagcatgttcccggcgagggcgccgagcatgaaagcactttccaggaggccaaactggtagcttgagaacttcagaacctccctgaaggagtagggcatgagaacggccccaaagggctgtccaaaggctatcatgaacagggcaaagaacatgagagttctcagatacctgttcgagagcaggtaggagattccctccttcagatcctcaactacctgggagaaactctcaagttccctcgttttccactcgtactttatgaggatttcaaacagacccgagccgaagaagctgaccgcgttgatgagaatggccagtctaattccacctattgcatagatgaagccgccgagggcggggccaattagccttgccaaaatgttcatcgatgcagttatcgagtttgctctctcaagctcgtcaggctctaccaagtcgggaaacatcgcactcgttgccgagccaaagaacgtgcccatgacggccattatgacctgaacgactatcaactggtgcagttccagcaggttgaatgccagaacgccgaagaggagaattcccctcgcgatatcgaaccagaccatcaacttctttcggttgtagcggtcgcccacaacccccgcaaagggcatgactatcagagcgggaatcatctcagctaagatgaacgccgtcatcatgctcccgctgtgggtcttgtctagcacgtagagcggcaaagctacatcctgcaccgcccagccgagctgggaaacaaagcgtcccaccgcgaagagccagaagtccctgttaaatctcatggtctctcctccctctctccgacttatccagcatctcttgcctgctcacttcccttctaccttccgcgcagaggtgagcaaaaaagaaacctaaatcctcctcacaacaatgttcccgtttaccgtgctgaccttcacctcgaactcgcccgtgccgatgaccgggttctccgggtcaattccctcgaaggttatagctccgttcacgcggctcgcctttaccctcgcgtcacagaagtccgagagggcaagagcaatgctcccgtttacattgcttattttcgcgtctccctcaagttcctctatctcaagctcgatcgggccgttgacgctgctcgctttcagagattttgcgagcgctaagtaggctctcaccctcccgttcacgttgcttatttcccccgcctcacagttttcaagctctatcctgccgttcaccgtggagaccttctcgaaggagacgttccttgccattatctcgccgttcacggtggaggccctaacggtggctttcctcggcacctttacggtaatctcggcccagccgctctttccgagaaggttgaagaacctcttctttggctcttccctgatgatgagcttctctcccctctgctcgacttccacctcggcttcgccgtgtagggtgtagcttacctctgcgtggtcgttctcccagccctcgatctccgcctttccgttcacggcggatatctcaaccatcttcacgttttcaaagatcatggccatcaccttcacacattcttatcctaacaactcctcccttttgggccacaagccttaaggagtgctttccgccctcgaactcacagccacccctccgaaacaaagtcaaagaggggcctctcgccccccgtgtattcttcttcccttctctccgggccaggttccaagcccatcaccccagatacctcatgagctcgtctatgagctccttaacgcgcgcgttgagtttggccctgtctatgccgaggccctccaccatctcaacgccctgctcctccactatctccttcgccttcctcaggacgaggttgcaggcctctctgctctcaattgtgtgggtcttgcccccaacgcggattctcaccgtcccgtcgcgggccgagattacaacgtcctcaatcctcagcttggcccttccccttcccaccgttacggagatatcgcccgagcggagggaaacggtctcgccgaggctcagcacttcatcgccgctcctgtaggtcaccctgtcacctgaaacctctatcgtgtactcctcagtctggatggttagtctttcaccaactctggtgagctggaagccgttggtgagctccctgatggtgagcatctctcccctgggcttccaaacacggccgtcgcgcaacctcatggggcctattttcacttcctcccccgctggagtgctgatgacttccacaaagggcaccttcacgtactcgaagccgttgccctcgtagaccttcaccactccgaggtcaacgacgctcgccttgttcttgtcgcggtagagcccctccgggttgatgagctcgttcgccctcttgacgaagccaggatcaggggaagtcttctttacggcaatcttttccgaagtccataccgcaacgggagagaggagctttcttgtgacctttcctattggggtttccgcttccaccgttaggtctccgtcaatgacccaacccacaagttttctcccgaacttcacgggataggccttgccgcttccattgagcttgacctctccgaaggaagctccgttgaactcgtaggccttcttctcaaccttccaatcaatccttctctcgtcgaacttggataagaggagacccgctattgtgagaacgaccgcgtaggcaaacatcgtgcccgctgttatcgtggcgttctcgccagtaaacgtctccgaaagtccgagccacttcccgaagaacaggaagacgctcgtccagaaagcacccttggccagcgcaaagacaattccgcttatcgttaccccgaaccacttgccgacgctcaggagctcaaaggcgaagatgagcgcgattatcgcgtacaccatgtagtcgttgtaggcctcaagcttcagcggccccttgaagagccagacgattatcaggagcgctgcgagggccttcatgtattctgcgatcctaaaccttaagcttctctcttcaccaaagccaaatccgtacatcattcctccacctcgtcaagtaccgtgatgatctcaagcaggcgcaaaaacaaacgcccgttagacgaaagctcgtacttctcccccttcttcaccattccagtcttcacgaggagcttgaggtggtgagaaacggttggactctcgactcccagggtctccttgatctccttgaagcccattggcccctccgccagcatttttagtatccttatcctgtcggggttagcgagggccttgagggttttcgcggccttttcctcgtctatcccaggtagggcccctccctcaagtcgttttttgaggcgagcctttatagagagcattagctcgtcaacgggatcaatgctctcctcaagcacctccagcctttttttcagctcttccagctgggttctcaaatcgtccatgctaccaccgggtacagagttttgtagtacaattttctgtacccaactagtgtgatgagtatataaaaatttatcggtttaggccagcgattttatcgtgagaaaatagtgagatgcacacgggcacttatcaaaatccaagctgatgacaacagaatcattcaaggctttcaaaagctaaaatcgggtaaggaaaaactgaaagatggcagaaaattcaaacgtgcctggcgtagagggtcttcctaccctcggcctgggccctcttgatggccttctcgacgagggccttgacctcagcctcgagggcgtcgtagaactccgggctgaccctcatctcggggtcgacgctcttaacgaactccttgaccttggacttaacaagcatctcagccatggctaacacctccttattggcctttgaggccgataactgtgcacctttgacctttataactcttcctcttctgagcccccagaaaagattaaatcagattagggagtacttatcccggtgagcggatgagggttgtgctcatagacggcgaacactacccggatgttaccaaatgggcaattcataagctcggggatgtctgctgtgcggttttcttagggggaactgagaagatagggagtttaaaggcccttgaggataagattggcgttcccctctatcattcccccaactatctcgatgcgctaaagagggcagtccttgaaaacgacgtcgaagaggtcgttgacttaagcgacgaacccgtcctaacgtacgaagaccggtttaggatagcctccctctgcatgctcctgggagttacctacaggggagccgattttacgttcactccaaagccgctaaagaagaccaaaaagccgagcatatcaatcatcggtactggaaagagggttgggaaaacagcagtcagcggttttgtggcgagaacccttaaggaggttgcacgcccggtggtcgtgacaatgggcagaggtgggcctgaagagcctgaactcatagagggcgagaaaattgagctaacacctcagttccttctcaaggtggccaaagagggtaagcacgctgcctcggatcactttgaggacgccctgacttcaagggtgacgaccatcggttgccgaagatgtggcggtggaatggcgggctttcccttttttgacgttgtggacaaaggtgttgagctcgctgagagccttccccatgacctaataatcctcgagggaagcggggcaacgtttccagcttatagaactgatgcatacatcctcatcatcggcggaaggcagaaaacggatttcctgcggggctacttcggccccttcaggatagccctggcagacctgataatcgtcacaatgtcggacgagataaaccctgagaagagagccgaaatcagaaaaatcgtggaggaaataaacccgaaagccgaccttcacttcacggcgttccgcccgaggcccctgggcaacatctcaggcaaaaaactcggcctcgtaatgacatctcagagcgctctacccaaggccaaggagcaccttgaggggcttggagcagaggtcgttgcaacttcagggaacctttcgaacaggccgaagctgagagaagacctggagaagtttagaggtatcgatgccgtggcggtggagcttaaggcggcggccgttgatgtggttacaaagtgggcgctggagaggggcatcgaggttatatatcttgacaacgaaccagtaaatatagacggcaaagacctgagaaaatcagttctagagcttggaaaaagagttctggggaggagagcatgatcatagtgaccgacagcgagaggaagataaggctcccgttttcaaggggaatactcacccgctccataacactcgctgggatagacgtgggcatagcctacgccatcgcgactgaagtccagaaagagctcgaatggaaggggaagaagtcggtaacaaccgaggaaataagggagctaacgtaccagaagctcctagaaaaaggacttagggaagaagcaaagagatacctattctggcgcgagctgaggaggagaaaggtcaggctaaccgtcctcctaggcggagcgactggagttggaaagtccacgatagcgaccgagctggccttcaggcttggaatacggagcataatcggaaccgatacgataagagaggttatgagaaagataatagccaaggaacttctccccgacatccacgtctcttcattccttgcagagagggtagtaaaagcccccaagaactctgacccgctcatctatggctttgagacccaggttaagcacgtttcagttggaataaaggccgtccttgagagggctagaagagagggcttaaacaccctgatagagggcatccatgtagtcccaggtttcgtcgagccgagagaagacgagttcatgtacgtaatcgcggtgcccaagaaagactacctcatagcccacttctacgagcgtgcccgatactcccagagggatgcagagaagtacgttaaacacgtggacaggataatgcgcatccaggattaccttgttgagcgggcaagggaacatggaatccctgttattgagaacgtggaactggaaagcaccgtttccacgattcttgcggacatgatgaaaaagctggaagagatgggagtttagtgcttcttcctcttccatatcccaagcagcttcctgctgccccaggtggactgaacctcccagacgaccaccatatcagtgtagatgtccacgaggttaaagctgtttccaaacgggttcctgtggagctcccagctgactgaaccggcattgactattggagtgttctctatcttcaccccgaaggcgtttccgccgtggcccgtaagaaccagctccgttccctcatcggtcagaaccttcaaaacgtccccagcatcctccaggaagcctatctccctgctcttcggtactggaatgacattgtggtgcatgaccactattctgaacttgccttcgtattctctgagcgtgttcctgagcttcttctggcccatccttccgacgacacctatcggtgtctcatactgcgcgctgaggacgggaattatgacgatgtccccaagttcaaggacttctggctccccaaagtactcctggaagagctcgtgtcctaggtaagttatgtcgttgtggcctggaacgaggattttctgcggcttaacgagcttgtagtactcgtaggccctctcatagtacctttcaatccccgcatccaccatgtcgccgttgtgcaccaccaggtcaggcctgagcctctcgttgatcatcctgacgacgttctcaagggtctttctcctgaagtaaaccctgtcggagacgttgctctcgctcatctggactatcctgaagagcctccttcccgagggcacgaatatcttgggcttcacgggcttgtgctcctttgtgatctcatcccccgtgacgcgccttatggtcaccctgaccctgccgtcgtcgtagagctctattatgttgtagctgtttacatcacccttcctggtctttttgcatgaggtacatcccgcgttgtctattatgaggtcttcaacgcggtagacgtttggcacgtgcttgtggccgcaggtgtatagtgtaaccccgtgccttaagaggaggtctaaaacatctcccgcgttgaacaggacgtttctctcccttccagtgtcgggaagcgggacgaggtggtggtgggcagcgacgatcttgaacctcctgtcggaatactcctcaagtctctccttaagccagcggaacttgtggccgcctatccttccatcgctcagatctggaatagtcgagtccacccagataacgacgccgtccctgaactcatagacgccgttgagaggtcctatgaagtcctcaaagagcttgtaaccgacgttcctaacgtcgtggttgcccggcagaacaacgagcggcttttggattttcttgagctgataagccgcctgctcgtactcctcgcggaggccctggttggtgatgtcccctgtgtggatgacgaagtcgaagttgcccctgtttatctcctcgacgatgagatcgaaggcgtagcccttgaatgctccctcgttggtgatgtgggtgtcgcttatgtgggctatccgtatcatacccatcactccgcggctatggccgtttcaagccttctcctgctcgcctcaaggaggtcgcttatcgagaatatgcccactatttttccttcctcctccacgaggacgtgcttgatgcccttctttgagagcagatcgaggacttcccccagcggggccgttgagggcacggttacgaggtctttcgtcattatctccttcacgggagtggtgtttggcaggccgggaatgaccatccgccttatgatgtctccctttgtcaggaagcccacgacgtcgccgttttcatcaacgaccacgagggagcctatgtcgaactcgaccattacctcccctgccctcttcaccgtgtcgtcgggcttcactccaatcagctttttagtcatatacacccgtatgggcgccctaaggtccacaggcatcacccagggagaagcgttcgattttatccccgcttattgaaatcgcagtcccgttgttgagagttctccaccgggcttcgtggtacagctccagcgtggacgaagccactgcgtacaggtcattggctttgagctctatgagcctggcatagttccagtcatcgaggctgtttgtatacttgttcaccatgtaggcagttataaacgcgctccagcttccatcgggcagtaaaaacagtgttcccgtgttcagcgtggttctggtagtttccagcccaagcacgaacctcctggaaatctcttcgggtgtgatattgtctatggttttggagagatacgccgcgaatacgtagctgtcagaggcattgactagctcttctcccttaaaccccgctttccagatgagcgcttctttgtccagatcgccgttgtgcatgaaccagaaggagaaaccgtgtcttgtggagaactggaacggctgaacgttgaagagggtctttccaccctgcgaagcggcccgggcgtgtgccatcagcacgacttgggaatcctcttccgtgagggaattaagcaggttctcagcattgggatcgttgaatattggtaaaaccgatctgtagtgggtaacgttttcttccctcagaaggacgtacccccagccgtcggggtgctgggtcttcttgttcctcttctcccggtacgggtcgttttgtgcggattttatcagggcatcaaaaaggggtgcaacttcctgtccaataccgcgggcaaagagtatcctgcacatattctcactcaccgtatattttacggcattagaccacaaaagcttttaggtcatgaaacgagcctgggctatgatgctagggcttgagagtgcagtgcttactgtaatgtcccgcattggcaaacaccgctccctctatgagaaaaatgaggaggccgtcaaacagcacctcatcggggagataatgacggccctcggctgggagtggaacaaccctgaggaagttcgaccggaagagagaaccgaggacgggagagcggattatgcgctctttctgaacggtgagacggttgcgttccttgaggctaaaaacctcggcgttaacattctgaagcgggacgaaccactgagacagcttgcaaggtattgcttcagcaggggcgttaaatacggaatactgagcaacggagcagtctggatagccctgaaggccttcgccgaggggacttcgctgaaagacagggttctcttcgtcgtgaaccttgaggaggaacccctggagagggccgttctcaagctctccatgctctcaaaggagaatctgccaaaggttgagaagctggcgaccctcttgaaagccctggaagcagcgtacagcacgcttgtctccgagggtttttcgggagattccctcctccactacctgcaggcgagggggccagctttattgcctgtttcagccttaagcggcggggaagttgtgaaggccctttacatttatgaaaacggatggaagcccgtccctcttggggatagaacgcttaaaggcatccttctggctgttttagactaccttgaggcccgctcagaggggagaaaggccgaagaaatcaaaaaggtgaaaaagttcctgagcagtacagagattcccgaagaaaagatactcacaattctcagggggatcgaagaggacgaaggcctcaagctggcggtggagttatgaagctctttatgactcgaaaggacgtccagaggatcattgaacttgccaagaaaagccccatagaagtttgcggattcctccttggcagaaaagcagggaatgtcctaatcgtggaagaagctaggaagacccgaaacaggctcaactcaccggtggaatttgagatagatccccttgaaattgcagaggttctggacgaggctgaaaagaaggggcttgaaatcgttggagtatttcactcccaccttaagtgcccgccaatcccttcagaaaaagacctcaggggcatgaacctgtggcgaaacgtctggctcatagtgactccttcaggagagtttcgtgcctggacacttgaaaacggggaagtaaaagaggttgaagttgagataagatagctactcatcaaagattctccaaagttcgtctgtttctggcctctggaagggcctttcttccccgtttacgactgcgacccttttctcctccgctaggaactcaccgatgatggccgcgtttatccccctcgaaaggagtatctcaacgagggcctttgcacggtccctgctcaccgctataaggagggaaccagaaccgacgagagctagtgggttcaggctgtagtacctgcagatagccttcgtctcatcccgtataggaattttgtcgggaaaaactctgaagcccaaaccggctgaatccgccatctcgtagaggccgttggctattcctccctccgttgggtcgtgcatggcgttgacaccaaagtccgccgccaggatcgcctcaggaacgacgctgatgtagtctataagcgaggctgccctctcaactaggtccttcccgaataccccgattagctcttccctcttctcgcgggctattattgaagtcccctccagcccggcccacttcgtcatgactatcgcgtcaccgggctttgccccatcgggcctgacaagcttttccctctcaacttcaccaagcattgttccaatgactattggcctatccagaccaggggttacttcggtgtggcccccgataatcgctacaccgagcttctttgcctctctgtcaatctcgtccattatcctctccgggagtctctcgtcagacccttcgggcaggagtatcgtgattaaaaaccactttggcctcgctcccgcaacggcgacgtcattggcgttgacatgaaccgcgtagaagccgatgtcctcgaccgccccagttatcggatcggttgaggcaactaaggctttctcgccgaagtcaacggctccaaaatctattcctttacccgggccgagcagaacccgggggtcgctcgcgccaagtttggtaaaaagcctctcaagggcctcgggaggtagttttcctggtggaagcatttttcatccccttctggagaatgtctgggggaatttataggtttcgcaagatggagataataaaaggcagaaaaagagtgaattcaggctgagaggtagtagtactcacccctctccttctgctccctgtccttaactgagccctctttgttggccctcggccttcctgtgtcggggtcgcgcctgaaggttatcccgatgttggctaaaaagcggttcattccctccctcatgcccatcggcgggagtgctcttccgtactttcctggctcgccctcgaagactatgaggcggtcgctgaggtagtccaccatcatgacgtcgtgctcgactatcagcgctgtcttctcgttcttggccatgagcgagcggatggcctttgatactgccagcctctgctcgacgtcgagatgggctgaaggctcgtcgatgaggtaaatgtcggcatccctgatcaggcaggcggttatggctactctctgcaactcgccaccggagagctcgttgacctgtctgtcgtagaggtcgggaataccgagcgggttgagcagttcagtcttgtagaagttgctcatgagcttcgaggcgtctatcttgctcagaaggtcgaagacagttccctcgtagtccgtcttgatgtactggggcttgtagctgacggtgagcgaccagtcaacttctccctctgtgggtttctcaactccggcgagcatcttcacgaaggtcgtctttccgataccgttcggcccgacgataccaacaacttctccaacgtagagctctcctccctcgacctcaagcctgaaggagccgttttcatactcctttacgagcctcgggtactggacgagtatctcgccctcctgggcctttctctcacccgtcttggtgaaagttatctcgaagggcctgaagcggacgttctcgtccctcaggtagcccctaaggaactcatttattccgtttctcgttgatttgggctgggagaagataccgtaggctcccggtttaccgtagacgacgtggattatgtcgctcatgtagtcgagcagggctaaatcgtgctcgactgtgagaacgttctttccactctcggcgagcctcctgatagtcttcgctatcctgagcctctgccttatgtcgaggtagcttgagggctcatcgaagaagtagaagtgggcattcctgagaagggccgctgctatcgcaaccctctgcagttcaccacccgataactgctggatttccctatccaagatattctcaagctcaagctccttgacgacttcgtcgaactttccggtctcgtcagccttcttgagcaggtctctaactttgcccttcacggcctttgggatgaggtcaacgtactgcggcttgactataggtcttatctcgcccttcttgagcttctcaaagtagttctggagctcgttgccgcggaatgcctttatgacgttgtcccagttatcgttgtttccgcagaggttcggaatgagctggcccgagagtattttaacggccgtcgtcttaccggttccgtttggaccgaggacaccgacgaccataccctccttgactaccggtaagcggtagaggacgaaggcgtttattccgtagcggtggacgcagccttcctcaagctcctccggaaggttcactatcgttatcgcgttgaacgggcacttgtgaacgcagattccacagcccgtacagctcgcctcctgaattatcgggcggtagttctcctcgtctattatgatagcctctccgcccatcctgttcacggggcagactctctcacagaggaagtgaccgcacttatccggattgcacttgtcgtaatcgatgaccgctatccttggcattctcaccaccgggcaggactgggaaaatgccttttaaagggttgcgggcgctgacaatcccatagaaaacaggaagaacaagatatctcaatgcctgccgtgtctctcgtaccagccccactcctttttcggcccgaaggcccttactccctttttggccaggactatcctaagctccttcgccatctcgtgggttatctcgcctctttcctccatccagttgattatctccagagcctcatcgtcggtttcgcaccgcctcaggaagtcgattatcgtcgggttgtagccggagaagtcctggagttcaagctcttcctcttcgagggcttcctcctcggaagtcctgtaggcgtctatgctcaggccaggttcctcctcaagctctctcgcaagggctggaaaagttcttttaaattcttcaaggtcgtattcctgccacgcgaactcatcaacggggcgctttttgacctctctttttttgtcttcgaccatgatcaacacctttgtttaggactcggtggaactctttataaaccctgcagcaaactgccacctatgaagggttcctactttctcgtaatcctcctggagaacgacaaagtcatccgcactaaagccagggagtttcccttaaaggcgggctactacgtctacgtcggctccgctatgaactcgctcgaaaagagggtggaaaggcacttcagagaggacaagaagctccactggcacattgactacctcctcaaagaggcggaacttttgagagcctatctaattccgagcgaagaaagacttgaggagaggctttcgctggaggtctcgaagtttggagagccggtggaaggcttcggagctggagacgtcagagttagcacaaacctctaccgcttcgaagaggagcctgacaaaatcctagtcggagttcttaccagacttggcctcagctggaaaaccgttaaaagtgccgaggaaatattggaataaggtggaaacctatggggacagttatcgaggccgtctatgatggggagaagtttaggcccctcaagaaagttaatctccccaagggagccaaggttaaagttattgttggagaaacaatttgggacttaatggagagtgttgagggaattcccgttaacacagatatcgaggaagtgctggacgatgttagagggagaaagagggttcgttattgatacaaacgtcattataggagcctttttttacaattcgaatcatcctcaattgaagcagagaaggggaattcttgataagtgccgccttgtgctggccctttctaaggacaagaaagtcgcagtccccagagttgctgttgtggaagttattagtgttgccaaaagactaagcggcgaccaaaaattcgcaatgagacttgggaatgccgttgagaactcctttgagattattggtgaagagaaattatctgacaccgctaagaccatagcgtctgccgaggctccctctggatttgatacttatttcctggcccttgcccttgagaggggatactctctaataacccgtgataaacctatgtgtgcccatgctgatagtcttggcgtgcactgtctcttaattgacgaatccacgggtgaagatgacatcagaaagtttatgggggtgtaagtatgctcaagcttggaaaagtcgaaacctacatccacgagaagctggaaagggaaaagctccacttcgttctcctcgatccagacgacgtttcccccgaacttgcaggagagctggcgagtatgagcgaagaagttggcgttgatgcgataatggttggcggctcaactggggccgagggggaagtcctcgacagcgttgttagggccataaaggaaagctcgaaccttcccgtaattctgtttccgggttcacacggcgggataagtaagtacgccgatgcgattttcttcatgagccttctcaactcgcggaacccgttcttcataacgggagcccaggcgctgggagcttttcaggtcaagcgatacggcatagagccgatcccgatggcctatctgatcattgagccgggagaaaccgtgggctgggtcggggacgcaaagcccatcccaaggcacaagccgaaaatagcagcagcctacgctttagccggccagtacctcgggatgagactcgtctacctcgaagcgggaagcggtgcacctcagccagttccgcccgagatgataggccttgtgaagcgcgttattgatgttccactgatagtgggcggcggtatcagaacggaggagcaggcgagggctgccgtaaaggctggagccgatattattgtcacggggaccgcaatagagaaggcaggctccgttgaaaaagccagagaaaagctggaagagctgaacaggggcgttaagggatagcccttttcttcccttggcattttcaagttttgcttactatttagaagtgtatgcaaaatcagaatagaaaacgttataagttcaatttgtgtatgtaattctgaagaccatctggaggttgtaaaatgggatacgggagaacgtttggattgtggtaccttaagtgggatggaagagacttcaggagcctcatgaagtatcacggagacaccaccatgagcaccgtgcaggagaagctgagggaagtggggattgacagccttgttatcctcgataccggttggggcatagagggtaagtccatgatctacaccggtgaccccggagaagatgcatacaccctctcggaatttctgagcgagaacgtgaccatgccttactacgttgagataccctactacaagtacagatcggacactccaaggggaccggactactggaagcgatggattgatgtgttcgtaatctcctcagactacaacctcagagggttctactggaattacgagtgcccaatgatgttcgaggccaaagcagtgggagcttcctgggagaccgtgatctctgaactggccaacaggatacacgaagccggctttgagttcatatggataccttacatgcattatactactaaatcagaaatagaagggaagagggtatttaaaaaagattcatacaaccaccacgccgcatactacttcgattgggtgtttctacaacccaattactacaagggagagcttctcccagccaacagtgacacactaaaacagtggaagatgtatgttgacgatgccaaagagaacctccgcaattacagaggcgttgacaacatctattacgagtttgaatgcgatggggcagtcctcaacaaccctgtgtaccgccagagggcctgcgactacgtccaggttctaggaaagcctccaagaagggcctattattatgatgtaagggtggaagccctggaatacctgaacggggtgtgcgattatgtctaagctaaagccagctggagcgctttccattttccttcttcttgtcttgtccctccagaatgtatccgcccaggagtactccaactatccctgggggatttcgctccagcccttcgtgatctacgctgactccaaaggagcccttgtgggagtcgaatacgattattacgaagaagccggtctcactacagagtacgaccccgtaactctcatgcccattgacctttggacttatttcatcttctatgtcaatgagagcggtgcctactacgttgattacatggctttttcggggttcgagctgccacccctggctttttataagggctggctgtatcttttccttccagcctccaccaacacgagttttccaatgaagcatcctccctgcgctgatcatttaacggtaatccgctactgcaacggtgcaatccagaagattggagaagtgccccagcagggggatcttaacatttcaatgccttacgttctgatttacgagtatcccataggaaacagaagcctgtacagggtggatgaatccattaagttggtggccgttgggaacgagaagaacttgagccttgaggacaagttcagcccttacgatgcctggttgcataacttgctaccgtttgatttcttcactctcaggaaccggaagtgtctgcccctgaaaattgagggtgactggatcgtcgtttcgtcaaagtacagaatccccttggaggaagagttgaagtcaagacttcagccggtcaacgactcctgtgcgataaccatgggagatggacttttgatcgtgcctcctgggagagggatagcctatttcaacgggagcatgtgggtggaggataactacacgtttcacagcggagattatagattcatatttagccccccgtaccttactaaaaaataccctccgagaccgatgaacgtttcaatatacctctacgagaacaacacccttagagaactcccgctgattcacgtgtccgaggagggggtaacggttattcctgctcccgtcaaataccgggacgttcactgctgttcctgtccggcggttcacgagaactggactgtggaatcttctgaatcttctacaacttccactcccagggagacgaattacactgattactccagctccacgaccaagaagactgaaagcagtagttcatcaacgtccaagaatgagggtatatgtggagttggagttctggcgttgctgtcactgctgccgttgagcttagtggcaaaaatccggaactcgaaaacttgaaccggagagataagaaaggcagaaatcaagcctcgctgagtatcctgaaggagaatctaccacctttcaggagcctcttaagctctgagattatgctctttccgttttctacttccagctcaactctaacttctccgatgccctttggatcgggcgggtggaagtgtatgtcctttatcctgccaccaaacttggaaacgatcttcgacagtatgacccccctctccttgtaggggagctttatgtctatttcgacgatttgcatacgtatcaccactctattttatgaaggaaggcatataaaacctttttcataagcggcagttgttgggttgcccgcgggatattcccggtagttatccctcgatcaaaagggatttattgtcccgatccttgcagaaaaaaggtggtaccgatgagagctttcatatccctcgaccttgagggcctgccccacgtcgtcagtcccgaacacctgagcgtaaagaaggcgctctatggcgaagctaggaaaatagcgacagaggttgttaagatcacagcaatgacactccacgagcttggctttgaggaagtcgttgtcgccgacagtcacggccccatggtgaacatcatccccgaggagatgcccggctttgtgaagctcgttagaggcttcccgaggccgatgagcatggtggcagggagtaaggggagcgacgttgcactcttcttgggctaccatgccaggagtggagtggggagggcgacttttgaccacacctacagtggctccacaatagactggataaccgtgaacgggagacccgtcagcgagacccttctgaacgcttacctgctcggagaatggggcgtccccgtcattctagtcgctggtgatagggcactgcttgaaagtgacgtgagagatgcacttccgaagaccgttggtgttcccctcaaggagagcttctcaaggtactccgcgatcagcccctcaatggaagcaataaataagctcctcataaaaggcacaaaagaggctgtaaagcgctggaaagaaggagctataaagcccctgagcgtggaaaagcccgttaaagtaggggtgcgcttcctgaacagcggctttgccgacgcagccgagctttgccccttggtcagaagaatagacggcaagactgtcgaatttgagacaaacagcgtggaagaggcctacaagatgatagaactcctgatatttgccgcaactggcgttagggccgtgttcggctgaagtgtgcccccggggagcgaaggggaatcacggctcgccgaggcgctcatcccccgcggtttcccgggggcggtctctactacaatttttgaaaacttaagccttatcctcttcctcaacgtagggtgcctgtgatgaccctccttatctccctcgccttctttggtccgattccctcaacttccttcagctcctcctccgttgccgtgaagaccctctcgacgtttccaaagtgctttaaaagcctcttagccagcgtcgccgagacgtttggaaggccctcgactatgagcctctgcctctccgctagagtcagcgccttcttctcgctcctcaaccggacttccttcttcctctcctcctgctcgcgctttgccatgaggtagataaactgggcggtctcttccggccctgatgagaacaatattggaactccccagtcaagggtcaccgccgctatcgctccccgtattgcgttggggtggacgttccttatgccgtacagctccccctcaatgatgattaccggcttctcgtaggccctcttcagcctctcaacctggtcaaagagcctcccgtcaattatcgactggatgaagtcgttggcgctcttccgctctatgcccacctcttcgctcacaacgtagtctgcaacgtcgagggttctcacctcgacctcggcgcccagctccctgaggtgcttcggaacaccgctcctcagctcgcgggaatcgacgtagaccactatgcccttcggctttctcacaaagatgggctttatcggaagctcttcggtcgtttctttcggcttttcggctgatttttcttccgatgcctggggagcggctttcccgaccgctttgctctctctaatttcggtattttcgacctttttaggcttcaggaaagcatccagcggggcaatcttccccttggacacatcgacactccccttcgacttttcaacacccgcgtgtattttaccttcctccccttgggcttttatcctggccctctgcaacttctcaagctccctcgcgattttctttatcgcatcgaacatccccttctcctttcttcgggaagcccagtagtaggcttcatccctcgtccccttagccatgagaatgacaactcttcccggcctgtgtcttccggttcttccgcgcctctggatgctccttattgctgagggaacaggctcataaaacaccactaggtcaacttcgggaacgtccaatccctcctccccgacgcttgtagccacgaggacgttgaactccccccttgagaagcggtcgaggacttccttctgctccctctggctcattcccctgtcgtccttcctgctcgcctgcccgatgaacctctcagcagtgatccccatagagcgcagttcctcaacgattttctttccggtgtcgcggtagttcgtgaagactattatcttggagctcggctttttcccgagctgctctttaacgagctccttcagcttctccatcttggggtggtctaacccagattccttcgcctggacgagtaggtagattactttcctcatgcgcgggtcttccatcagctccttgctcgacttcgtcctcttgtcttctttgagttttttcaggtaggcccttagggcagttagcccctgggtttcaagaagttcaagcgcgtgcaggagcttaaccgccttcgcctggtgcatcctcagccttccgagctcgtagttccccctcgctacttcctggttgatcttcgagccggcctggaggacttccttctttgagatgtctggggaatacgtcgagaccagcttaaactgggcgaggggcttgaggctctccttcagcatctcgcggaggatggaacggacttccttgtagatgcccggcaggtcgaccttaacccactcgaaggctattttttggacataaggtttaacgtccggtgagctttcggtccgaatctctatcctctctatcccgagatttctcactatttcccttattttctcctcgtcgcttccaggagaggcagtaaggcccagaacgagcgggtgttttgcggtcttcaggtactccttagctatgaaaacgtaggagtagttcccgactgctcgatgggcctcatcaaagacaagtagaacaacatcttcgagagatattctgccagttaaaatatcattctcgaccgtctggggcgttgcggttattacgacgctgttcttccaaacttcggccctctgctttggggacagctcaccagtcaggacgtttatcttctcgggcgggatgttgaacagttttttgaagctctcggcgtgctggacagcgagcggtttcgtaggggcgagcatgagaacctttccgccgtactttgagaggcggtagtctgctatgagcatggctatgagggtctttcctaacccagtaggcaggacaacgaggcagttggcctctttacacctggcgtaaatgacctcctggtaaacgcggggctctatgaggtctcgtctgaggtactgcatactcaactcttagtgggagaggataaaagctttcctgagttcttggcgagcggcaggattagaaagcctgctggaagcgataggaacgcagagttccttcctgcgagaaggtatgcgttgttgaagacaggcagtgccctcatcaggataaacagtggcgggaagtatccaaatgctctagaaaaacggctcatgtagcttgacgcgaatatcaccagaagtccaagagttgtgaacagcgcaaagctcccgaagaacagcgctggatcggaaagcctgctcgcaactattggatttgcctcggaaaagcccctttgaactccaacccaggtggtaagcgcgtcgaggagtgagaacactaaaaaagctgccccataggctttttctcttctccacttcattttcacatcatgctcctctaagtgccatcttttaaatacttttttgtgaagtcacaacctacatagatatctacacatgtaggtacataacaaacaacttttaaattcgctaaggatacattccgccatgctgctcacctatcacgcaaaggagaggctgaagaagaggctcgcgaagagaggcaggctcgaaaggatgtactccgagctgtgggtttttctggatcgctccaagcggatcgatgttaatgagaaaatcacgatatttacagatgggaggaaggcactcgtgtgcactcgcttagactgtgagaggcttcaaaagagcgagattcttgagcgggttaggggcataatggactcctacgagtgcgtgtattttgatgggcgggttgcaaaggttaccaggcccgaaaagttcattgagacagtccctgatggtgaatactgcttctacctgaacggggaaaagaaaagcctctacgttgggagcgagcctccattcctggttattaccctccgcccagcaaaaagggaggagaggagttaggagttttcctccagcgggacgaccaggatttctccaaagggctcctcctggaggaggtctaccttccccatgtttgataggaaaagcagatagaggaaagtcctggctattattttcggctgtggatcaaagacgaggtcccagaagcgtatgggctctctggtctcgctgtagagttttctgactatctcgtacagcctgttcacgtgcttctcaatgtcaacgcggaagtcatcaacgacaaagatttcctcctcgacttcctcgcgcttcctcttcctcggcttcctcctctcagcttcttcaagggcgtccatgagggcctcgatgaggtcttcgaaggtgtagtagcgctctgcccttctcaagggcggtgccagcggttcaacatccacgcggatgcgctccttttcttcatcccccttatcctgctcttcgtcggagtacagaagggcctcgctcttcatcctgacgaggatggaagctgctagaattgccctcgctgagatgcgcaggtcaagctccttcatctccctaaggcgctctatgtacttttcagttaggtcaactatgtcgatgttccagggatcaaccttccccatctggacgagctggaggaggatatcaacgggcgttatctctggctcgaatctggattccatatatcacgcctccagccggccgaacatctctctgtgctcggcctcgtcctttttccttatctcctccagtatctttctggccttttcgaggctgagggagaccacctttgagacgccgttcctcatgctgacacctattatcctgtccgcctgcgccatcatgacgtccctgtgggttatgacaataaactggctgttctgggaagcttccttgatgagatcggcgacgcgcttgacgttggcatcgtcaaggtgggcatcaatctcgtcgagcaggtagaagggagccggcttgtagcgctggatggcaaagacgaaggcgagcgctattatggccttctcaccgccgctcatggcctctatcctcttgacgtcttttcctgccggctttgcctctatctcaagtcctcctgagaacgggtcttcggggttttcgaggatgagcttcgcttctcctccaggtgagagcttggcgaagagctccgagaagttcttggctattgcattgagggtctgaaggaagacctgcctcttctgcccttcgatttcctgtatgaactcctctatgctctccttctcggccagaacctgctcgcgcttgctgctcagctcaagatatctgcgctcaaccacttcaaagtcctcgatggccttcatgttaaccggctcaagcgagcgtatctcctcctccatcttctcaatatcctgcctgagcttctcaacttcaagcgggatttcctttatcgagcgtacgagcgccgggtcaaagtgcttgagctcggccctcttctcctgaagggtcgtctcgacctgggccagcctgactttgagcgtattagcctctatcctaagctcctggagctttgaagtaagctcgtccttctcctttctaagctccgctatctccacccttatttgctctctcccctcgcggagctccttgagctcgtccttaacgttctcttcggccgtcttcagctcttcaagctctttctcaagctctgttatggcgtttttattctcttcgatgtaggcgttcagggcgtttatcttgttcacgaggccctctatctcctcctcgaggtcggccttcctcgggaggagctcttcgtttatcctcgagtcgaggctttcgagcttgctttcaaccctgctcagctcctccttgagtttggatatctccgcttcaacttctctgatctttgagttcagctccctcgcttctgggttctcaagggctttctttatcttctctctctttttctcaagtctctctattcttcccctgagctttgccatctcgcccttcgattcctctatcctcttctcaagctccgagatgaggcgctcgttttcttcaatctcttccttgagggagcggtcttcggctagataggagtcgagctccttctggatgacctgaacgtcctttgaaagctcgctcttcttcatgcggagctcgaaaagctcgttctcaagccccttaacctctaccttcagggcgttcacctgggcttccagcgcctctttccttccttcaagggcctcgaccctcttccttatctcgtcaacgttaaccccaagcttacccctcggcttgtagtgacctccagttatcgctccgctccgctcgagaagttccccaccgagtgtgaccatcctgaccttcccgattcctacttccctcgcctcgtccatgtcgttcacgatgagggtatccccgagggcgtaggcaactgcattcctgaagcgcgggtcgtaggagacgacgtccatagctggaatgccaagcttcggcttctccctcatggagcgcggttttatcttgttgagtggcaaaaacgtcagccttccgagctttttctccttgaggagctttattgccttctcggcgaccctatcgtcctctaccacaacattgtcgtagttgccgccgagtgcgacttcaacagctaaagcatactcgctctttggaacgcttatcagctctccaagagtgccatacaggccctctatcctctgggacttcaggaactcaacggccctgttgcccctgacttctctctgggcctctgccttgatcagttcctctctcgctttggccagctcactctccaccttctggagctcccttgttttttcttcgagctccttctcggctttcctgtgccttgattccactttggagattttaccctctacctgggacagctccgacctcttggcttcgagagaagcctttgcctccgctattttttccttcagaaggttcctcctagcgttgaactgggttatcctggctttggccctgctgatctcttcctcaaacttggatatttcactctctttcatgtagagcgcctttttggcctcttcaagctccgcgactaccttatcgaactcctccctggcctcggagaagcgcttgtctatctctccaagcttgatgacaagctcgtttctgacggtttccctctcctttatctgaacgaggagctgttctcttctcttcccccagcgctttatcgctcccttgctcttctcaatctcttcagagacgtgcttcagctcctctttggattttctaagccttgcctggctctcctctatttccttctgcgcgttctctatgttcctcttcgcgacctctatcttggacttgacctcgcttatcttcctggttatctcgagaatgccgtcgccgctcttctcctcaagctggcgctctatttcggcgagttccttctccttcgcgactatttcttttgctatctccttcaacctgtcttcaagggacttgatctgcccttcaatctcttcctcccgcgatccaccttcctcaatgaacttttcaagcctttttatctcagccagaaggagcgtaaccctcgctttttccagcttctccttaaggtcgaggtagcggagggcgtcgttgcgctctttttcaagcttgtcgagctgggcctttacctctcttatcaggaggtcaaccctcgcgaggttttcctccgtctgcttcagctcctttagggccttctcctttttggcatcgtattcagctattccagaaatttcgtctatgatgagccttctctcgattggagacattttaatgaatttcgttatgtcaccctgaaggacgaggttgtagccctcaggagaaatcatggcagcgctgaggaggtctattatttcactcctcgttgctctcttcccattgagccagtacgtactccttccgtcgggatagacgcgcctttttatcacgacttcgtcttcatctatcggaaagcccctgtcctcgttgttaaaatacatggcaacctcggcgtatttggctggaggttctcctttcgaacccgcgaaaatgaggtcgcttatcctgctggccctcatggccttcgcagaaagtcctccgaggacaaacagaacggcatctccgatgttgctctttccagaaccgtttgctcctactatagctgtaaaacccctcgcaagcggcactacaacctttttgttaccataagatttgaaacctttcatttcaattttctcaatgtaaggcatcatccacacctaaatcttggagaagagccgacggtatataaacttcactcaactattctacggagcatggctcgggttttttcgtcaatcccctcactgaccgtgacgtagaaagtagcccccgttaagattgccatgtccctcagctttccaacgaatctaagcgccctttctacaccgttttcgatcatgagatactcaagagcgtccagaattactgacttggtgccattttggagttctctccagatgatactctcgagtatatggaggtcggtaggcttcacggccttggggtgctctgctttgcttacccagatcggcaccacgtcgctgggggcactgtttatgattggttgcctcgttatgaggagctttttgtagcccccttgagcaagcaacctgtcgagctcccgatagtctacaacggggccctgattagatgtttttcttctcaatactaatgccactttcaccaccggcattccccggtgttcagtacattgggagtttccctcattatttataaagtttacttcgaaccaaaggtatacatctgaatatagaacacatcattccacatttttggccattgtgtataacttagttttacatttgattctcttatggggctgttgtaaaaacggtactcaattggccgcattatcacaagacgaacttttaaatctgaaaatgatgacgctcactaataacggatcgtgacattgtcagagagtctttttagctcttatccttattctcgttgctgttatccttcttatcgacccagaaccgcctcgtcctgatgaaatctctctcgcgctccatcagtgcaaccagcagggcctcccctttgtactggctcagaatcctcgcggctgtgtccggcccggttccgtagctggcaagggccagaacggcatcgaagccgtaggaatcaacaaggtcagcggccttcaacagcttcctgtaaacccgttcctccttcttctcaagcggccttccgtgcctgaccttgtcgagaaccggcaggaattcttccgcatctatcgggtgagcaacggccagcatcttcgagccgcagcgagggcattccctctctttgatactcctcaggcgagcaacctttgtcttcgagtgccagccgcagttggtgcagactaaaactacttcgtgctcgaggagcctcttcttaaacagctcaaggacttcgtccctctcaaggattccgctcagaaggaactccccgccaacggtcatgttcagcctggcaagtgtggagggctctttcctgagggcggttttgaccctgaggctcccggctttaagcatctccatgaccagctcggccgtcttcacgtcaaccttgtcgtggtagagctcgttcaaagtctccctctctatgaccgttccctcaaagagccgctcgacccttcttatcttcgcgtcccttctcagtgccccgaaacgcttcgcgacgtttaacattctccagcggtaagcgtgggaatccctcagagacctagccacgatgaactcaacgctctctggatcctggtagaggtagtgcttaacttcctcggggttcagctggaacggtgtcttgaagactaccgcgtgggcctgcgcccttaccgagaacaccctgccgtagcggaggattaagagtgagtgaacgatcctgcctatcgcctcgttcgccctgttgccaaaatcggcgtggatgattagggctttcggcgtgctctccacgaagatgtctctatctgtcgagaagggttcgccccttatctcttcaaacgcccttttcagatcctcttctctgaactcaacaccctcaatgagggacagcgcgttcctgaagtcaaaggccagctccctcttcaacctgccgacggcgaaggcaacgctgaagggaacgggtatcatctcaccctcccagctcggtattgcgctctcgatgctcgggctctcgcgcgccttgatgattttagcctcgtcgtctattttgagaactatccagctctttccacccatcacaaactccataccctcttcgaggtccatcacgaagctctcgtcgagtctcccgacgatgtgtccgcttttggcatctatgaccctccaggagacctcgtccggtatcgttgagaggttctcgtagtagtactggaaggcccctctcctgaggtagagctggttggtctcttcgtcgtagcctattatccgggcgtcttcgagcaccttgagagtgtccaagtagtcttcccagctcaaatccctgtaaacgtaggccctcctcgctatctcgtagggtctctctcttggaagtcgcttgtattccacgagcagaccgacgacgaagtgagccagaacgtccagcccgccgataggctcaacaggttcaaagcggccttctagggcgtgtttggctattatgaggctctggatgtagtcctcaacgttggttgttatgatgtaggcttcgctgacctctcctatccggtgcttcgcccttccggctctctgaacgagcctgttcacctgccttgggctcatgtattgaatcacgacgtcaacgtcaccgatgtctattccaagctccatcgaggacgtgcaaacaagtgcctttattctcccctctttcaaggctctctcggcgtttatccttgcttctcttgaaagggaaccgtggtggacttctacgggtttcccccagacctttagcctgtgggcgaggatttcagcgaactggcgagtgttggtgaatatcagcgcctttccgtgcctctcgacgatctcccacagaaccctgaggcgcgccgcgatgtcgggggaaacgctgagttccctggcgagctcttcatctttttcttcgggctttggatagagcacgtgaaagcggtatgccttcttccagtttggcttgactatggtatcagcctttagccactcccttacttcgtcctcgttgcccaccgtcgccgtcatcccaattcttctgaaatctgctatttcagcgagcctctcaagaccgaggaggagctgggcgccacgcttgttatctacaagctcagcaatctcgtccacgatgacgaacttgacattcaccaggtgctttcggagagatttaactgtcaaaatcacgccgagcgtctctggagttatgatgagcatctgaggagggttcttcgtctgttttgccttcctataagccgaggtgtccccgtgacgcacctcaacggttattccgagcttcttcccccaccattcaagcctctcaaggagatccctgttgagggccttcagcggggctatgtagagtgcagaaatcggcttcaacccctcctcgaggatttcgttgaaaacgggcagaacagcggcttcggtctttccggaacctgtgggagctatgatcagaacgctcttccccgaactaacctctctaaacgcgtcctgctgaagcctgttgagcttcccaaagcgttctttgatgaccttcttgaggagggggtgcatggtttaaggaatgattttgagttcttgaactttgctgtagtccctatcgaaagtggcgagggcttcaatcccgttttcgatggcggttgccaaaatggtggcgtcactcggaaggagagaatacctaaacatgagttctcgtataagctcccagttctgtgaatcattaaccttgattatcccaagtccttctattgcagattccatgagccgtaactctctttgaaaaggtttgtaaccgttcttgttgagaaactccttgagttttctgtatgaatgtatttcaaaggctgtttccgcctttctccggatgactgagtaagatagctcgttaagaatcagagtgctaacgtagaattcgtaaggctcagacagaagacttttagagctttccgtgaggggcgtctcaaagagaaagttgtagagaacgttcgtgtcaaggagaaccctcatagtacatctcctcaaggtatctttcgaggtcctctggctttcccttccctagcacgcctgcaagcttatccacgagttctttcctcccaacaagctttaccttaataatctcgccctcatgaagctctgtctcgtcaagtaagataatctcacccgagcgataaacgccgcggactattttctccatcctccacaccctcagtaaaacattgcttctccctattataacccttactggagaccaccgctagctttataagtgatatatcgttcgataggtcggtggtgaaaaatgcaggtagtcgagaagggtgagacctacgacttatcctatgcaaagaaggcgatgttcgttgtcgttcttctcccgctcctcgtcatgtacaccgaggcgatgctgactccagctctgccaacgatccagaaggagttcgcgataaaccccaacgacgtcagctgggttctgaccatttacctcctcgttggaaccgtcagcgttgccctcttcggaaagctcggcgatatgtacgggaaaaagaagatgttcctcatagcgctcggcttttacactcttggcgtcattctcaacggctttgctccaagcttccagaggcttctcgttacgagagcaatccagggctttggaatggcgatcttcccgctggcgttctccctcgtccgtgaggagttccctccgagcatggtgccgcaggtccagggaatgataagcgccatgttcgcggttggaatggtcatagcactccccctgggtgcatgggtcacagagaactacgggtggcgctggacgtaccactcggcggctcccttcgccgtgctgatgttcttcctcgcctggaaaatactcagggagagccgctatgtaaatcctggaaaggttgactgagttggagcggttctccttactctcttcgtggtgccaatgctcgtggcagtcacaagggcaccaaacgtcggctggactgcgaaggaaaccttaatcctctttggagttggtgtaattggcgcggtactcctcgtcctctgggagaggagagtggaaaacccgttgctgccgcttaagataatctcctcaaggaaccccgcaatagccaatctgggcataatgttagcggcttttggcctctcaatgatgagccaggcgaacacttacctcctccagatgccggaaccctacggcttcggaaagacgatactccagagcggcttgctcatgaccccaatggccctcgttatgctcatcgtcgcccctctcgccggaaagttcatgccgaagatcggggcgaagccgatagcgatagcaggtgccctcatcggaagcggtgccctcgcggtaatgtccctctacgcaacgaagatgtctctctggcagttcgtgacgatgatgaccgtcgttggaataggcataaacctcatgaacatatccctcatcaacgtgctggtcttctcagtgccgccgagaatgatgggtgtcgccacaggctccaacagcctcttcaggaacttcggctcgacctgggggccggcaatagctggaacggtaatgagcacctactacgtcctcttccacccgcctggagcaccggccttcgttcagatcaagattccgacggaaaaggcctacgaagtgctctttgggggagcgtcggtggtctatctcctcctggccctgctggcatttgccatcgttgaggtcatgaagggcggaaagatacgcgaggtggaggaggggggagaaaaggaaattatggtctcttaaagtttttatttatttcctgagcctagtttattagcgaatttagataagaaattaactgttcttttattttggggttaatttttgttatattaccactagagacttctattgagtccctaataaggtgtgcaagatttattcctaaaatccccaacttagttttatcgaaaaaatgaaatatcgaatttttacaggtggatatcgaggatatatcacaaagccattgattatattgattataccctgaaccctgactataatctttcagcatgggatatacgagaacacctgcatgagcattatataatttagtgtaagaatatatttgatataaatcactggaattcttgacgtatctctgtttttctccacatttaggacagtatagcgttttgtattttgcatctaccacgactaaaggctgtccagagcttgattctataataatgtctggctgtggtgggttctcaatgaattttctaggtgtttccagaacgaattctctattctgaggatgatatcgtactctataatctttcccaagaatggctctgagcaatttatatacaaaaaactcgaaggcatctggcataggtataataaatcctggggagattaggcctttctgataatctaatcctgatattattatttttgctaacttcaagggaagttcaaatctaagatttaaggagtttagtgttaatttttctatggaatcaactgatatcggtgttaaggatacttcttttaacatatcccatgcttctgataatgttctttttgtttctcttctgttagtatgttgtagccctaagtataaggtatacttaaaaaccctattaagaaagttgtctacggtaaattttttatatctaatatcaaatttgtgcttctgggttggcaatttcaatatttctctttctactaataattggcctcgcaaggacgaagaagtttcctcagtagatacaaattctccataaataccaaatcggagctcattaagtagtctatttgaaaagatatccaagagaatatcaatgaaaggtgaattcccttcagttgcaagagctgtctttatatcatactctcttaaacctaagttgtagtataagtctgcgatttttagtactattttccagctatcttctgaggatagcccacccagaaagatttttggataaatgttgatttggtgtatctttccagaagttttgtctttatataaaacgaacccaacatagggtcctgcggcgagcctgttgtgctttataactaatactggatcgaaatatgaattgtttatctgctctacaaacttttgaaattctctgctattaactagctcggatggtatttcaggaagattccatggcctcttgtctatagaatgctctggcacatagatgtagatgtgatccatgttcttccacctattatttgatgaatatttattctcccaatatacctctcagagcttcaatgaacctctctggagatttcattagttcgaaatttatttgccctgtgccatctataaattcaggcatatctagttcatcccatcttgagtaataatagtcttgaagtaatggaagtatcctgttataccatatacgtatgagtttttgcagggcatcatcctcatttccatttgataacgcttctttaagttcaaggaaataagagtgccctatttgatagtctttgctgccttttgagtgaattatcctgtcatttattgctttgagcaacttgtcgattcttatcccatagagatttaattcttccagcacattatagtctggttgtacttccaaaaatgcaaatctccgtcttagtgctacatctaatagggatattcccctatccgcggaattcatggttccgattatgtagagattgctgggtactgcaaaaagctctctggagtagggcagttggactattatgggatttttgttgtcctcgctaattctcttatctttttcaagaagagttatcaactcaccaaaaacatgactaacatctgctctattaatttcgtctataaccaaataaaatttcttggggttgttagtgaataagttattgatgtcctctgtgctaagagcaccatttgaaatttttgaatctagaattccaagaaatctctgaacgaggaacttaacgccctcatattcagcttcttctttatatgtcatgaaaattgattctaaatcaccaagaagctctctaagcttctctgcttttgttattagatcgtccccatcatatatggtatattcagcaacatacattcttcctttgtcgtcaacccgaatatcattccggattatacgattagctttcaagtctgaaattaggcgttcccaagcaatctttttagcatgattttctatttgtgtttcatagttgggtaataattgttctttgatagtgtctgacatgagttcataaatagctttaattgcgagttttttgaatatgccatcttttacagcatattctattttaccttcgcgagtgagtgggcgatacccttcgacaaaatcctcgtagctatatgacttatggaatgtaacaaaagagtagtgtgtattgggtacattaatacatctcaaaaacattcgggccataaatgtttttcctgttcctggtggtccatataagataacttgcttgtattcatctaaaagaacttggatagtgcttatcttatcctcgttgcaatatccaccgttactatttttattacttatgtcatgtttataagaactactactgttttgattggtttgattggtgctagaatagtttgtgaattcactgttctctactatttgataattttctatataatctactggagcacttaaaagttcagaaattggagtgattattattttaggcgtattccagctccataaaattgaaagtttctcatcatcagggattgtaatattgtattcttttaaggacgcttttatgtatttttctaatctcgtatctaatgtaattgatgttttagaatgtctaatataatctactagttccttatttggaatttgtagcaaatatttttcgtcttgggagtcaacatagactaaatacagatttttatttgtcatttttacatacttaattttcccttgatactcaatatcaaaagatgatactttaggttctccaacaagattgataatatatacaagaagtgtgttcttaaaagataaattaacagctccaattatcagttcgttgtcattctcgtgataatactgaatgtcccagtctttgaaatctatatcgtgatcattgatatcaattatccgaagaggttgttgtttattttgggtagatcttagaatcataagttgtttttttccagtatcttgggtttttactatcacaggtagataaaagcttccatctcgtagtgagacaatggtatttgggactttttccaaatagtacttgtactcaccgatatattgattgaaatttatttcttggattaaattcacatatttcctatttctatgagggaataatgcaccacttggggcatatatgacgacaattttgtgatctgggactgttggcctaaagaatattttgcccatattggtaaaatacagctcattgtagtctttgtcaatgaaatcatagatgaaaaatctgttggatggaatatatgagactataaatttacctccccctacaaaagaataaaatacccccttttcgttttttagtatagggtcaaagactcttttaatcccattatcgtgtatctcgtataagtgcaacttagaaaaagtttcatgttctccttcctctactaataaatatcgcgaatctggtgaaattacaatattttttatgtgcccttcaacgccatatctttttccatctattataactgattgattcatttgttatcaacctccaattcctgttcaatatgatttaaaatttaaaatttatccttgatttgccctgttatcgaaactgaagaaaattaaatctgaatctataacgcgttcaaagccttcagataaagctctcttatctcctctggctttggttcaacggggttgaacgctatcagcccgtcgcggtaggccttttcagccatctcctcaaccctttcaacaaaagtctcttcatcaacaagctcgcttagctttggaactcacaaggcgctcgttgagctctctgacggcttttatcagctcttcagcactcttcaacccaagttcgcgcgctatctcagcatagacgcttcctcgcatactcactacctctcggcgttgaactccatcacgtagggtatgaatatcgcgttgagtaagccatggggacctacccatgccgccttgtggctcatcgcgtgggccaaaccaagcctggcattgagaaaggctatccctgccatcgttgccgcgtagtgcattcttgccctcgcctcggggtcaccttcaaccgacttcggaagccactcgaagacggtctttatcgcccttatcgccatcgcatcgctgaagggcccagcgaccttagttgtgtaagcctctataccgtggacgaggacatccaggccagaattcctcgcaacttcccttggcatagtcctcgggagcctcgggtcgagaatagctacctcaggtgctatctccggcgttacgatgttgtactttatcccgttcttcttcaggacactggccgcggaaacctcgcttccagctccgctcgttgagggaatcgcgatgaggggagtttttagttttggaacgggcttcggccttgagaaacggttgatgaaggctatctcctcaaagacgagctcgggggcatcgtagaagaccttgagggctttggtcgtgtcgataacgctgccgccgcccatggctatgaggagatcgggcccaaactccctaaccttcggcaggaactcctcaatgacctcaacgctcggctccgccggaagtcctgatatactcataacctctgctccggcttccctaacgtagtcctcggcctcgcttagaaagccgtgcctcttcatagaaccagatgccagtatgagaacccgttcgtgatccttggcctcgtccttgaggctctctagtgagtcctccccctcacttatcctcgtcttgagccagaacacggtcatcaccggagttagttggattttctgcttttaacgttctcgccgaggagcggaagtattgaaaccaggaggagggcagttgcaaccgtgaagttcacggtaaaacctagcccttccgtcagaaaaccgctgaggaagttccccgctattgcacccagggagcttatcatgttgtacgtccctatcagagcgcccctcttcttggggggagcgaagcgcgagattatcgaggttgttgagattcctatgtatgcccaggtgtagcctgccaggaaatacgagacgaaggcaaggagcgcaaaaacttggccctcaattagcgtggataccgcaaggagcgagaaagcaaatgccctaactgaaagcccacgaatgagagcgaggtagcccccgctctttttgagtttcagaccgacccgcgtgtacatgaaggccgatatggtggagttccctatgctcatgaggtagaggtgagtggcaccgaagcccctcgacttaaggagaaccgggaactgggtgaagtagagcattgcgcctacccagaacaggaaggaggagaagtagagcctcccaaaccccttcgtcgagaatcttggcaggtgagttatcatgttcggaaggtacctgaacttctcaacgacgtagccagcgtaaacgccaaggatttttctatcgatgtgaagtgggacttcccgtattgtctttttgccccatggaaacgagagaagccctatgactccaagggcaatgaaagttcccctaatcccgaacaggggtgtcaagagcagtcctactattaaaccgagaacccaggcccagccgccgatctcattgaacttccctatcgcgtagtcccagtcctcaaggcggaaagcctttgttattatgaggattggaatgggtatggtagtggctatgaagaacgtgtaggccgcgtttatggcaataacctggtggactgtgcgggcgagggcaaagctcatggtcattattgcagtcccgagaaatccaagaagcaggaatgcctttctcctgttgagcctgtcgctgagctttccccagaaaaggccgccgagcattgagaatgtactgcccaccgcgttaactattccaacatccgccggcccaccgccgacgttcattgtgaggagcggaatcaatggtgcagctccaccggtggcgaccttaaacgggataaaagaatagaaccatctgccagggtccggccggtaccgcatttggcgacgcttttcgagggtcttgagggtggtcttctgtctctttaccggccggcccttcatgggagcacctcaaaaagggagggagaattcagtagtcatcctcgtcttcttcccagtcctcatcccagtcttcttcgtcctcccagtcctcgtcccactcttcctcttcttcccagtcctcgccaaactcttcttcgtcccagttctcgtaggcttcttcgactgcttcgaggggctcgaagtcctcttcctcttcttcctcaaccttcttgggctggaccttcttcctgggtgggtagtacataccgaccacctcccctcctacgaggggcgtcagatgtggagctaaagggtttataaactttgctgcgctgattaacagcatatcttttgctttctgaaggatttaagctcgattgtctttgctatggcaaaaatatggtctctgaacgagaggaatgattcctatcaacatcagtcagtaataatgagatgggaaacaatgtcatgagtagatggttgacgggagccattttagactgctctctgtcatgcgatttgagttgctagtttaagctaaaatcttaaaagcaccgccccggacttactccggtggttgaaatggcggaagacaccaagaagcttgaggaactcgcgtaccagtaccagctcctccaggctcaggctcaactgctcgcccagaaccttgagctcctgactctggggaggaacgagttccaggcggtcaaggaaaccctcgaaggccttaagaatgaggagggtgagttcgagatccttgttcccataggggctggatcgttcctcaagggcaagatcgttgacgccaagaacgcgatagtcagcgtaggtgctggctatgccgtccagaagagccttgatgactctattgagtacctcgaaaagcgcataaaggagtacgaagaggcgatagcaaagacacaggaggcccttaagaagctcgaagcccagctgggagagctggccaggcaggctcaggaaatccagcagaagcaggcgatgggcttcagcgttaaaaagtgaaggaattgcccctaaggattatttttggcgtaccattctactgtttttttcagtccttcttcaagagaccactctggctcaaagcccagctttctaatctcgcttatgtcggccctgctgtgtcttatgtcaccaggcctcggtttatcaaagactaccgagctagtcgttccggtgatttctataatcttcatagcgagttcaaggatcgtggtctctctccctgtcgcgacgttgaaaacccttccgttagcttttctgctctcggctaccagaaggttagccttaaccacgtccttgacgtagatgaagtccctcgtctgctttccgtcgccgaagataacgaggggttcacccttcagcgcgcggttgatgaagatgcttatcactcccgcgtactggttggtgctctgcctcggtccaaagacgttgaagtagcggagagaaacaactggcaggccgtaaagctcgtggaagacgcggaggtactcctcggcggttgctttggtcaccccgtagggggagagtggtctaggtctctcagtctcctttagtgggaggttagggttgtctccataaacagctgcggaagaggcaaagatcaacttcccatgcccttcgagaagtgctttaataatgttgagcgttccgaggacgttgacctcctcagtaaaaaccggatccctgatgctctcgacgacgctcacctgggcggcctcatgaaaaacgtagtcggcgttgcttatcagctcggctattgcctcgtagtctcttatatcggctttgacgagcttcgcccctggtggaacgttttcttcttttccagtgtatagattgtcgatgattaccacatcgttgtccttgataagctcccaggctatatgagagcctataaagcccgctcccccagtgacgacaactaacttatttttgatcatggtgagacccttcagctttaaggcagctggcccttttaatactttcttttcttcaacatgtcgatgagaacttccttttctgggagctctctgccgctccgcgccagatacgcaaggtcttccagaacgagcgccaccttctcaagggagtcctttgtaacgttccagggggtagcgtatcggaattccacgatctcagccagatcatcgaggtccaattctccaagctttttaccgtcctctgttctcacgataacgctcctccgctcggggtttatctccaggcaggccgtaggcatcaccatataaaaatccgcgtaaagagatttaatactttcgaggcgttattaacgaatagatgtcaacatggaaagcattataaaccccttattgacttagacatgggtaagagccatgccgagctacatcgtcgttggaggtcaatggggagatgagggcaagggctctgttatagcctatctggccctcaaagacgagcctgaagtcatagcacgcggcggcgttggaactaatgccggccacagcgttttcatcaacggcaagaagtacgcggtgaggcagctcccaactggctttatgcagaccaaggcgagacttctcgtcggggctggcgttctcgttgatccagaagtctttttccacgagctcgaacacctgaaggacttcaacgttcgggggagggttgggatagattaccgctgtgccataatcgaggagaagcacaaacagctggatagaagcaaccaccacctgcacgaggagattggaaccaccgggagcggatgcgggccggcaaacgccgacagagttatgagaagggcaaagctcgcaaaggacattaaggagcttgagccttacctgacggacgttgctgctgaagtgaacgatgcccttgacgatggaaagctcgttctaattgaaggcactcaagggttcggactgagcctctactacggcacttatccctacgtcacttccaaagacacgacggcatctgccattgcgagcgacgttggaattggcccgacgagggttgacgatgtcatcgtcgtcttcaagagcttcccaacgagggtcggtgcagggccgtttccgactgagatgcctcaggaagaggctgaaaggcttgggctcgtcgaatatggtactgtcacaggcaggaggagaagagtgggctggtttgacttcgagttcgcccgctactccgcgagaataaacggcgcgacgatgcttgccctcacgatgctcgacaagtacgacggggaagccttcggtgtcactgactacgataaacttccgaagagggcaaaggagttcgttgaggaaatcgaagaaagggtaggcgttccggttggactgataaagaccgggccagagctggagcacgtcattgacagaagggagaacatttaggggagaaacttcaggatcttacctttgatctcttctcttttaagctttgaaatttcttcaagggaatagtccttttcaagccagcagatgaacttatagccaatgtagtagcctaagaaccgcttcccaaagagggtataccacgagccgaaaaacgggttcaggggttctttttcctgtatccttctcaagaattcggccttcaggagtccctcgttttcttcacaccactcgaaccatccctcctcctctaggtgccagggccttccgatgattatgtcctcaatccgttgggcgaacccctctgtatacagcaggaacatctgctcatcctcaagccgctctatgttttctccccttaaaagccagtgaaccaggtgcccaaactcgtggacaactaatccctcaagtttgctgtaccacttaagcttggctattgcctccagaccgaagagaatcgggggttttccaaggaattcggtcacccatccggccccgttttcaatgcctatgtagagaaccacgttgtagtccttcggtttgattccaaaaagctcctcaatctttgtttccatccttgggagaacttcaagcagcttttcgtgggcaaggatgagctcctccatgtttcgttttaaaagtaacttcgtaaaccccttccagtccattccatagcgctcatagtcccactttaccttcccaaatagctcagggtatccccgaatataccggagccagctgtctacggtcccgttccactccttaaggaacctgggaaaagtatcgacgagcatagaggccacccgagagtgcatatatcaacctcaaagcgagtctcccaacaggattcttccaccttgctcgataaaagggttatgataaacgctaactttaccctacagagcaatttcaaaaatccacagcaaccctcctgccgagacgaatgccaggaactctatcagtgcaccgagaacgagttttttccatgtcttgatgtgttttctctccctttgtctcaagcatttctccgtcacgagaactggaatggccttgtaggaaccataaaccagcagaacgtagagccatgcaaccgggttgaaagagagaaagaccgcccccatctgctccataagtataccagtggcgcccctatccagaacacatctttccagctgtagtcgtaccttcgaatggccagtccccaatagagaacgaaggggaagtagtaggcgaaagcgaggtacaggtctgtcagtggatccgggttgaggagtatcttttcctcaggggaaagtttgaggttgtcaattatggcaagaacctcaacaagataggctgaagccatgccaacgaccagatatgtgccgaaatctccgctatggcgttcgtaagcggcccagattttttctctgaatttgtgaacaaaccccagaacagtgaaaattagccaggtggtgcctagtcagggaagtgttaggaggggaatcaaaatggaaatatggaaaaggcgttccctattgactttcattctcaagccttctctgaatgctttataagccactccacgatcgtcttgtggaactcctcgccccattcgggatcctcaaatatctcgtggtaagcaccctcgaactccctgatttccttgtccttcaccttgagctcctcgaagagcttccttgagccttcggggggtgttataacgtcacctgtgcccacaagcaggagaatgggtacttcaattctgtccgcttccctgtgagctagctccatgttcttgaagatgctcattccgagctttgttgagattctgtcgtggactaacgggtcttcgatgtagcgcttcaccgcatccggattccttgaaaggaggtttgggtcaatgccgttggagagtgtcagaccgggggctattcttcccagaaccttggcgagggcaaccataaagcccggtgttttggggcttttggccagggccggggaggacgcgacgaccccgcgtatcttatccggcctggtctcggcatagcggatgacggtcaaacctccgagactgtgtccgaagaggaagggcttttcacctaattctttaattatggaatcaattatttccatagcctcttcgacgctggtgtgccccctctttccagggctcttcccgtgtcctggccagtcaaaggtatagacggcaaagccagcctcgttgagcatcgagatgagctttccgtacctcccgctgtgctctccaaggccatgaaccaagactacccaacccctctcaggatttccgaacttggctttgtagatttccatgattacacctccagccagagcctcttaatgggaagtttatcaaaatcctcatcctcactcacaatagcctgaaggccgttgttctgaatcgtcgcggcgtggagggcatctgaagggcgaaggtggtacttgagaattatttctttggccgtgaggtaatcctcaaaggtgatgggaagcaccctaacggcaggcagtacaacgtcttctatgaacgatatcgtctcaggatagctcaccccgtattttcgtttagaaacgtgaatgagctcgtccaaaacaaggacgttcgtgtaagcttcattctctctaaccagctctgcatagaagcgatcgagcctctcggcgagttcatcgtctatgttggcgtttaaatagacaaaaaggttggtgtcaatgagcagcctcattcctcaatcccccagacctcgtcgaactcgtcttcaaggctcactcctttgagttccccaagtttagctggtttcgcgcctttcctctttttgtggtactccctgagctttttaaggagttcttccgtgtccggcactctcctgatgacgagtgcatcttcccttggttccactataacctccccgccctccttaattccgtaggcctccctgaagactttgggaattactatctggccctttgggccgactttcaggcggatactaaccaccggtatcaccaagtataacttgaagtttaactcataaaagggttgcgccgcgaagaagggaaaaggtcaagaggagaacgggctttctttgagcttctcgttgacaaaacgtactattttctcaacgtccttccttatcgtgtccggctcgggcttcatctggacgtagaagacgttcgtcttcggtgtaagtgctacgtgtttgatgttctctggctttgggagactttccacgagggatttaagcttctcaacgtcgcgcttcttctcaaacaatgcttcgtacttcttgcccgctatctcgatttcctccctctgcagtagctcagcgttctcgatgtcgggcctgagcctgtagtagcccttctggatgaggtgagcctcgcgcttgatctgggcaaagggtttgatgactatgaagagcttgtcgtgtctgctcgtgaccagcgaaatcgggaagtaaaggatgctgtgccttggaaggagtgtaagagtgtactcgaactcccttatgttgtcgcggtttaccttgtactccgcgcggaagccaatgtaaccgccgagccacgtgtagttttcgtcctctggcttcacgacgtccttgatcatccttatgtagtgctccatgaggatcaggttcatcttcctcccgcggtagtactggatcacagatatcccagccagtacaaagattatcgtaaacagaagctgattgtccatctcaatcctcctccggatagtatctcgtaagatttctggcttcgagtatttcaagttttggcacatcatcaagggccttaaccacatccctaacaattctccatctgaccggccagctgagggcgttctggaacgggtgccgtattccctcggcgagcctgaggtaaattttaacaccatcttcgtcaacggtaaccctctcaacgaggccgaggctgactatgtccatctccgttatgggctcattcaccctgcggagtctgtcgtatatttcctcagcgttcaccgattatcgcccctccaagttctctgagcctctcaacgccgcggggctcttcgggaaagatgggtatcttcacgatgtcaacccctttgaacttttcagagacctccattagcactctctcctgtgcctccagtttggctttcagttccgggacttctcccttcagctcgaagaccttgttcattactatcatgttgaacggaatcctgaactttttgaggctctcgtaggccctctcagtttcatacaacgggagcatctcagggttcataacggccacaacgctcgtcttatcggggtcagtgaggacactctcaacgaatgctacttctttcctgtaggccttcagctccttcatcacggggtcttcctcttccttggtggggagctttatccgctctccttctaccacgaactcctgctcgccgtggatgttggctatcgcggcccttctctccagaattgcccgccgtatctcgatgagcttgtccgtccagatgagtgatatcctcgggagcgcgagaaccctgagggtcagtcccgtagggggagtgtcgaacactataacgtcccattcgtcgcctttcatcagtatctcctttacagcctccagcgttgcgtactcctctatccccggtgaaaagctgagaacctcgaagtacttttcgaggtttatgacagtcaggtagcggtacatgtgcttgaggttctcctctaggtgctttagatagctctttatcagcttctccatgtccagctcgctcgcgtagagattctccgctatcttttttggcttatctgagagcttctccatcagaacgtccccgaggttgtgcgccgggtcgagtgagactatgagggttctgtagcccttgtcggcgagggcaacggcagctgccgcagagctcgtcgtcttgccgactccgcctttccctatgaagaaaacaacacggtagtctttcttcggcaggaagaattctcgcatggctaccacctcatgtgatttcaaacatccctgctagctcgccaagaatgtcgtccatttcaacggcccttctctgcatcacgtacagctcgcgagtcatgtgtgggaggagccttataaccagagtcgttggcggactcggtattcctacgaattcccccatgagggtgagagcgaagacgttctcaagctccctgagctcaaactcaaggtattcggttgaattgtgcttaaacgactctgcaaaccctttaaggaaagcctttatatcttcaagggctcttttaggcatttttatccccctcaaacgcctatccatccgcttttcatggaaacctctttcttgctcttctgctccatcacgtacagctccctaatgacgtatggaaagagcctgtatgtaagcacggtcggaggatggggcaggcctacgtaatctccaaagagtatgagtgcgaatatgttttcaagctcttcctcttcccattttatcccctggatataatatagttcaaaccccctgtgaaactcccagaggaagcgaagcgggagagtgagctttgaaacaatatctctgattttccgcatcccctgtccctcaaaaaaaggttgaaaatatgaaagaacttcaggccgcagctgcagcgtactcctcttctggcctcttccaggcaatgtagaagtcccatgccaggaggaagttcaggagcaggccgatgaggagcgatcccttgactgctatgagggtgcttccgctcagcggcactactgctatgtaccatatcagtgctgcagtcacggttatccagaggaacagtgctggcaggaggacggcccaggaccactttccggccctctggaccttggcggcccaaagggctgcagtcatcattgctatgcttgctaagagctggttcattcctgcgaaagccggccagagaaccttgtaacttgcaccccaggcaagccaggtgccgagaccggctatgattattgaggcaacccacttattggtgatagtcttccatataccctggctcgtgtcggcgatcattccgaagagctcttgccaggcgaaccttccaagtcttgtggcggtgtcgagggaagtcagtgtgaaggccgagacccagagggtagcgaaggtctttccaaaggtctcgcttacgccgtagaactcgctgacgcccttagcgtagcctccgatgaaggttccaagaccgcccttggtaatgtattccgttgcccacttggcaggttcaagacctgtaagctggacgccgtagaccgctatggccgttatgacaatggttgagaggaagccctctgtaaacatgccaccatagccaacgaggagaccgtgaatctcgttgtcaagttgcttgcttgaagttccggagccgacgagggagtggaagccgctgagtgcaccacacgctattacaagcggcaccgttggccagaacggtgagggaactgcctcagtacccttgattacgtaggcgctccaagatgtgtatgcgggtgcggtaaagtccttggcgagcagtacaaaggctatgcctccgaagagcaggccgaaccaaaggatgtatgcgttgaggtagtctctgggctggaggagaatccacacagggagggaagcggctacgataatataaaccagcaggattatgttccagtagtggtatgcggtggtgtaggcggcggaggttgtgtcggtctgaccgttaacgaagacaagcgggtggttaaggcctatccagacagatatggccagcagcacaagtcctattatcgttgccactgtgaagttcatcttcatcttgtagagcaaccatccgaggatgactgccaccagaaggaagagcagggttgcagttgccgcctcgggggttattgtcaggagtttggcagttaccgcgacgaacgcagctacaacgagcaggagggtaaaccatatgtaaagttcgaacgccactccagtcctcttgctcatgagctttcctgcaatccactggacggacttaccatcatagcggacagatgacatcagtgcgaggtagtcatggacggcaccaatgaagacgtttccaaaccagacccagatcagtcccggcagccaaccccaggccattgccaccgcaggaccgacgattggtcccgcacctgctatcgaagcgaagtggtgtccatataggacgagcgggtgtgctgggacgtagtcaacgccgtcgtatagcttgtgggccggcgttggtctgttggggtcggccttaacaaccttgttctgaaggctcttaccgtaggtgaaatacatggccacgtatattgcagcggccaccagaacaattacagcagagttcattcctgcacctccatttaagttttgcacttcaatgtacactttccgtacttaaatgtctttcggaaatgggctgaaaatatttcgatttttaacttgggggcataagaaagaccttcagtgctttgttagaacctttttgagggcaaaaattgaaaagacactcagaaagtcaccctatttctattagtgggtcgccggtgtttacggtgtcgccttctttgactaggattttctttacgacaccgtccttaggcgctggaatctcgttctccatcttcattgcctcaagaatgaggagtccctgtccagtcttaacctgctcgccctccttcacgaggattctcaggattttgcccggcattggggcggtgacgacaccctcaccagcgacggtgactggtgatggtgccgctggagccgggatgggagctggaatcgaagagggagcacttggagtggaaatcgtttgggatgcagagatagctgctcccgcacttgccatctggggcaggtatctgagcgcgcttagatcaacaccttcaattcccacctcgaactcaacgccgtccacgtagagtttgaacttctgggcggtaggcggcacctctggggccttccttccctctttcctcgcctcgaagaactccagcgctacctgcggaaagaggcagtaggtcagaaggtcttcctcagtcgggctgtaccccctttcttcaagctccttcctgcacttttcaagcataggttcaagaaggtcagccggcctgaccgttatgggctcttcgtcgcccaggattttcttcttgatttcggggtttatctccgctggcggccttccgtagaggcccttcacgtagtccttgacctgctgggttaccctttcgtaccttccaaagaggacgttcaagacggcctgagtgccgactatctggctggtgggggtgacgagcggcggccagccgaggtcttccctaacgcgcggtatctcctcaaggacttcgtcgagcttgtccagggcgttcatctccttgagctggcttaggaggttagagaacattccacccggaacctggtacttgaggacgtaggggttgaccatcaacgcctccttgtggagcagtccccagtacttctcctccaggagcttcttgaggtagcgcgagacctcgtggattagctcgcggtcaagatgagaaccaactgccttggggagggcgtgccatatcgtctgaatcccgggctgtgcagtgccgaaggctaatgggcttatggcggtgtctatgaagtcagctcccgcttccacggccttgagataggtggcaacggccattcccgtagtggagtgggtgtgcacattgacgggaacaccgtatgtctcctttatctcgctgacgagctcgtaggctttccaaggtgtcagcagacctgccatgtccttgatcgttattacatccacgtcaagggctaaaagttcctcgaccttcttcatgtagtattcgagtgtgaacactttacccgttgtgtaggctattgccccctgaacctcagcaccgacttctttagccttttttatcgccaccgccatattcctgatatcgttgagggcatcgaagacgcggaagatatctattccgttcttatgtgcgagctcgacgaacttttcgacgacatcatccgggtagtgacggtagccgacgaggttctggccacggaggagcatctgtagcttcgtcttctttaggtactcccttagaatgcggagtctctcccaggggtcttctctcaggtagcggatgcacacgtcgaaggttgcccctccccagacctccatggagtagaagccgattctgtccatcttctcagctatggggagcatgtcctctgttcgaaggcgcgtcgctattagtgactgatgagcgtctctaaacgtcgtatctattatctcgacccttcccattctcctcacctgtttatatgttcttagcactgtttttaacgttatcggcttttgacgatacaattttaggcattaaacgaacagaagagtaccccaatgccgtttctaaaagttggggaacataaacgagcactagagttccagtttcattgaaaagcatctctatccgaaacgaaaaagtggaaatgagtcaaataagcccctcggccttagcggcctcttcagggatcctcgtttctgtggatgacccttatgagggcctttatcatcggctctggattctcgcgctggaagatgtttcttccgacgacggctccagcccctccagcctcgatgacatcccagacaaccttcaggaagtcaacggggttgtcagtctttgctccaccgctgaggagaaccgggacgccagcggcggcgtcaacgaccttggcgaaggtctcctttgatcccgtccagtaggtctttatcatgtcagcgccagtctcggctgcggcccttgcaccgtacataacgacgcggtagtcctccttcttgccgtacttctcgttgatgtagggcccgcgcggataggcaaactggacaacagggaagcccaagtcatgggcgtagctcgctatctccgcgaactggcgcatcataacgtcttcctgtggtgagccccagtagacggttgccgctatcgcatcggcgccgagctttatcgcgtcttcaacgtaaccgagctggctctgaaggagctgctcctcctttggccttagctcggtcttgctcgtgagctttatcataagccccgtgtccggcttgagctcgtcgccggccatcctgacgatgccggggagcatcatgactccgtcaactccagccctgacgaccttcctaatgatgatcctcgggttaacgtgctcccagacgggctcaaaatcggtcggcccgtgttcgaagccgtggtccatggcgaatattagagcccttccgtccctgcggaagaatctcttaagcctcctcctaatcccaacgctctggtatgcgtccatactaatcaccaggagtgatatacaaagggaggatttaaggttttccattgtctccccagtactcttcccaccagaactcaagacttgaaaagacctgctcatccgtctcctcttcctcgggccccattaaaaatccctcaccaatctcatcaaggtcttcgttgattgctatgggtgcccacaggtcagatgcagtcaggtcgtcaataatcgaccagaggaaatccctcattagcttttcaacgtatttaactttctccggagatattgccccaagattgttttcgatgagtccctctgcttgaaactctgccctcacactctgcctctcacgctcaacctctaaggaatgaactttaagcccccttgacttcaaaacatcgagagcagtttcctcgtcccagtattcggcggggctttccctgaacttttcaagtatggccttgaggtacaccgggagaacatcctttacaggtcttgttttcactagtgcaataaacctgacggccttcttcctggaagttctggagccaactataatgagatttcctgtgtcgtcatcaaaactgaagccatctggggagacatgcaacaccatttcagacaccccgcataggtttctccaaaacagtttaaactccttcccgagttttaatctcgggagggcttatggagtggaacgtcattcgccttgatgaggtagactcgaccaacgagtacgcgaagaagctcattcccgatgtctctgaaggaacagtcgtagttgcaaagaggcagacctccgggaggggaaggaagggtagagcctgggcttctcccgagggcggcctgtggatgagcgtcatcctgaagcctcccatgatcgaccctaggctcgtattcgtgggtgcactggcagtatcggacacactgagggacttcggcattggtgcatggataaagtggcccaacgacgtctgggttggaaacaggaaaatctctggagtcctaacggaagtgaaaggtgatttcgtgatcatgggggtaggtctcaatgtgaacaatgaaatcccagatggtctaaaggagactgcaacctccatgatggaagccctgggggaacccgttgacattggggaagtcttggaaaggctgcttgagtatctcggccgctggtataagacatttcttgaaaacccgcctttagttgttgaagaagttcgcgggagaacgatgctaatcgggaaggaagtaagagtcctgctcgatggcaatgacctcgttggcagggtaatcaccatatcagatgacggctcccttattctggacgttgatggacagacagttaaagtagtgtatggtgatgtgtcagttagaattaaccgataagttttgactttttgacaattttccagggacaaccctaataaacttccttttttaactggattatgctggcaataagccagccaataagggggtgaaaagatgggaaaaagcctcctgaggcggtatctcgactatcccgttctgtggaaaattctctggggtctggttctcggtgcagtcttcggcctgatagcgggacatttcggctatgcgggggccgttaagacctatatcaagcccttcggtgacctcttcgtcagattgctgaagatgctcgtgatgccgatagttctagcgtcgctcgtagtcggtgcggcaagtataagccctgctcgtctcggccgcgtcggcgtcaagatcgtcgtctattacctcgctacctccgccatggcagttttcttcggtctcatcgttggcaggctcttcaacgtcggtgccaacgtcaacctcgggagcggtaccgggaaggccatagaagctcagcctccctccctcgttcagactctactcaacatagttccaacgaacccgtttgcctcgctcgccaagggtgaagtgctcccagtgatattcttcgcgataatcctcggaatagcgataacctacctcatgaacaggaacgaggagagggtcagaaagtcggccgagaccctcctgagggtcttcgatggccttgccgaggctatgtacctcatagtcggcggcgtcatgcagtacgcaccgataggtgtcttcgccctcatagcctacgtcatggccgagcagggcgtcagggtcgtcgggccgctggcgaaggtcgttggagctgtatataccggcctcttccttcagatagtcatcacctacttcattctcttgaaggtcttcggcattgacccgatcaagttcatcaggaaggcgaaagatgctatgatcaccgccttcgtcaccaggagctcaagcggaaccctccctgttacaatgcgtgttgccgaggaagagatgggcgttgacaagggaatattctcattcaccctgccgctcggtgcgacgataaacatggacggtactgccctctaccagggtgtcacggttctctttgtcgccaacgctatcggccatccgctcaccctcggtcagcagctcgtcgtcgtcctaacggcagttctggcctcaataggaaccgccggtgttcccggtgctggtgcaataatgctcgcaatggtcctccagagcgtcggcctcgaccttacgcccggaagtccggtggcgcttgcctacgccatgatactcggcattgacgcgatcctcgacatggggaggacgatggtcaacgtcaccggcgacctggctgggactgttatcgttgccaaaaccgagaaagagctggacgagagcaagtggatctcttgatggcccctattttcattacccctattcttacttttgatgtcttggacattcaccgcttgtatttgtgtgggttaaaatcaagtgaatacacgttagaatcttaatctcacgctggtaatcggcagagcttcaaccgatgaaaaaggttaaaaacctccctgagtccctactaggagtgagttaatgggggaaattctaatgaagaaagttggtgttttgttattgattgttttggcgttcggagcaattgccgtgccgagctttggcgccgatgcgtattccgagaaggttgagcagaagtacactgtccactgggacggttcagcagatttaaagttcataacgaccctctatggaccctcagacatgctgaacagtaccaaagagggtatcttaaaggtgggtctggagaacgccactgaaatgcttgttaaccagagggttcagctcttctcgcagcttggaatgaacctggcaaacgcctcgggcaccgttaaagggtatgattctgatgggcctctaatcacagaaattacggggaaggtactcgactttgcaaaatactactcctacgatgggatctgggaaatagagcttgatgttcttcgtaccctccagatctcacaggttgacctcacatctctaaacaggacgttcgactttgaagaccactactcgatagtgctcccggaggacgccgagatcgtgagcattccgtcggactattcgagggaatcgggtaagagctacgtgtcgataaacgttgatgttcacgggaacgagataatcgtggacgcgcgtatgcacttcgatgagaacataacaaaagatgacctccagaagctttacagcgactttcagccgtttatcatccagtatcgcggaagacctggccaggaagggaactattcagtatggagctcaaagactgagaccaatattacgatcggcaaagaagaaacagtgatcgataccctgatggaatacatagccccagaagactacgtgaactatctcaaactcatggttatgtaccagggagaagatgcaatcatacagtcaatttaccagaacaacctccttgccttccagcaacaggggataagtgtgaaagactggagcataaaattcgagaacgtaaactccacagcacccctacggctgcgcttccactgggtactggctaactacaccaaggccaacaacaacacctacgtccacgacccttccctcgggctccgcgatgtctcggtcaaaggaaggctgacggatgggatcaaccagactacaacgatcagaattatactgcctgaaggctcgaagttcacacagattccggatgacatacatgttgaggccaacggaagccagataactatgaaggtcacaaaggtcagcgacaaagaggtagttcttgaaagcagcgcttacgtaaggtatggtatgctggccagggactactttgccatgatggagaaagtccctgagagagttgaagtcaagtacaacgtagaagaaaagacgggcagtacctgcggtccggcgttcctcgtaggccttgccgtcgtgcctcttctcctcaggagaaggaagtaaaagcttttcctttagctttccttttcttcaatttcgatacccatttaaatggcgacagcttattttcctctggtgatgagaatggccacgaggaagctctactacgaggacgcctacttgaaggaagccaaggcaaaggttctggaagtaagggacaacgctctccttctcgaccagacgatattctacccgaccggcggcggtcagccccacgaccggggcacgataaacggcgttgaggttctcgatgtttacaaagatgaggagggcaacgtctggcacgtcgttgctgaaccagagatgttcaaggttggggatgaggtcgagctcaaaatcgactgggactaccgctacaagctgatgaggatacacagcgcgatgcacctgctcgaccacgtgctcaacgaagtccttggaaagggcaagtggaagccttacgggagcgggatgagctatgagaagggccgctacgacatagagtacccggagaacgtgaaccagtacaaggagaagataatcgagctcttcaaccgctacgttgacgaaggcggcgagatgaagatatggtgggaaggagaaaccaggctgacccagataagggacttcgaagtcatcccctgcggcgggacgcacgtgagggacataaaggagataggccacctcaagaagctcaagcgctccagcctcggaaggggcaagcagaggctcgaaatctggcttgaggaatgagtttggagctttctgagttttagatttcccgcactcaaatcgactggccgtgtacctacgttttcagcctttttttcttgacctcaggagtgcggccagcgagagtacaaccgcaatgaagcttagtgctaaggataccctacccaaaggactatccttctcttcgtaaaccctgtccgtggcataaacgctgaccgcgtagatgtcttcacttggaattccaccgaggaattccatagactttatgcccagtgagtcaagctttgttttaaaatacacagttccatcgttccagacccacagagaccctctattaaagcccacagtcagttttagtgctccccttggtagtgaatacctaccgcacgctctcctggtccattttccatagcatacacgaccatctttaacgtaaagctccttagtctcgccctttgaggtagtaaacttaaaaagggtgaaattgctcccattccagagaaactccccctcaacttcgacgtttccaaaataggagtatatactaatgcgataaccatcgtgctggggaaatataaagggaaacccacctattgctggataatacgattggtatggaatgataacgtatccataaaccttggttatgaatttagctcgctccccacttacttttacgaaaacttccccagagggtttctcctcgctgatgtcaatccagtaagaagcgggaggttctgccagagcgggtgtcctgtcgatttcttcacctttccaagatacctcaacatccagcgggagttttgggacatacgtcccgttttcatatatagtatcgctttcaaggtagatggctatgagttcccagggaacgtttattctaaaggtgccgcttccaaggtttctaaaccaaaccttcgtgagcagatacctacggtactctcccctaatcgtatcggaaaaatatctggctgatactgaggggtaacggagacgttgattgggcaggttgtgtttagatagggcttggggttcttttcgcgggggaatacgtagctggagagtctgaattctccactccggttgatacaaagggcaaagctttgaagtgagatgccgtcgtcgaaaactcccaccacccaaccggtgcaggaggcgttgtaatgaacagtcgcgtcgtcgagcacgtatcctggggggcatgaaatgagaccgtaacattgctggccagggcgataggtgaaacaagcaaaattccaaagaggagtggtattaatcctctcatgatgtttgataaaaaatcgatattaaaaacttttcgagatttctccgttatagtacacctcaatgtcaaagaaacctaagcactcgtataaatcttcactgaagaacttcacccgttcagcactcatgccgttttaggcgttactgaatccacaccttttaagaccttttaaggaagagattgtaaaaagaagaaaacaaactggtcatccacatgtcaaaaggcccactaggatcaagatgaatccgaggatgtttccggttataaaagagataataagcggtatcgtcagcttacccttggcttccttgctcttaccctctgcaaacagtctttctgcctctgcaagggggtgcgttataaggaagtacgttaatagcaccactatcaccaagagcccaagacccaccactggagatccaaccccaagaaggagggttatgggcactatacctaatagcacccccagccaaaccagtattctagtcaccttcaatattccacaccccattggttatcccccctagagtctatacgccgtggtctaaagacgcatccgggtgtcaactactttggggaacgattgacacccaagggaataggtatgttaacctttataagtattatccaaaattgacgattctaaaatatttcttcacctataaatctttgttaaagcatatctttagcgggtgttatcacaagcgcaattatctgaagatttggggtactcttaatatcgagagcattattaaatttttgaacataaactccagaggttaaaaagagttttaagatagcccactaccgcttcatgccatacatttcgttcaacgagtttcaatactgcgtgagttgaccatagtccccagccagagttagacatctgcttatgctgttatagttgatgattcatttctcaaacacatagaagtaccgctcaaggctcttgtgaaccctctggtagtaccttccgagggttctgaaccccaccgcttcggcctccgccttcccgttgaagtcagtcggaaaagctatcgccagccttcccccgtcctcaagtacgttgtagatgctcctcagggctttcctgtaaagctcgtccctctttctcccggcgagtgtcgcggcggtgccgtagggcgggtcggtcgctaccgcctcgaacttcttgtcggggaacagatcctccagcctcgtcgcgtcgccgagcttgagcgtgtagtccctcaccccgtagtgcttgaggttggtttcagcgccttcaaccatctcaggccttatgtccacgccgtagactctcaggcccagcagaccggcctcgataagtattccgccggcccccatgaatgggtctagaatttcccgcgtcgccttcgtcaggttcacgagcgcccttgagacccttgggtggagcgatatcggcctgaagaagggcctgtggtgggcctttctcttttcgaagtccttcgggtcgaagtacctcagccttattccagcgtagagcctctcgccgcagtagaccctaacaacggtgtcgggctttgagaggttcacgcggaagccctgggcgtggatgacagctcccagctttctgggaaggtcaagaacatcgtgcctgcagttggccatggtctcagtatcaactttgaaagccccctttatcggccactccacttctccggccttctggaggagttcttcaacggaatccgcctcgacgaggagaagaccgtactcgtgggctaatccaagcctgtcgagaaacgggaaggctttctcacccgcatcgaccttgaggaagaggtaatcctgaccgataatctccccaccgccgagttcgagcatcgctttcacttcgtcccgtgccatttcgggcaggtttccgagtatctccacgtagagcatggtcgtagttcggaggggagttttaaagtttgccgctggaaaaggatttatactttccctcaaaggatagatagtgggcatgatgaggagtgagactctgaagctctggcttatagcagtgttctcttttgtcctaacgatgccaggagctgtggccttcgccaactgggatgccccctatgggttctccaaagacctcgccacttggatgagctgtgcgggctctgccctgatcttcgtcatcctctacggggtttacgaatggaggaaggggtcgatatccctgaaaagccttgtttcactggttttcgtctggattatcacaattctagtaggcctcaccgcccagagtgggatctgtggccagatgggctaccgatgcgggttttcaactttcataatagccggcttccccggtttattcctcagcctgatgctcttccccagggccctccctgaaatcctggcgggaggaccgtacccctacgacaggcccctcatcgttgtgtggtgcattctcctcactgtggtgattttcctgtcaattgccctctataagcagaagacaagggaaaaggctcaaggaacgggatagcccagtcccttgaggatcatccttatcgccagaaaggccatcacaacggcaaatgccttcgtaagctgggatgccttagtcctcttggcaatcttcgccccgagctgggcgccgattatcaggcccgggacgaggagaacgagccactcgacctccacgttgcccagggtgtagtgctttatcgctccagacgtggccgtgaagactatggcgaagctcgaagtcgcgaccgcgtagtggatgggaagtcccatgtaggtgaggaagggcacgtttattgccccgccgccgattccaaggaggccgctcgcaactcccgctataaagccgccgatcggaaccaccttgtagttcagcttgacttccttaaggtcaacctcatgtggctctctgctcttcttgcggtagagccttatggccacgaggaagaggacaacgccgaatatcaccttgagctgggcggcgcttatgtagctcgtggcccaggctccgatgtaagcgccgataacagccgttgaagccagcaggaggcccgccttgtagtgtatcctcctctgcctgtggtaggctatcgcagagctcagggaagtaaacacgactgcagcgctggaagttcccaccgcgtggtgtatctcaacgccgaggaagttgagggtgggaactatcaggaagccccctccgaggccgaacattgccgcgaggatgcctatgactatgccaactccaagatatccaatgtacttgagcataaaatcaccacaggtgtcttcatagtaaaataagcaaaggaaaagctcagctttcaaagattaactccctcagcttctttggcagctcctcgatcttcaccctgatctgctccctcgtgtcgcggtccctgatcgtcacggtaccgtcctctggcgtctggttgtcaacggtcacgcagtaaggcgtaccaatctcgtcgtagcgcatgtacctcctcccaacggtgtccttctcgtcgtagacggctatgaagccctccttctggagcgttctgaagatatcgtaggcgatgctcttgagcggctcttttgcaacaagtggtaaaaccgccacctcgatcggcgccatgtccttcttgatcctcaggtaggttctatcctcctcgatgacgaggctgttctcgaggagcaggtagaagggcctgtctataccaaagcttggctcgaggacgtgcgggacgatcttctcgccggttattttctcctcgacttccctgattatgaagtcgtccttctcaagctcgtagccctcgatcgtgactttcccttctttttcgaggagctccaccagctcgcgcttcttctcctcgccccagcccttgatcagctcgtttatcctcttggcgtccttcttcagcttcggcccgaccctcttcatgttgaggctaacctcaagcttcttcacgatcttcggctcgtcgtagtggataaggacagttaagtcggcgccgctctcgcgcatgtgcctgctcaggtcgtagtcgcccctgttcgctattccaacgcactcgacccagccaaagcgctcgctgtggatttcagcgtcccaggtgtcccttgaatagtgcgccctctcctcggggagctgctgcctgaagcggattttatcctcggggatgccgatgtcgaggagaaccctcttgaccatgaccatgtagtaggcgaagaaggtgttcattatgtagcccttctttactgcctcttccgcggttagctctatcatactgaggttcttgagctggtgctctatcggatagagcctcagcttttcgtccttaacctcgtcgaagtgcggatgctcggtttcgttggggttgaagaatatctctgcttcagcctgcgtgaactccctgagccttaacataccttgcctcggcgaaatctcgttgcggtaggccttgcctatctggaaaactccgaagggaagtttgttcctcgcgaaggcgttcagtctcctgaagttcacgaagatgccctgtgccgtctcgggtctcaggtagcccttctggtcgccgtaggggcctattctcgtctcgaacatgaggttgaagtaccacacatctgaaagctcgccgccgcactcaggacagcggatgtcgtgctcacggatgagctgggtgaggtgctcggcgctcattccctcggtgtctattccaagggcttcctcgaccaggtggtctgccctgaaccttgccccgcacttcttgcactctaccagagggtcaacgaacttctcgacgtggccgctcgctatgaacactttctctggcgttatgtccggcgtttcaagctcaaaaaagccttccctctggaaggcctctctgatcttcctctctatcttcctctttatcgtcgcgccgagcggaccgtagtcgtagaatccgcgtgagccgccgtagatttcaaagctcccccaggcgaaacctctcctcctcatcaaatcctggagaatctcgtacttgtcgggcttctctcccatcactcaccacctgaaactggagtaaggacatttcataaaaagcttttgggatgctctttgtcagcgtgccaaacaaattaatggaagcgggggtcaaccccgctcaaggatgattatccctatggctggcacttcaactgtgccgcgaagcagttccgggctgaaatcctcaggccagattactttccactctccctcgggaagctccagtagggctggcttcttccagctgttggcaacgacgagaacctcgtcatgatgtcccctgaagaaggccataacgccgcctttggcagtgtagaacctcattgcgctgctcctcaatgcgggaactctttttctgagctccgccagtgccctgtagtggttcaggacgtcctcgttcacagtatcccactgtatcggatagcgttgctcatcgtagtgtcccttgtctccgagcagtcccctctcgtccccctggaaggtgacgggagttccgggcagggcatagaggagcgttgagaggagcttgagcctctgaattgactcgtttgacggtgtgtctcccagtttgccaccaccgaggtcagtgagaaccctcgaagtgtcgtgcgaatcaacgaggttgaagcccatcgcaactacgttctcgccgtaggaagcgtagtaacgtcccatcattttcattgcactttctccgctgagcaggcccttagcgtagttcaggaggatgtccctcccgagggcgtagttcatgagggagtcgaagcggtctcccttcacccactccggggagagcgtccatatctcgccgacgaggtacgcgtcgggctttttctccttaactgcctttctcagctccgggaagaacgtccccgggtcgaggacttcgttcggcacatccaccctaatgccgtcaaagccgaactctatccagtggagggccgctcctatcaggtactccctgacctcctggttggcagtgttgagcttcggaaggctcccaaagccccaccagccgacgtaggcgctcccatcgccgagcttgaagggccacttcttgacgaagaaccagtcccagtatgggctttcgttgcccttctcccagacgtcgaggaaggctggattccctatgccgcagtggttgggcacgaaatcgaagattaccctcattcccctcctgtgggcctcatcgaggaactctctcagctcatcctcggtcccgaacttggggtcgagccggtagtagtcgtaggtgtcgtagccgtgggcgcttcccgagaggaaaatcgggttgatgtagattatagtaacacctaggctctgaaggtagtcgagcttctccgttattccctttatgtcgccgccgaagtactggtggcagcagtggaggggcgttatcgggtcgctccagttggagaggattggctgccctggattaacctggttcaaaattagctcgtcgtgatccaaagctagggcatcgttgcttttattgccgttgttgaacctgtcggggaatatctggtaggttatcccgttgctcacccactccagctgggggaacccctcaacgccatcaaagtggaagaacgggctttcgcttgtgtttaggacggcaaacttcccgccgtcggaggaggttacgagaatgtaataatcagcgggttcaactggcatctcggcgcgccaggtttcgccgaagtcccaccagacctgaagcttcatcgtgtagttcccgtgatccgtaacgagaaccgcagactcgacggtgtctctcttagcctcgaacctgaccacggttcttttgtccgcgatgctgaggtaggctgggtctcttggatcgaactccacgtagaacgcttcgcggccctcaactaccctcacggcgttctttcccccgtagccatcgggggcataggcgtctgcatcggggtcgtagggccttcccgtcccgtcgtcggacatgtccttgacccactggccgttgatgaagtacttatactcataccttccagggcggagacagacggtcgtctcccacgtgccgttcttcagctccatcggccactctccccagttgttgaagctcccgcggaggctgacagactttacggtcttgtttccggggttgtacgtgaacttcaccgggactcttccggagggacagcctttctctatgccgacgtagatgggagtgtagttaaccgaaggaagtttaagctccgttctttcggaagggccgtacgtcgaggtcgaggttgtgggagtggaagactgtgagggtgtcactgaagtcggtggaacggtcgaagccgttgcagtttgattttcgttgctctccgagatacatccgctggcgattgagaccagaatcaggagaatgagcagcagaccaccttttttcatgctttcaccttaatcactttgagtgatacaatttatagcccttttccccgggaaacaaaaactccatgttcaatgttgagaagggccaggagaacggaaagagttataaaccgtttccctcgttaaggctatgagctttgattatttggaggtgcgtgaaaatggcggaaagaccactcgatgttatccacaagtcccttgacaaggacgtcctcgtgctcctgaagagggggaacgagttcaggggtaagctcatcggttacgacatccaccttaacgttgtcctcgccgatgccgagctcatccaggacggcgaggtcgttaagaagtacggtaaaatcgtcataaggggagacaacgtcttggccctctcccctgtcgagcttgagtgagagcttagcggggtgatagcatgggagctggaaccgcgccgaagggcaagaggaaccgtactccaacccacataaggtgcaggcgctgcggtaggagggccttcaacgtcaagaagggctactgtgccgcctgcggattcggcaggagcaggagaatgaggaagtacagctggtcccacaagtggaggaagaagaggaacctctcttactgaacctttttcttttctctgacctacttacgtagttctgcaacactaccgcaacccttattaactaaacgtttctctgttcgtttagaggcgcgtcttaatgttccgcaacgagacccagcgaaaaatatgggcactggcgtggcctgctatagtgggcaacatctcccagacactcctcaacctagtggatactctgatggtcggccacgtcagcgcgctggcgatagcggccgttggcctcggcggacaggtaagctggttcatgttccccataatgatggcagtttctgttggaacgcttgccttgatagcccgctttgttggtgctaaggactattcccaagcggagctggttctggagcagagcctctaccttgctttcctcctcggaatccccgttatgctcttcgggtggtttttcggagacgaggttctctgggttatgggcgccaagggagaactcctcagaacggcctacgcttatcttaaggtcgtgttcttgttctatcccatcaggctcgtcggttttactctcttttcggctctaaggggagcgggggatacgaagactcccatgaagctcggtatcttcatgaacgtcgtcaatgccacttttgactaccttctgatctatggtaagctcggctttccaaggatgggtgccgtgggagctgcttgggcctcggggattggaatcacgtcttcatttctgattggcctgtaccttctcctgagtgggaagctcgtcctcaagttcaggccgagctggagcttccacccggagatggtcgtcagaattctaaggataggcattcctaccctggtggagcgcggcctcttcagcttctacaacttcctctacatgagcatagtcacccgctttggggatgtggcgttagctgcccaccagataggcctcagggtcgagagcatcgcctacatgcccgctttcggtttcaacgttgcggcttcaaccctcgtcggccagaacctcggcgctggaaagccggaagaggccgaaaggacggtttacgaggccctgaagatggttagcgtcttcatgggcgtgatggcgattatcctcatagcgttcccgcgctacctcgtcatgcctttcctgtcctcaagcgacccccactaccatgaggtgctccacctggcaagcatctaccttctcatcgtcgggataagcgaagtcccccttggatgggtctttgtcctcagcggagcgctaagaggagccggcgacacgaagagtccgatgtacgtcacggcaatcagcaagctcctgttcaggatagttccttcctacgtcttcggatttggacttgcggtaggacctttcgtgatagagggaatgggcgtcatagcggcctggctcgcgatgaccctcgagacgttcacgagcgcggccatgtactggtggatattcaagaagggcagatggaagtacgttaaggtctgaactgttttcttttctggctcttcccccaaaatgtttatattgctgtattacaaaaatgtaaacggtggtcgtatggctgtgataagcgtacgcatccccgacgagctcaaggcaaagatgaaggagcttgatatcaactggagcgaggaaatacggaagttcatagaagagagagtccttagggcagagaaacagaaaaaacttgacgagattcacaggctcctttctggtggaacccctgcggatgaagggactgcaagaaagtacgtgagggatgaccgtgatagtaattgacgcatcgtctctcgccaggtacatccttttggaacctggatgggagagaatcgaggagttcataagaggaaacgaccttacatccctggaatacgcgttgattgaagtgtcaaacgccctgtggaagcaccacgtgttgtactcccgcatagatcgggaagagtttgaaagaaggagccaggccttagaccttatgagaagcgttttatttcttgaaaaccctctcgaatacctgcctcaagcacgggagatagcgtgtgagggaagaataacggtgtacgacgccctctacatagcccaggccctaaaatacggaaagctcgccacgagcgatgaaaaacagggaaaaacggcggaaaagctcggcgttgaggttacatacctctaaagggccgagacgtgaaagactgcctccatcagccttccgaagaggtagctcaggaacgccgccccgaggccggttgaaaccatctccagggccttctttctgatggatattcccgagagaagggccaccatcgtaccaacgacgccgaggacgctgcctgcgagcagaattgagaacggaagggccgttaaagagctcgacgccaggaagtagggcgttactggaaacgccactccgagcagataagagagacccgtatagagggccgatcggacttcgttctcatcgctctccccgaggagaaggcttatcacagcatcccccttctgggcaagttcctcggcggttttttctgcgatttccttcggcaggcccccttccattagcctttccattatctcttccctggccctctctggggagaccctgaataggacttccatcttctccctgagggcctcgttgacctgtctctgggagcggacggagatgaaggcacctattcccatcgagagcgctccagcgaccccaacgattaggccgcttatgccgatgagttctggcctgtttgggtagacagccgaaaggccggtcacagcacccagaatctcaacgaggccgtcgttcatgcccaaaaccaggtcgcggatgttctcggtgtggaaggtcttctcttcttccctgaagaacttctcgtgctcaagctcgtccaggatgacactcttgagcctctccctttcatcttcgctcatttctgaggagtattctgttagaaatctgtagtacttctttaccgcgtccctctctcccatctcaaggagagaagtcacagccccagcaccgagcactcttctgaggacgaaaaccgatgtgaagtggaagcgccctatcttcggtttttctggttttacaccccttctcttgaggaactcgtaccaaaaactagcatgctcagactctatctgggcaagcctctggaactccgctttgatcctctcgtccttttcggccttggccagcctggagtagaggactgaatccgtgtactcgtccctgtagaacttctcagctagctcaatcagtctagacattcttcatcacctccgcaaccactccgaaaggagcgtccgttttcacagaggtcggggaaaagtgggtcttcgtggcgctgtggccaagttctctaaggcgctggattatgacatcaagcttcggtggggtcagggagcaggctctagctagggtgtgcgtgtcgtagtggaagggaacgtcgagctcttccgagatgagctgaaggaatgacagcgtcttcttgtgggcgagcgggtggtctctggcagattcaagaagctcctcgacgaaactttcgtccttcagcgggccgagccagaggggaccgctcgccccgggtttgtccggtaaaaagccccttctgtactcaaaccttccacttttgtcggcccaaaggaagccaagctgggagaggcttttgtcggctttcttcgccccgctcttaagttttaggaaggccctgaagtagtggtcgcggtgataagctaacaggacttcgacccccaagtcgtacttggctgcatacctaaccactgtcccgatgagtattctgagcccagcctcgtggcagagcgggccgcggataggttctgcaaggtacttcctgaggcaggcgttcctgtaggcaccgcagagcactcccgtgtctgtagcagttaccgccagaacgccgttccgcctcacgctcctgagggcggtgtcaaggaactcgaccggagagccgaagggatcaaggtcgaggaagtcgaagtacctgaagttctcggccatcagcctgttggcgtcgcccttgtttataacgacgagcttttccccccagagatacgagcggtcgccctcttcgtagagctccccatcgatgttgaggctcgcgttcttcttcataagcccgtaagcttcctcgctgatgtcgttgagccacacctcttccgctggagtttcaagggcgtagcgtatgcccctgatccccgttgcggagagtgcatccaaaaccctcttcggcccgagaactttaaccgcgagaacgctgatgtccctgttcagggacattacgggattgtagaagacgggggcatcgtatatcctctcggccttcggtacgagaatcctcgcgagaccttcctttaccgccacaagctccattctctcaccggataaagaaaaggtagaggccttaaaggggttgcgtcagaggatttcaacgtagtctccgagggcctgacctggaaggccgggcttgaagaccgccttaacctcgccgcgggtgccgtgagtccggactatctttccgacgagcttccttccggttggagttctccagacgaccttcctgccgatgagcctcgccgcgctacccctgtcgttgacgtcgagcggcttgagaatcaccctgtttggatccctgtgctcgtgggacccgacgtaggacagaacaacggccttcctcacgaccaccaccccctcagcctctggccagggtgtggtgccgttcataggttgagcgggcagtttttaaaaatttcgagtctcacagaaactccgagaggccatcgtctatctccaagacctcgatgagggactttattttcagaaagttctgcctctcgaagagcagggcaacgtcgctcttgtgtggtgaggccttctgcactaacagggtgttttcatcgaggatgtacgtaaacctgctggggctgtcgtccacccagacaaacggctcgtctggatagagctctctgagagtctcgaatttcgtcagcatgtctttcgtgctcttgaaggttatcacctcgtcgaactcatcgtaccacttcgtcctcttgaggaatatcaccttacctcctgggtaggtgtgctcgccggagaagctgataaccgttctcccgcgctttcttagagttctgatgaccctcctcgcgtggggaaaatccttgatgtacttgggcatctgacgatagtactcgtgtatcgtgccctgggctacaagctcgtggatgacgccgaggtgctggtatgtcagcttgccctttatgaaaaggaagagggccttgtagtactcatcgtagaggtcgctctctatgaccgctggtatcgtcttctcaatggctattcgaagggccttttcgactgcaccggtgctgtccacgagggttccgtcgaagtcaaagaggtaaaccgtcactcccgacacctgaccagtaataagcgccggagtttatatcccttccgaaaccgttttatccttcgatgaagactaaccccggtggttgagatgaggatcgaaaggctgaaggagttcatagcggagaaggagctggacggtgttctgataacccacaagccaaacctgttctacttcaccggttccgccccggttctcggcggctacctcgtggttaccgccgatgaagagctcttcctcgttccacagctcgagtatgaagaggccagggagagctcaagagttccggttgagtacttcaagaggggagcggagctttacgagagactgaaggccttcaacctcaagaaactgggcatcgaggggaggacgagctactccagtgtccagagccttaaggaaaaggctggcgttgaggagtttgccgtcgttgacgacgtcatcaaggagctcagaatggttaagactccagaggagattgaggtcataaagcgggcctgtcagatagcggacaaggccatgctcgtcgccatagaagaggtgcgtgagggagtgagagagagggaagtcgcggccaagatggagtacgttatgaagatggagggggctgaaaagacagcattcgacacgataatagcaagcgggtggcgctcggcgcttccgcacggagtagcgagcgacaagaggattgagaggggagagctcgtcgtcattgacgagggagcgctcttcaaccactaccattccgacatgacgagaaccgttgtagtcggctcgccgaacgagaagcagagggaaatctatgagatcgtcctcgaggcacagaagaagggcgtcgaagaggcgaggcccgggataacagctaaagagctcgacactatcgtcagggacgtgatagctgaatacggctacggggactatttcatccactcgaccggtcacggcgtcggccttgagattcacgagtggccggggataaaccagaatgacgagaccgttctcaagccggggatggtgataacagtcgagcccggcatctacctcccgaagttcggcggcgtcaggatagaagacaccatcgtcatcacggagaacggcgccgagaggctcacgaagacggagagggagcttatttgagcattctacctattctctcatttctcctcacgaaagtttattaaccagagttttctctttataaatagggggaaagcatatggaggcaggtgttgaaaagctcatccttcgcgaactgagggagataaaggaggagctaaagatcctgaactcaaaaatcgataacttcacaggctactttgatcttgatgaggaggagatagaggaactttacagagagctcgaagacgcaaagaagcacggcaagagactggaggacgtcctcaatgagctatgaactaatcctgagcgggaaaagtgaaaaagcactaaaaaagctcctcctgaagatagaaagcgaattgttagcgctctttttaaactgaaggagaatccctgggcaatgcaatataagaagcttagaggctatcctttctatcgtgttcgcgttggagactggaggataatatacaccgtggatgacgaggctaggatcgtttacgttgtacgtttaggaaagcgcgaaggggtctacgacagcctttgaggggtgataaaatgcagatactcgaagaaaagcccaaggaaggcaaggtgaaagtgaaggcggagacccttgacgacctctggcacctttaccacataatagaccccggggacatcgtctacgccaaaaccctcaggaagcaggcccagagagctgattccttaagggcggagaaggtcgaggtcataccggttttcctcggagtccaagcggaaaagataaacttccacaagtttgccaatcaggtgcgcgttaccgggccaatagtctacgccagcagggaagacgtcccgctcggcaagtaccacacgatagcgatagagcagggaaccgtcgtgaccatccagaagccgcggtggaaggagcaccacattgagaggcttaaggaagctgttgcggcttccaagagggcccgcgtgatgatagtggttattgacgatggcgaggcggatatggcccttgtcagggagtacggggttgagatactaaacagcatacgccacaacctcggcgggaagagatacaacacggacagggagagcgaggagatgaagttcttccacgacgttgcgaagactatggaagaggtaatgaagcgcgagaacgtcgagaaggcaatagttgctggccctggcttcgtcaaggaggacttctacaagttcctgaaggagaagtatccggagctggccaagaaagttgtaatcgaggataccagcgtcactggaaggacgggcatctacgaggtcataaagcgcggggttgttgacagggtctatcaggaaaaccgcgtcgcgaaggaagtccagctggttgagaaagtcctagaaaacatcgccaggaacaacgggctggttgcctacggccttaaggaagtcgaggaggctgtgaactacggcgcggttgagacgctcttggtccttgacgagctccttaagggtgaactcagggagaaggtcgaggagctgatggacgcggtgaggtactcccgcggagaggtcgttgtagtcagctcggagcacgaaggtggagagaagctgaaggccctcggcggacttgcggcactgttgaggttcagggtgaagtaatctttgattttacgaagctgagggcaatctcggctagttctattgccctttcggcttcttctctatctggctcgtgtagtgtgggatacctcgcttccaccgcataagctgttaaaagatcaacgtctagttcgaatagttccataaactccccgtcaatttgggaacacagtattattaactctccaatgtcatgtgttttcttaatgggcttactactccacactagaaacgctttcagcgctttttcggcacattgttgggcgtggaaggcggcataatcatagatgccttcggataagctgaggcgagagaggatcagatccttttcagccttcttcagccactccttgtagctcaaaccttgattccctccttgagggcgtaataatagacgtaagccttattatcctttactttctcaagctcatccttggatattatgagaatgtcagcctttatgccattaaacagcagtttcctatgaaccaacttatacagctcaagttcaacgtgtcttggaatcctttccttagttactaccagcacatcccagtcggagtctttcctgaaatcccctctggcccttgatccgaagaggattatttctttgacttcgactccaagctcctctgcagtttctacgatggctttccttatgatgtctcgcatattggaacttttgatgcgatcatttttagccctttccatacagcctcacatacgggtcctctgtgaactccgggaagggtctctcctcttccccttcaaccagaaccctgtccttctcctccgtgaactcccccagctcgaatgcaagaattccatttttaagtaattctgtaattagggaattaactttttcggtgggcgttatggctatcagtgtccctgttgaggagacgctccacggtttgaggtcgtagaagtcgagcaccttcttaacgagcgggtcaatgtggagtctatctgagtaaaccctgaagccaactccagagttgtccgctatctcgtggagggccgttaaaccgccctctgttgcatcgtgcatgcccctcacaaagggtttagccactagtgcgtcgggaacagccgtttcaaagtagaaagagcgcttgagcctcatgagctcttttttggtcagaacctttgaaagctcgtctgccctaaagtaggccgctgaaacagcgaactcaaggccgaccttagccgtcacgactattttatctcctggcttggcgagggggagcttcagctcgcctttcctgactatgcccatggcagttgtcgtagcggttggctctgagatgctcggataaacaccagtgtggccaccaactattgctgacccgtacttgcggcattcggcgttcaggtctttcatcgttgcctcaaggaattccctcgaagtcccttcggggaagaggaggtcaacgacgagccacctcggcctcgccccgaaaaccgccacgtcacttgaggcgaagtggtaggtaaagaagccgaatgtctcctccggaacgccgagcgttggatctgtagcaaccacgaggtagtgttcatcgtcgtattcaagaacagccgagtcaaagccctccctaggcccgtagactaccttactatcctccactccgaggttgggaaagacgacctcgcgaaggatgtcatttctcagctttcccggcgggagcattggctttccctccaaagcgtctgattatcgacttaacctcttccagcgtctcctcgtcgcagtcccagcacattatctcaaagctcgggacgcggacgctaacccttactctctttctcctcgctaccttgctcacctcgtagttcaccttgtaggccaagtccatgagttggggggttactatttcctccttgtctatgtactggagagggcagccctccctccactgcctcctcctcgcgtgctcgtacatgcggtagggtcttattcctgcctcttcggcgagctcttcaacgatctcggcagggtactttatcagggggcggaagaaggggatacccatcctcggaatctcgcagagccgtatgtccccttcgcactggtcgaggagcgcaccgattatcttgtcgttcgcgttgtcccctttggctaaaacgtcgaagccgctgttgagggcgaaccacttggcgttccagagcatcaccttcttacagttgatgcagactggccctttcctgccaacggcctcgcggagaagtccctctgttatgtccacaagatagtgctcgacgctgagctttttggtgaacctcatcgcccagttgagggtttccctccagctccagcgatggaagaaggtcaaggccgagacgtcgaggcccgcttcttttagaatgtagagagcgagagaactgtcctttcccccagagaacagcataagaacccgtttttcgaaaaggccttttttctcggcgaactttcttgtttcctcgatgacttccgcgagcataaagaaagtttgaaaagggcattaaaaaccttcagacgttcaccttgccgagccactgttctgccagatctcccgcaattgggaacttgtagcgctctccctggtaggccttgaccataccaacaatccaaacaacaaggcctattaaacctaggagatctgcgataatccagcccaggataggtatgtacgagaagatctttatggcaatccacagcgggagaaagattatcgttgactgcatagcgtggaaacggacgaaatcgctttccttctcaaggagcaggagtattattcccgtaacaaaaccaagcaggtatgcgagcagtccctcgatgttctcatcgaggccgagggaagtcctcttttgcggtgctccagttggggcttcttccataaccaacacctcctttccgccctatgcggattattacggattagctacggcttcaaactacataaaactttgcattttataattttttatgagtcttatctggggtagtgcactttttgaacccccttccgcttctcttcgaaccgctgagttttgttaggctcaccaaaggcttttaaggacatcgagagacttgaagttggattaggaaaacctaacggtgatgctcatgatcgttccattgaattctctaaagcctggggagagggggattgtcgttaacctccaggggggtccaggattcagaaacagactgctaggaatggggataacccccggtgcggtcgttcaggtcatcgaagtctacaaccctggcccgctaatcataagcgttagcggcactcgatttgctattgggagaggaatggcctcacgaatcattgtgaggaagctttagaatccttcgggtggttaaaatggcaatgaaggtcgttgctctcgccggaaaccccaacgttggcaaaacaacggtttttaacagcctaacggggatgaggcagcacgttggcaactggcccggcgttacggtcgagaagaaggagggcgttttcgagtacaagggtgagaagtttctcgtggtggatcttccgggtacgtattccctaacggcacattcaattgacgagctggttgcgaggaactttctactcaacggaaaccccgacgttgttgtgaacgttgttgatgcgacctctctcctgaggaatctccttctaaccatggaaatctttgagatgggcctgaagaacgtggtaatagcgctaaacaagatcgacctggcggagaaaaaagggatacggatagaccccataaagatgtcaaaggctcttggagttcctgtcgtagcgatgagtgccaaggaaggcataggcgtcgaggagctgaaggagaaaatatacgagatggncaacgggatggtaaaaactaaccccgtcgttccaagatacgatccagaggtggagagggagatagagcacataatcggttgtctgaagggaacggaacttgaaaagcgctatcctcttcgctggctggcaataaagctcctccagcgtgatgatgaagttatgaagctcgtcctcaggcacatcggcgaggagaagctgaaggagataatgacccacataggtgaagcagaggcgcgctacggcagggcgatggatctcataatagccagccagaagtacgagttcatagacaggctcacccacgagttcatgagctacgcgggcagggaaggagagagcctgacggaccagctcgacaggattttgatacacccagtttacggcttcatagcacttgccatagttttctacggggtctttaagttcgtctttgcccttggtttgcccctccaggagtggcttgacggcctctttgcctcgtttggcgagtggcttgcaccccacatcgcgaacgagaccctcaggggcctggtagttgacggcgtaatcggcggcgttgggtcggtactcagcttcttcccgctggtctttctcctgttcttcgccctgtctgtactggaagacgttggatacatggccagggtagcggttctgatggagggcatcatgaggaagttcggcctccctggaaaggccgttattcctctcatcctcggcctcggctgcaacgttcctgcggtgatggcgaccagaacccttgaggatgaaagggacaggctggttgcaatgttcgtgaacccgttcatcccttgttcggcccgtcttagcgtcataagcttcctagccgggactttctttagctccaaccatgccctagttgccctgagcgtctatctgatagctatactcgttgccctgctctcggcgtggttcgtcagccacttcgttgtaaggggcgaggagagcccctttgtcatcgagctcccggaatacctcataccaagctggaagaccgtgatactccactcatgggagaggagcaaggagttcgtgaagaaagcaggaacagtgatactcctaggttcgatcttcatctggtacctcagcaactacccggttgagctcggaagcggaaagagctacgctgaaacgcttggctacctcttcgagccatacatgatgctgatgggccttgactggaaagcagctgtgagcctgatcttcggcatcatagccaaagaaaacgtcatatctacctacggtgtcatatatggaactacggaggctataaagaacgccatgactccgcttcaggcttatgtacttgcggtcgtcacgacgctctatataccgtgcatagccactataggtgccataagggccgagagcaactggaagtgggcgctgttcacaacagcctacatgatagcggttgcttccatcgtgggcattctgatatggcacgtgggcattgccctgggcctctcctgacctttattttcagtttttggagttgtagtttagtgaggtgatcacatgggaaagcttgaggatgttctggagctgataaaagctggcgtcaccaacgagcgcgaaatcgccgaaaggcttggactctcatctaaagaggttgaggacataataaaaattcttgaaagcctcgggtacgttgaaaaagtggagttcggttcaaaggcctgcgagacctgtcctttgaagaaggtctgctacggttcgtgtttgagacccactggagcaaaggcgttcaaactgactgagaaggccttctctctggagaggtaggaggctattgttcactgggagggatatattttacggccgtaaaatatataagctccctccataagtttatactggtgatgctcatgaaggcggttattcttgcgggtggttttggaacccgcctcaggccgatttcctcaacgagaccgaagccgatggttccagtccttggaaagccgaacctccagtacctcctcgagaacattgagaagatacccgagatcgacgaggtcatcctctcagtccactacatgcgcggcgagattagggagttcatagacgagaagatggccgactatccaaaggacattcgcttcgttaacgacccgatgccccttgagaccggtggcgcgctcaagaacgttgaagagtacgtgagcgacgacttcctggtcatctacggtgacgtgttcaccaacttcaacttcagggagctgatagaggcccacaggaacaacgacgggctgataacggtcgcggtgaccaaggtctacgacccggagcgcttcggtgtcgttgaaaccgacgagaacggcaaggtcacacacttcgaggagaagccccacaggccgaagacgaacctcgtggatgccggaatctacgtcgtgaacaagaaagtcctcgaggagattccgaagggcaaggaggtctacttcgagagggaagtcctgccgaagttcgtggccaggggcgaagtttacgcctacaggatgcccagagatgcctactgggtcgatctcggaacacccgacgacctcttctacgcccaccagatagccatggacgagatagccaaggacaacggctacattaccatcaaggagggcgctgaagttccggacgacgttgagattcagggaccagtctacatcgacgagggagcgaagatcggccacggcgtcaagataaaggcctacacctacatcggcccgaacacaatcgtggaggacaaggcataccttaagcgctcgatactcatcggcagcgacatcatcaaggagcgcgccgagctgaaggacaccatcctcggcgagggtgttgtcgtaggaaagaacgtaatcatcaaagagaacgccgtcgtcggcgactacgcaaggatagcagacgacctcgtaatctacggcgctaaggtacttccctggaagaaggtcgaggagtacgaggcctacataaaggtcaagctcgatccgacgaaggtcaggccgggtcagtatcctgaccactgcccgctcggcctgccggagtgtatctacaaaaagttcaaggccatcgccggcgagaagccgccgtgcgacgagtgtatcgagaaccagtggctgttctgatgccttccttttcttctgttttgggatttttgattctcttagagtcttattgcaacctggcagtgggcacggttctgggcatactgctacacctttcaattctcttagagtcttattgcaactggtcggttcagcgttcacggtttacgtgatgtataagctctttcaattctcttagagtcttattgcaacgagccagcgctgatgctcctcggcggcgcggcgagcctctttcaattctcttagagtcttattgcaacaaaatctatgagctgggggtgtgatgtatgagagttgctttcaattctcttagagtcttattgcaacctaaagcgctccgcctggccggtgacggcgttattctctttcaattctcctagagtcttattgcaacttattgcaacgcgccgatagtggtagggaaattgtaggtagtccttgctttcaattctcctagagtcttattgcaaccggtctcagtcttcttcacgggagatcctcgcgaagacctttcaattctcctagagtcttattgcaaccttcgacatctcgttgagtatcttggccacgatcttcctttcaattctcctagagtcttattgcaacgtggaaggacctaactggccagacagagggcctgatagctttcaattctcctagagtcttattgcaacattctgatggatgaggacgcaaagattgtcatagcgagtttcaattctcctagagtcttattgcaacgctagtgctgctatcacgtactatcatgaccaccacaggtttcaattctcctagagtcttattgcaacctatctaaggcgtgaacgcatgcttaagaagtactacgtttcaattctcctagagtcttattgcaaccgtaagcccgttcgccagcgcagacgccacccttaatcgtttcaattctcctagagtcttattgcaacttgtacctgaagacctgtgcggcctgggagagggctatgtctttcaattctcttagagtcttattgcaaccggcttgtcgagcggcttttcgttcttagccggaagtactttcaattctcttagagtcttattgcgacacagactctcgactcctttcgtttctcaggagaagtgactttcaattctcttagagtcttattgcaacatcagatggggatattgttaagctaatcattagaactcctttcaattctcttagagtcttattgcaacttcggctttgtttgctggcacgtcgagcgttatctctttcaattctcttagagtcttattgcaaccgtgaaggccctcccgccagcaccgtgaggtgatgtcctactttcaattctcttagagtcttattgcaacagacgtagtgccctttcttggggagagtcttagaactctttcaattctcttagagtcttattgcaacaaaaacgcggaagaactgaagagggtctttcagtccatctttcaattctcttagagtcttattgcaacccgcttccgcatccctgtcccagtgaacggcaagtctgctttcaattctcttagagtcttattgcaacactgtttgcctttttcactgactaattcttcaaacttgctttcaattctcttagagtcttattgcaacctcgctttccttgttctggccgggaaagttcgcaagtgttctttcaattctcttagagtcttattgcaacagagagagatcgctgaaatcctcgcttcacttgaagactttcaattctcttagagtcttattgcaacgaggaaatgatcggtgactactacctccaggctgcacaggctttcaattctcttagagtcttattgcaactctcaggacctcactggccctctgactgagtttaaccctttcaattctcttagagtcttattgcaacccacaaattctattgttacctccatctcaccatctgcctttcaattctcttagagtcttattgcaacttacatttattagggataggggcttttattcattttggctttcaattctcttagagtcttattgcaacccgaccacccgaagtcgcttgaggttcctggcgatgtgttccctttcaattctcttagagtcttattgcaactcccaatgagacccaagtccacagagaacaaatcgttctttcaattctcttagagtcttattgcaacacgagcaactcctgggggtgagagcatgatcgtctcttctttcaattctcttagagtcttattgcaacgtaggcaagtattgcgtagcccgtggcttcttctccgcctttcaattctcttagagtcttattgcaactgaacctcgcccacaccaccaaactacacctaaaaaactttcaattctcttagagtcttattgcaacccggtgggtggagggtcaagctctacgacgatgaggaagacgctttcaattctcttagagtcttattgcaacttcagaatagcggttgcaagagtgattcagggtggcaaactttcaattctcttagagtcttattgcaacagggcggttttttcttccttttgccttacaaactactaagaaccctcgaatcttataagcttttccgcaaagggtgctctaaaaagcccttaaacgcctctgattcacggattgtgagcggatttttcaaccagaaacggcttctcactcttccgctaagagcatgcacaacaatgttcagagaacttcccgggcatttttagatctttaagaagaaattgaccagttttaaggaagtttttgccaaaaatattgcatctgcattgggaggaagtacgaaaaaagctctaaaatgaccttattcagaattccgaaaaaatttcgtcgcaaaaactggaagaatacgtaaccttttgtttgataataaccgaacgttactaaagacttcaaaaggttcattgcgagtttgattccaaagcaaaatcagaaaaaaggagctccacaaaatcaaagcccttttagcgtgatagaacgtcaaaacccagctccttgagcttccagattatctcgatgggaaagcccacgacgttgtagtagtccccccgtatccactccacgaatagtccgccctttccctgaattccataggcccctgccttgtccatcggctcccccgtcctgatataggcccagataaggtcctcgtccagctccctgaacttcacttccgtaactaccgcgccgcagtgctcctctccgcggtggatgatgcagtagcccgtagttaccaggtgcatcctcccgctcagggtcttgagcatcctgaaggcctcttcctcgtttcctggtttgccgagtattttcccgcctatgctgacgacggtatcggcccctatcacagtcgccttcttgccaagcctctcgtaaacttccctcgcctttctacgagcaagctcaagggcgtgctctctcggatctgctattgagcactcctcgctggcactgcttgggattatctggaactcccttatgaacctcgaaagtatctctctcctcctcggtgaggccgacgcaagcactagcattttcaccaccgggaacgttttaagctgaagagaaaaagttggaagggcgatgacgacaatttcgctagctgaccggtgatgactaccctcgcaaccgagcctaagtggatgcccatatcggtatccccgcatcgaggagcctcttcagctcctttcctatcggcgtgctcttgctgaccttgacgaggcccttcctgcttggtgtggccgtgaagacgtactgctcgccgccgtagaacttgagcggctttttggcgtactccggcgatactctgaggactatcgtcttctttttctcctcgacttcgacgggaatcctctccttcggcttgagttcttccctctcggcaaagctcttgacgtctatgcttatgcctatcctcttctcaagctccgtgatgcgcttccccttcttgccgattatcgctggaatatcgaactcgtcggcgtagatcaccgccttgtgggggctgactatctcgacctcggcgttgacatcgggcaggaacttctttatctcctgcttgagcctcttctctgcgagtctgagtgcaggagctttctcctccttcttgacggggacgacgcttacctcctcgccgtaggtgtatatctcgtactcaagctcgccagtctcgaagtcgcgaacctctatcactggcctggctaagtcctcctccttcattccgctaggcaccttgaccaggtattcgagggtcagaaccttggcgacccttccggccttgatgaaaatcaccgtatccactatctgcggtatcattccaagctcgacccttccgatgaagcgctggatagcgtctatcggcttcgtggcgtggacaacgcctatcattccaactccagcgagtctgaggtcggaatatatcttgaagtcgctggttttcctcatctcgtcgaatatcgtgtagtccggccttaccagaaggaggatgtctccagtaagctccatgctcccctttagtgccgtgtactgagttatctcctcgctgacctgcaaatctctgggcttctccatggtcttgacgatcttgcccatgctcgcgtaccactctgcgagggcctgggcgaaggtcgtcttaccctcaccgggggcaccggctatgagtattccggcggccttgtccctgagcctctccaaaagcctctcgctcagttcgtagtcctctattgagagcttggttatcggtctgaccgcggttatttctatcctgtccgagaacggcggtttggctatgacgatacggtagttcctcagctgaaccacagttgctccgggttcgtcgagctcgatgaagctctccgggtcgcgctttgccctctcgacgatgtcatcagctatctcctcaagctccacatcggtgagcggttcgtctctaaccgggacgagcctccattcgccgggccgtcccttcttcgcgagcggccttatcccggccttcaggtggacactcatggttgtgtcatcaaagaagtcctcaaggcggtgcctgacttccttcttggtggtaaggtaaatcacgtctatgcccttggctatcgctatgtccctctgaacctggtcgccggttacgagggtcgcgctgagagtctgggctacctcccggaccatgttgtctatctctcccgccttggcgcgtcttatctgccagaggtcgggcctctcgccgtagaactcaaggaggatctcgcccctatcagccatctcgcggagcttcttcagttcctccagaccaacgtggcctatcgcctttccctcgttggcctggtgctctatctcagccacgacggcctctggaacaacgaccttgaccttctcgcccagcgttgacaggaactgcgtgagcctgccgtcaactatgacgctcgtatccggaacaagcactctcatttttctcacctatccagagtgaagcgtagccttcataaaggttagcgtgccctaaagttcataaggggagaaaaacaaaaacattggggtgacgctcatgggtcatttaatctcgatagccagcggtaagggtgggactggcaagacaaccaccacctccaacctttcggtggccctcggaaagatgggctacaaagtcctcgccgttgatgctgaccttacaatggcaaacctcagcctcgttatggggatagacgacgctgaaaccacgatacacgacgttctcgcaggcgaagcagacatcaaagacgctatctactcaacgagctatgagaacgttgatctgattccggcggcggttgactgggagcacgtccttaaggcagacccgaggaggctcccctcaacgataaagccgctgaaatcggagtatgacttcgtgctgatcgactgtccagcgggccttcagatggacgcgatgaacgccatgatgagcggcgaagaggtgatccttgttacgaacccagagatatcctgtataacagatacgatgaaggttggcatagttctcagaaaggcagggctggcggttctcggctttgtcctcaaccgctatggaaggagcgagaacgacataccgcccgacgcggccgaggaagttatggaggttcccctgcttgtggttatccccgaagacccgaaggttagggaagccacactggaaggagttccggtagttgagtatgctcccgactcggagggtgccaaggcgtttatggcactggcggaggaggtaagcaggatagctggcttcaaggcaagggtgatgggatgatactggctttcataggcacagccgggagcggaaagacgaccttaacgggggagtttggaaaatacctctccgaaaacgggtatagggtagcctatgttaatctggacacgggggttagaaaacttccatacactcccgatcttgatgtcagagagaaggtaaccgcgtggagccttatggacgaaggcctcggaccgaacggggctatagtgaagagctacgacattcttgccgaatacacgggggaatacgccgagaagatcagggaacttgacaaggagtccgactacgttctgatagacaccccgggccagatggagactttcctcttccacgagtttggggttgagcttatggaggcctttccagatgccctaggggtttatcttttctcacctgaagtgcttaggaagccctctgacttctgctttgcggtgttcttcggcctgatgatagacctcaggctggggataacgacggtgccagccctgaataaggtggatacagttgaagacatcgaagggatacggaagtacctcgacgacatagaatacctcacggcgaggctgaagcttgagccctccacccaggggcttctggcttacaagctgtgctcctctcttccggagcttgcccctcccacgagggttctctacctctcggcaaaaaccggtgagggattcgaggatctcgaaaccgtggcatatgagcactactgcacctgcggcgatctgacctgaacggttgttcaaggggaagaaaccagccagaacactttttcacgtggaaaatgggaaggcttatctcttctggtttttaaatgccctgggtgatgctcatgtgcctcatcgctggcggaatgggggggaatctcagagaaaagctcatcaaaatggcgatagcaggaaagcacaggggccctgaaagttttggggtctggaccgatgggggagtcctcaaatctgatgacttttcaaagctgaccgagattccagacgggagaatcggtctcctccagtgcaggctggccataactggttcaaagagctttactcaaccattcataaacgatctagcccttgttcacaacggtgagatatacaaccatgcggcgctgagagaatacctggagaggagaggcgtttcttttgagagcgacgttgacagcgaggttgtacttaggcttatcgagtttttgagggaagaacatctgagctatcccgagatagttaaaaaactcttctggatgcttgagggggactacgccgttgccttctcagatggagagcgcatctacctgtttagagatcctctggggatcaggccgctctacttctcacgtaacggcctgtttgcaagcgagaagaaagtcctctgggcggtgggcgagagggaagttgaacccgtccagccgggggagctcgtcgttcttgaaaagaacggggtgaggcgggccaggctgttctcccttgagaacctaaaatccaaagcaaaatgcgaaaggaaagacccggttggcggcgttggaaaactccttagatatgcagtgaagaacagggtcagcaaaaaaacgggagttctgttttccggcggcttggacagcactctggtcgcttacctggcttcgcagtactccgacgtgatactgtacacggctggaactgaggacagtcccgacatagagtgggccaggaaagtggccgaccactttggctgggcgctgagggagagaacttttgaagtcgaggatgtcagagatgccgtgaaaagagtaatgtacgccatcgaagagcccaacccgatgaacctcgcaattggactgccgctttactttgcctctggtctagcttcttcagacggtacgcgcgtcctcctcagcgggcagggggcggacgagctcttcggaggctacgcaaagtaccttgagagacccgaacttatggaagaggacatagccctcatctccgagaggaacctcgcgagggacgacaagataacaatgctgaacggagttgaaggaagatatcccttcctcgcccttcctgtggtgagctttgcccttaaactgccgctcgaagctaagatagtggatggaaccagaaaagtcatcctcaggaaactcgccctgcgtctcggaatccccgagtggatagcggagagggagaagagggccgcgcagtacggcagcagggcgcagaagctccttgagaagatagccagagaagagggcctaacgctcagagagttcgcggagaaactcttcagggagacgttcccaaacgctttttaacttcacctttaactttcctccatgagaatcctaatggtcggacactaccctccccacggtggcggtgttgcgaggcatctcgacaacctcgtaagggaacttagaaagcgccacgaagtccatgtgctcacatacggccccgtcaaggtcagggagttcgagagggagtttgtccatcagctcagggttccgccgttttatggtctgaggggaagcaccttcgccttcgcgggcgctaggaagatagctcaactccacagagagttcggttttgacattgtccactgccacttcgcaggaacgacctccttctccggcgcgctggccaaggagaagacgggcctgccctttgtcgtcacagctcacggaagcgacctggagaacacccccaaatcgcccctgggcaggttctacgttacgagaagcctgaaaagagctgatgtcgttatagcggtcagccaccacctggcgagactcgctaaaacccttggcgcggaaaacgtcaaggtcatacccaatggacttcccgagtttgaaggatccgagggaggaaagagggagtacgtgaccttcatcggtgcccttcgggactataaatcccccgaaacgtttgtagagctcgctaagttctttcccaacacagagttcctcgtggttggtgacggccccctcaggaaaaggcttgaggcgaaagctccgccgaacgtccatttcctcggctatcgcacggatgttgaggagattttaagcaggagcattctgctggttctcccttccaagagggaaggattcggtcttgtcatccttgaggccaactccctcggcgttcctgcgattggaaggcgggtcagcgcgattccagagcttatcagagaggggaagaacggcctgacgttcaccagctttgatgacctcgtggacgaagttagagcgctcctggaaagtccgaagaccgccagaaaaatgggttcaacgggaaaacgcgttgccgagaagtactcctgggaaaaagttgcggaggaagttgaacgggtgtactcgtccctcgtgggatagctttttaaccacttttctcaccagaagtcgagagggcgttcaggattatcgctcagaactctcggttttctcaaatacgatggggtgagggacgtgacgatagttatcaacatgcgagacggcctggatgagaagaagataaaggtagccgcgaggctcatccttgaggggaaactcgtggcgtttccgaccgagaccgtttacggccttggggccgacgccctgaacgagggggccgtcaggaggatattcgaggccaaaggaagacccgcggacaatcctctgataatccacatagcaagcatcgatgaccttgagaaagttgccagagaagtgcccgagaaggcaaagctcctcgcggagaggttctggcctggaccgctcacactcgttcttccaaagcgtgaggaagtgccgctggtcacgaccggcggcctcgacaccgtcgccgtaaggatgcccgcccacccaatagcactcgctctcataagggcgagcaccccactggccgctccctcggccaacataagcgggaagcccagcccgacttcggccgagcacgtgattgacgacttctacggaaaaatcgaggggataatagacggcggcgagacttgggtcggtgtcgaatcaacggtcgttgacctcaccgaagagcccccagttctcctgagaccagggggtatcccgctggaggagctggagaaagttatcgggcccatcaggatacaccccgcggtcaagggaaagaagatagacctcgcgaaggctcccggaatgaagtacaagcactacgccccaaacgcaatggtgatagttgttgagggaactcctgagaacaggagaagaaaaatccaggagctggtggatgagtacaggaaaaagggccaccgcgttggtgtgatggcgacttttgaagtggaggcggacgagttctacttcctcgggaaaaccttagaagaagtcgccagaaatctcttcaaggccctcagagagcttgacaagcgcggcgtggacgtgataatagccgaaggggttgaggaggtaggagtggggcttgcagtaatgaaccgcctgaggaaggcggccggctataacatcgttaaagcataggcaacgcttaaatattggtctgtgaacatttccttagtacctgtatggtcaccaatgtaacgatatggggtgagagagttggatttgcccgaaacaacatcccccgaggagattgaggagattgggtttaaatacgttgatagcggcagggttaaagagggattgaagttaatactaagagctgcccagaggtatgaagagagaaagaactacgaggatgctgcgaggctgttcaggtacatcgggaggtatctgactagaaaggcttcccccgagaaggccaggccttaccttcttaaagcggcgtcactttatataaacttggtcgaggaggagatatcaaagcccgatgttgacctggatgcccttgaccaatacaccctgaacgtccttgaggtctttgcagtcacgggggactcgaggttcatgacaaagtacggcactaggtttgggaacatctacgaggagcttgggaattcttttgaaagctctggtgatctcaaaactgctgccagggtttacgagtctgcgtttcactactacaagatagtgggtagcgagacggacataaagcgtatcgctggaaaactcctcgatatctacggtgaaatcaccgagaatctcgttgaaagtaagaacctttcggctgccgctgacgcgttctacgtgctcgctaagtacgtcagggcgatattcggtcacgactctcactaccttgagattatggaaacggccgctaaaaactatgaaaaggccagcaagctttcatactccgagggtgatcttgacgggacagcaacgaacctcgtcaaggcccagtatgcatatatgctctgtgagaacacgggcagagcaaagctcgttgggataaacgccgttaggatgctctatcaaatagtgagttcctatcgcgccgcaggagacgataaagcgacgcaggaaaagctcattgagctcgccgaggcattaatcggaataaacaagttcgatgatgcagttaaacactataaagaggccctcaacatcagctcgaacattgaacagaagatcaggatacggctggccctgctaaagacctacatcgcaaatcagaggctctacgacctcctcgacatcgttgagattgccgagttctacgtgtccaggaaaaggcccgcccaggcttatgagctcttggtcaagatccttgaaaagaactcacagcttgaggaagtgaacaaaaagattttagaggcggagggctattactgagtcctcagctgtgccctcggaagcggaatgtggtatgggagtctcatctccttggagatgatcatcaggagcggcgaaagttcgctggtaaggaagttggtaacttccacaaagagcactgagtttacctttttctcctcttcccagaggttcaggatttcgtcaatcatttccttcttcgggggaaggtacagcagaagtcccttgatgacagccctcgcaatctcgggctgataagtcacttcaaagctgaacaccacttcaacaccgtttatctttccagttggggttcttacctctcccagcctgagatcttctatttttgggctcaagtttacctgaatctgacccgtgggtatgcttcctgagagtttttctacctcaaccttcgtgaggttgtgtgcaaccaccggcatctttgttcaccagggtgggcttagttctgtactataaaacggtatcggttatcttattaaaggaaaacgacagagaacgaatcgatgcccagggagaaggttgtgaaaatctgggacgagagggaagttgtgtactccccaaaacgctggcgctacctgtgggaaaagcgtgagaatgccctaaagattatggagaggctgaaggactttgatcccgtcctctatggaagcgtcgctaggggagacgtcagaaaggacagcgacatagacatcttcattccaattcgggttccgagctacctcatcgagctggccctcgaaggccttgtacggaggagaaaaatcgttatggcaacaccatggcacctgataaagggcgtcatcgagatagatgaggagactagcgttacatttcctctgcttgaaccaacggacagggagcttgagttctaccgctggggcggggcaatcgacatctggggtgtcaaaacgaaggagagagtcccaggagttaacaaaaagctcatcctaatactcccaacggagaagggacacatagagagggaagtcatgggaagagagccagaagtcgccaaaatacttggagtgagcgtggatatcgttaccgagagggttcacgtccttacgaggagggacagcattggtaggaccgggatatacctcaacgaagaagttcccgactggatgagcttcgaggaggcgctgaagatcatagccgaccgcgaccccaacgtgaggagaaaggtgagggaaagaggggatatctaagtcgttgtacgcgttgtttatgttagacttagggtatccccgatcacacctgggaccttggagtggctaaatcataaagaccccctacttaaaaagaaaaaagagcggcccccattttataaaatcggtccactggtgaacctttaaatccatcagcgctcgaatttttctctgcgcaacatttttatacattctcgtggaatttttactcgaaagttgctttctcaggagggataggcatgtcagagaaaatcgtcgaagaactcaggcccttctttgacccgaaggcggtcgcaatcatcggtgcaaccgacaagaagggaaaggtcggaaacgttatttttgagaacttcagaatgaacaaggagcgcgggattttcaagggcaacatctaccccgttaaccccaagctcgacgagatagagggctacaaggtttaccacagcgttaaagagctccccgatgacactgatctggccgttatctcgattccggccaagttcgtgccggcaacgatgagggaggtagctgagaagggcattaaggcggtcgtcatcatcaccggcggcttcggtgagcttggagaagaaggcaagagaatggagcaggagatacttgagatagcgagggcaaacgggataagggtcatcggccccaactgtgtcggcgtttacgttccagataccggcgttgataccgtcttcttgccggaagagaagatggacaggccgaagagcgggccaatagccttcgttagccagagcggtgcattcgcagctgctatgctcgactgggctgctatggctggcataggcatcggtaagatggtcagctacggcaacaagctcgacgtggacgatgcagatctcatggagtacttcatccacgacgacgagataaaggtcgttaccttctacatcgagggcgtcaaggacggaaggaagttcatggaggcggcaaagaagatcaccaaggttaagcccgtaatcgccttgaagagcggaagaacggagtacggagctaaagctgcatcttctcacacaggctcgctcgctggagccgacaccatctacgacgcggtcttcaagcagactggaataatccgcgccgaggacttcgaacacatgttcgaccttgctaaggccttcgccgcactactccacaagctcccgaagggcgacaggataggcataatcaccgacggcggtggagctggagttatggcgagcgacgcagttgccaggttcggcctcaagatggcggagctgagcgaggagacgataaagtttctcgaggagaacttcccgccgcacgcggtagctggcaacccgaccgatgtcgtgggcgacaccgatgccgagaggtacagaatagctattgaagccttcacgaaggatccgaacgtcgatgcgatagtcatcatcgtcctcttccaggtgccgctccttgaggaggagaagatcatcgagatactcgctgactaccagaagaagacggacaagccgatagtggcagttgctatgggcggaaggaagaccgaccgctacgcaaggatgcttgaggagaagggcgtccccgtttacccgacccccgagaggggagtccgtgccatggcaggtctcgtgaggtatgctgaatacctccgcaaggttaagggggaatgatgttatgagcgccaaagaagaggcccttaaggttattgagagcgttttgaagtctggaaggactgcgctcgttgagtacgaggccaagcaggtcttaaaggcctatagtctgcccgtcccaaacgaaaagcttgccaagacccttgatgaagcactggagtacgccgaagagattggatatcctgtcgccatgaagctcatgtcgcctcagatactccacaagagcgacgccaaggtcgtcatactcaacataaagtctcccgaagagctgaagcagaagtgggaggagattcacgagaacgcgaggaagtaccgccccgatgccgagattctcggtgtcctcatagcgccgatgctcaggccaggaagggagattatcatcggtgtcacagaagacccgcagttcggccacgcgataatgttcggcctcggtggcatcttcgtcgaggtactcaaggacgtgaccttcaggataatcccaataaccgagaaggacgcaaggaagatgatagcagagatcaagggctacccgattctggccggagcgcgcggtgaagagccagccgacatagacgccatcgtggacatgctccttaaagtgtctcagctcgttgatgagctcagggactacatcaaggagatggacctcaaccctgtcttcgtctacgagaagggcaagggagcagttgtcgttgacgcaaggataatagcgaaagctccagaaaagaaagagtgaggagaatcctctcttcactcttttaccatttttaggaatatttcttcgagggtgggttctttgatttgtagggtgagtatttttgctccttgttttgcaacgtagtcgtggagttcttctctaatgtctctctcggccacaatcctgtacttgttctcgccgaggggtgaagcgcgccagggagcactgctccagtcgacgggcttgctcgtctccagaattatcgtgtagcccgctttctcaaggaactcgcgcttaatctcctccaagcttccttccctgatgagttttcccttcacgatgactccaacggtatcgcagatttcctcaacgtgggccaggatgtggcttgagaagaagaccgtttttccggcttttctctgctccctgataatgtccttgaactcggcgatgccctttggatctagaccgctcattggctcgtcgaggattaagaggtctgggtcgttgatgagtgcctgggctaggaggagcctctgtctcatgcccttcgagaatttgcccaccttcctgttcttagcctcgcttaggcctactaagtctaggagttctttgattcttttctccttctcggtttttggtattttgaatgcatccgcgattatgtcgagggtttggactggtgtgaggaagtcccagagggttgcgtgttcgggcatgtagccgattctcttctttgcttggacgagtttgttctcgtcgaattttccatccctgaagacttctaggtcgaagagttgtatgcggccttgttgtgggaagattaggccgagggtgctcaggattgtcgtgctttttcctgctccgtttgggcctaggaagccgtagatttggcctggttttacttctaggttgaggccgttgagggccttaacgtccttgtagaatttgacgagattctcaaccctcatcacaaaccatcacctcaaatccatcctggcaaacctcagaaaggcccctccaaagtacacgatggtcataccgactatcaaaccgaagtttaccgggttcttacctatggcgtgggcaatgcctacgtaattgccgtcctcgtacacgtcaccgagaatcacccccatctgggagagcggtgaatagaacaggtactttgtagtgtactcgtccaccctctccgcgacctcatcgtagttcacgttctcgtcgaagacgtagtctttgattgccatgaacgagacgatgctcggtatgagcatgaagagtatgaagaacagcgccagagctgctccaagggccgttcctgaagattttatcatcgtggagaggatgtagcccagtgcaacgagctggatcatcgcgagcagaagaagaaagttcaggagcattgactcggtgacgagcttttggccgaacggtgcccccatccaggcgaggccgattatacctatcaccgtcatcaggaggagcgccgcgaggagcacaacaacatgggctaggaacttgcccccaaggtagcctattctcctcactggtttgctgagggctacccttatcgtcccgttctcaaggtcggagtttattgcggtggcaccaaggaggagcgcgagtattccaaggaagaaccctgccagatcctcgatgttgctgacgagcatgtttactgcctcaccaacggtttgaggcgtatttccgttcattttttctaggtagaaccccggcacgtagagaagcatcattatgccgagcagaacccagaccttcttcgttctcatgcttttgataaattcaagcttcagcccccagtgcatcgcttatcacccatgaagttttaaccaaatagaactaaaggcagtaatataaaagactatcggtctccgcaacattccacagagggcagtttaaaaaggaaaatcagagggatccgagctcaagaactaactcccacttctcgcagaccttcttcagccgttccattacttcccgcttccccccaagcactggccacaggattgagtctatatggagcggtggaattcccgtttcttcggcgacccttctccagaagctcaccggcggctcgttagttatcctttcggtgtaggcttttattctgacgtcctcgggaatgtctatctccattggatacgggacaaactccccgaaggctattctacccgcgtagccaaacatcttgacggcgaaaaccacggtctttgcggtttttggagatcccagggcttctgcaatgtcgttccgcagtcccatcatattctcaaagtagtacctcctaagttcttggagcgtcagcgagtttagaaacggctcgagcttttccaacctcttgatctttccggcgacgagccggcggttggttcttgatgagggtagaaactttgagcatgcctcaactatgctcttctctggaggattttgggagaaatactttgagaactcccaccaccagtcctctcccttcccgctcagctggtagctgactatggagttggctattaccagcttgatgaaggtctcatcgtcgttcagattttcgcggaggtgtctgagggcgtcgaactggaggtctaccttttcctctatgatcctcgcgcactcgatacccagctctttaagaccttctacaagtttgtcggctttttcctcgttcgtctggtactttatttttacaaaacgctccaggctcatcactgaccaccggcgacgctttttataatcctgatcaggaaggcgttctcctcaacgatctctgccccagtgttccttggaattcccagttcaatcttggcctttatcccctgatccttcaggtagtcgaaaacctcgctgctggcactctggaattccgacttcaggatcaggccgtaaacagtaggtccccagctgctctggcccgctccatacgtcttttcgttgagaaacttcactatcagagagatgtcctccctgaactctccgccctggaatcctgcaaagtgcctgcccacgagcttctgtatggcactcagatgctctccaaaggcctttatattgcgctctttgagggtcggtagaagaccgagcagaatcctgtggcttatctccctggccgcttcaacgtcgccaaagcttgactccatcgcgggcttttcctcctcctcgtctgggccgcgcttaagctccggaattaccaggagaaacgcccactcttccggaaagtcctcgcggagtaccagcggcgggacggagttcctgacaccgccatccagcacaaatccgccgtaggcgaaggtgtatattccagcgccgctgttcttgccccttccaagggctctagcaagttcccctatcgagacatgaattccgttgagcctcgccactgcagttccaacggccaggctgagctgggtagtggaaccgagaccaacgtgccttggaattccacgcctgacttcaacgagatagttcaccccagtcccaaaagcggcgttcattctccctaaagttttctcgatcgtctcgatatcctctccctgagctttgatttccatcttttcagaggggagaacccttacctcgtagcctccatcgattgctaccccaatactcccaaaccgtcttccgaggctgcccgtagggtctatgaggccgaggtggagcctcctaggcgtgcgcactatcactttctcaccaccatagaagcaaagaagacatacccttttaaccctagtgaagcttgagaaaataacgggaataagaatgggagaaggttagcgcaagaatacgtcactcaatctttgcaagctcgtaggtgagtgcttccttccgccttgcttcctggagggcgatcctcctggcttcctcaacattttccgcctcgacgacaagggttttcccgtgatgttccccgccgtagagcgtgagctcccacttcatactaccaccgcatctattgtcaggctgtcaaaggtttataaatctaacccaccgacagctgtcgaaaagacaaagagaaggtcaagaagacaatttctctccaagcagtctcagggcaataacgaaaacaaaactaatcccgactatcactgggttgagggttgccgagataatgccgagtatccctgcaagccccctgatctcttttctcagatgctttccgaaccagccggtcagcgctattgcgagcaggtacatcacgagcagcgttgcactgaggtcgtagagcacctgaagggcggtcatcgtggtccagtgcttgactgttatgatgaacatctcggggtgcgtgaagtagatgtacggcccgatgtatccggcgagggcgtacttgaccgcgttcatcgccgtcttccagaagtctccgccggctaaggccgaaccggcgtagcttgccaaggcaaccggcggcgtaacatcagcgaggattccaaagtagaagacaaagaagtgtgccgccagcagggctatcggggttgcgaatcccggaaccgggtctgaatatgggtggaggccctgaacggcgttgaatattgcaggagccgcaactaaagatgttatgatgtagttggccgtcgtcgggacgcccattccgaggatgaggctgaagaccatcgtgagcatcagcaggagccagaggtttccagcggttaggtcaacgagacggtagccgagactcgtgacgaggccggtcatcgtgaggacaccctgtataaggcctgcgctcgccgccgccaacatgacgctcgtgctcgtctttccagcgtctatcatggactcgtaggttgccctgtacatggcccttccgtcttcgctcttcgagtaccagccgattataagggagaatattattccaaagacaccgctgaggaggagtatctgctccttggtcatgccgatgtacttggtcagggctatgaagagcaggaagagggccgttatgtagaacttctcgttgaactcgaccttgtcgcttatgaagcctactgcagcaagtccgaggaggattaggagcgagattccggcgactggagtggccatggccttgcctgtgaacatcagagcggtggcaagcaggacaacagcaacgtagagcccctcgtggccctttatgttgtccttggaaatccacgcgacccagatggctactccgagggatgaaattgccgagatgtgcggcggaataccccagactaaggcgacggtgatgacgactattggcaggaggatgtagagcttccttatgaagtagtcaaggccggagaagctttccctcggcattcccttgaggcccagcctctttgtctcaaggtcaatgaagaggtaaacgcccgcgtagtaaacgagcgctggaatgactgcggctatgatgagcttgttgtaggggacgccgaggaactccgccatgatgaatgctgctgcacccatgataggcggcataagctgaccgcccgttgatgctaccggctcaacggcaccggctatttccggaggatagcctgccttcttcatcagcggtattgtgaaggttcccgtggtcaggacgttggcgacgcttgagccgctcactgttcccatcaggccgctggagatgacggcggcctttgccggtcctccaggtcttgaaccaaagagggttatcatgaattccgttatgtagtcgcttatgccgatcttcagcaggaacgcgccgaagaagacgaaggcgaagacgtatatcgtcatgacgaagaatggaatgccgaagattccctcatcgaagtagagctgctgggtaaagcgtatccagtcaaagcctatgttctggatgccgtagataaggaacacgacaacgaccgcgggaagaacccatccaagaaccctcctcgttgcctcaaggacgaggattatggcgaggattccaaagataacgtcggtggtgtagacctcggcgaactcggcgtacctctgatagactgcaaagagatacaacgcggagattgccccgagtatagccaaaatataatcgtaccactggactttctgaagatacttttcctgccgtcttatcggatagaggagataggtgattatcagtatcatggccaggacgaaggcctcgccctgcttggtctggaatgtcgcctgcaggattccgatctttatccccatcttctggaacatgtcgtagagagtgtagttgaagttgaagatgaacagtatttcgtagatacctatcaggattgcggccgctttaacgacgttatcaagcatcgggggaagggttctaaccctttcaataacgacctccttggccttctcaaactgtggtggctcttcacccattatcagcacctcccaatcttgatcagcagtaggggacatgattcgactcgaaactcaatcagtgtatcggaacgtggagcgaatgccggaagaccgtcaaccgttatgtttgcccggttgagcgggatgaaccagtagtcaaggctctttccgaggtagatgttgatccgcttctcgtaccagcttccgttccactcctggaagtcctctggaaggccggcaccgaagtccttccacttcatacctattgcatagatgccgctgctgtttaccttcagcgtctccacaacctcgctccgctccacgctgtggatgtattcaatcgttatttcgtgttcaccgaggggatacaccatctcctccttcccatccgttatcacgagaacacctctttcagcaacagatgataccagtaaaatcaggaaaaatgccagaaaaagaaaggacttcctcaaatacctcacccatcacggcttgagcttgtccgggaccgttatgcccttctcctcgtagaacttaatggctccagggtggagcgggatgctcataccgtcaagggcagtgtcaaggcttatgtacttggtcttggcgtggaccttgtggagttcctcgaggttggctgggtcgaagagtatcttggtcatttggtagacagtgtcctctgacagatccgcactgaccgcgaggatagccttaacggcaacggtcggagtgtcctcggtcatgccgttgtaggtatccttcgggagaacctgcctgacgtagaatatgtatccctggtcgtggagcttgttgaggatgtcatctggaatcgggaggattctaactggggtctggacggctatctggttaacggcaggggttggggcacctgaaacgataacagcggcatcgatctggccgaccttaaggctctgagcggcttcgctgaacttctggttgaccttctggatgctgtcccagacgccagcggccttgagtatctgctcggctgcaactgcagtgccgcttccggcagcacctatggcgaccttcttgcccttgaggtcttggagactcttgatgtcgctgtcggccctgacgacgaactgaaccgtctcaggatagagggccgcgacaccgcgtatgttcttaacgggctgtccctcgaacatgtagaggccgttgtaggcgtagtaagctatatcgttctgcagtatggcggcctgggccttcccttcgccgatggccttggcgttggtaacgctggcaccgctcgtgactgctttggcttttatgccgttcttgttgagtatttcagcgtactttgagccgagcgggaagtagacaccgcttgttcctccggtgtagattgttatctcctcggaagtcttacttccgtttccaccgctaccaatgcaaccgctggccacaagagcaaagaccaaaagggcaacgagaccgagagctttcatcttcattttcttcacctcattctccatttatggtcatccagatatgctaaagtgcatctcagaacatttttatcttggagcacggttatatactttacggttgtaaacttttacgcggctgtaaatcacaaaaattccatgattcttcggttttttcttgaaaatttttccaaaaatagtttaatttagccaagagacgaacacaaaaaagcatcaaagaggagagtaatctttacatttggaaagaagagtgcatggggatgcatttctctaactattaaaagtgttaacaatagggtagggccctcaatcaatcactccgcactattatttcaatcttctttccttcacggtaccctttcatcgcagagagcatgccctttatcgtcttctccacgagctcctgaacccagtccttcatggggagaacctgcccgtctattttaatgacgactttcggcttctggctgagaacaacgcagtcctttgtggtcttctcgcctttcactatcatcctcgccatctcagcacagcggaagccgcagaggccgcaatcaatgttagggagtatgaaggccttctcttccactaggtctgcgagtttttctggctctctggtggcatcgataactgggaggccgttgatttcggttatcccccttgatgcaacaactccgctaaccgctatggcaagtcccccgtcaagttcttcgacttcctccggcgttcttgcacaaaccacccttggaacgtgctccaccgacttgaatccctcaaggagcagaaaatcagcgctgaccattgagaagagcgcgtttatgtccttagctttgaagagaagggcatccgtgtcctccgctctcaccagaacggcgtcggccactcgggaaaaccgccaagtgtcagtgccctctctatcgaactccgcatgcatgctcttcgctatcgctactctgtaacctctctctttgaggactctggcgacggcctctactgtggtcgtcttcccgctcttcttgtagcccacgaacgccaccgctctcatcgcaggcacctcacaggagcgttatccagttcatatcgtctatcttcacgataagctccctcgctttattgcctgcgtagtcagtgacgttcttgagcagtatcacctcttcgtcgaagtcctcaagaattcccgaaaaactgatctcgcttccaatccctacagcaaccctctgtcccttccagcgctcgagtgttttgtcaagcaagtactgtttctcactcatggtttctcccccaatcctgcacatgacttgggctttttaacatattcgggcgagaagtccccttccgagagggaggggatgaaagcccgaaaccctcaaatactctcatagttacacaaaatttgtgataactatgaaatacaaactcgataaaggagcacattcagtctattcactctattaccacctcattttagtcgtaaaacaccgcagaaaagtcttcaccaacgacaggataatagacttcctcaaacagaaaatccacgaaatatcagagacccacgaggtagaagttctcaccatagagacagaccaagaccacgttcacatcctattcaaggcaaaacccaccctcaacataccaaaatacatcaacgccctaaagacaattacctcacgggaaatacgcaggaacttcccagaagtgaaggaaaaactctggagaaacaccttttggtcaccctcatacttcctcgcaacctctgggcaggtgaccctcgacgttctcaaagcctacgttgagagccaaggtgaggggagttgatgcgttcctaccgcttcagaatctatccctcaaaagcacaacaggaaaggatgctccaacatatggaactctgtcgctggctctacaacgagttattgagggcaatacgggaaaacccttcgctcgggagaatcgacacccaaaggctaatcgttgaattaaagaaggaaaagccagaactcaaggaggtttactccaaagttctccaaatggtgaaccaccagctctggaacaacctgaccgtcctgaaggctctaaaaaagaacggacataaagttgggaggcttagatacaagacctcaccgaatagctggaagacgctgaactacaaccaaagcggtttcaagcttgacgaggagaggaagagactacgtctctctaaggttggggaagtccccataaagctccataggagaatcaaaggtaaaatcaagggcgtaataattaaacggacgaagactgggaagtggtatgctatttttcaggctgaggaagaaccagaaccgttgcccagaacgggtagggcagttggaattgatttgggagtcgctcatttcgtcgttgatagcgacggcaacgcttttgagaacccgctgttccttgagaaatcccttgaaaggattaagaaaatacagaggagactctcaaggaagcaaaaaggttcgaagaactgggagagggagagaataaaattagctaaggcttacgagaagctaacgaaccagcgaaatgattttctccataaactcgctctttactacgttaggaattacgacattattgtcgtggaaaacctaaaaccaaagaatatggttgggaacggtaataaaagtctcaaccgtcgtttgctcgattcttctctcggtgctttcattaggatactctccgacaaggctgagagagctggtcggagagttgttttcgtcgagccagcctacacttcaaggacttgctcccgttgtggattcgttgtggaggaattgcctctcctggagagggtttttcgctgttcgaagtgtgggctggtgatggatagggacttgaacgcttccctcaacatattgaagaggggtttggatgaagggttgggacgaccggattgcctgtggagggaagacctctaccccgtgtcgtgccttatgaggccgtcatcacggggcaagtcttccttatgaagcaggaagccccgcccgaaaggacggggtagttcacctttcgtgttctccacaaagcctataagtgtcccttccccaggctgaggggtggtatcatgaggctgatcgttagaggtaagcacatcagggattccctcgccgccgaactgcggaaggaagggataaagtttgaggtcagggagcggctcggctacgacggttttatcggctacatgctcacgggcacccttgacgagattgaaaaagccgttgaaagcattgagggcgttgatagagacgctttgagagagggcttcatgtcgtttaaagaaagtgtgacccacatacttgagcacctgaaagttggggaagacgccgaaaagctcctaatggagggtgcatgggtaggagatatcctcgaccagctccacagggctggagtgcttgattacgatggaaagaccgttaagctcagggaaggtgttgacccatcctcaatcagattcgagtttaagttccccttcaacatcgtccacaatcctgaagaggctgaaaaggtagccaagcagtttgtgtttacagacctccttcccgagtatgaattcgagttcttggagctggacatagccaggatcaacaaaatcggctcgatagcgggcaggtacttcccggaggatgttctccttaaggcttactttgccctcataagcaggggcatcctcgcggaagaaatcctgagggttctaaaggacggaaagatccctgaggaagagctcatcaagagcttcatgagggccgctccaatggcgataccaacgcccaaggggactcttgtgataaactactccaaggaggccatagaagagacactgaaactcctcaagaagctcggctacatcgaaataaagggtggaaaagtcaggaagattagggaaatgggggagtgatcacaccctcgccctctcaaactcttcttttctgcccagaggcttcgtcgcgtcaattccccacttcgccgtaagtcccttctccgctgaggggtcgagtgagcttcccctcgcgttcgggacaatcaccagatccctgtccggctggaagcgggtagcgaccgcccactcgacttccctgtcgtcgtagatgtttatgtcttcatcgaccactataaccctcttcaggctcgggtggccggcgaaggccgctaaaattgcgttcttgccgtcaccgtcgtgctgtttggttatcgaaacgacggcgtggagccacattgccccgccctcggtcagcctgaccccgtgaaccttcggcacgaccctcttaacactcgcgtatatctgcggctcttttggaaggcccatcagcatgtagtgttcgtagccgccggagagcagggcgtggaagatgggatcatccacgtggtacatcttctcaaacactaccagcggctgcctcctgactatgtcgtacgtccctgttatatcaacgaatggcccttcatcgacgagttctggcgttattctggcctcaaagacgaactcgctctcgatcgggactggaatcccgccaagttctatgacttcgagcggctttccaaaggcaatctcactcatggccgatgctatctccagctcgctaaccccataggcggtgctcacggaccctgccagaagaaggtgtactgggttgccaaccactatcctaacgtcgaggtcttcaccgttctcggccttctccttccacatcgcgtagaggtgcctcggaacgagccttatggcggcggttttctcgtcacgcaccatcatcctgtggaaggacacgttgacaaagccgttgtcatccttcgctatgaccatcgccgaggtgaagtactgaccgccgtcccttgggtagtactttggaatcgggagcttcttgagggagaagtccttcgtcgagttcttgagaaaaggtgcctctttaacctctttgtactgccttgggttttccattgcctccgctatcaggtggatgagctcttccctcgtggtgttgaggtaagtggctatcctcttccgggtgctccagatgtttccagcgaccttccagccttccacgtcttcaaacagaaccggcctgtcagggtattttaggaggtagcgggttatctccagctctttctttacgggttccttaatgacaactaggtcttcaaaccgtgagagtatctccctcagcatgctatcaccataccaacttccaaaaggtctataaatcctttttctaaactttcggcgattggccatgcccatggttgtcctgagaatcccagatggctcagcactggtgtacatagagaaagccgacccgagcgtctacttcaaaatctacgacctgctcacctacaagaaggactacgggaagtgggagaagcccgagagcctctacgacccctacgagaagacgtttcccgtcgggcttctgccccgggtgaagaaattcctcaacagcaagggctaccgcgttagggtaaaggacgagaggcagatacgcggagaaaagctcaactccacctggaacgagaagttccagatgaggcgctaccaggggagggcagtcaagaaggcactaaaggagaaaatgggcgttctcgccctcccggttgggagtggaaagacgatagtcggcctcaggataatccatgagcttgacctctccgctcttatagtcgtccacaccaaggagctcctctaccagtgggctgagaggattgaggaagtcctcggaataaaggctggcatcgtgggggacaacaagtgggaagaggggcctgtgacagttgccatgatacagaccctcctttcgaggggagttgataaactccagagagactatgcgatagtcctcttcgatgaatgccacaggacttcagcagctgaaaagttctaccagctcggcataagccttccccaggtctaccgcttcggtctctcggcaactccatggaggcgcgttaggggggaggagatcaagattgaggcggtagttgggccgataatctacgaggtcagggctgaagacctcataagggagggctttttggcaaagccgaagttcgagataataacctacgaatcaaagatgccctccttcagcgaacgctacaaggagctttacgaggacatgataatgaacaacgacgagaggaacagggcgatagtgaagaaggccatcgagcttgccaggaaggggcacagagttctcatagacgtcaggagaattgagcacggaaagattctgaaggagatgctggagaaagaaggtattaaagccgaattcctcagctcgcaaagcccgaaccgctgggagatactggaagcgttcaagagcggcgaaattccagtattaatctcgaccctcctaaaggaaggcgttgacataccggagatctctgccataatactcgccggcggcggaaagagcgacataatgacgattcagacgatagggcgtgcactgaggccgaagaagggaatgaaagcccttatagttgacatcgaggacgacgacccactcctctacacgcacttcatagagcgccaaaaggccctcaagcagtactatgggaagtactacgacaagggaatggagtcaatattcgaggagaaagtccccaaaaagcgccgctctagttaaggctcttgaatagcgctcaaaaatgtctctcctggcctttttgatgcccttttcatcaccttcgaacccgatccccgggtactctatgtgccacagtaccagcccctcaggcggcgccggcggtattttcttcccgtactccccggaaagcatcctttcaacttcctcagcttcgagaaggcctagcccgcagaagcggagggcatttacaattctccgcaccatctcccacaggaagctttttccctggacttcaatcacaaggtagccctgcctctcgatgacctcaactctctcgacttctcttattgggtctctgcctggttcgagctttgcaaaggccgaaaagtcgtgcctcccaacgaaaaggctcgcacactctctcatggcactgaggtcgaagccctcgttcactaggtagtagcgatatgtcttgaactttgcccagaagcgcgggtgaaaatcgtcgggaacctcggcaatcccgagaacccagacgtcgcttaaatggtggttgaggacttccgggcgggcgaggtctggcctctccgatggaacgaaggagaccacattgaagaacgcggatacccctctgtcggttctcgaagcccccttgaagtcgtttttttcaggactctcaattatcccaagcttctgaaggacttttattatctctccctcaacggttcttacgcctggctggcgctggaagccgtagaaggcgctcccgtcgtaggcaactctcagtgcgagcttcatggcatccacttttcgggaacggtataaaatggttttccttgacaccctggcagagaacttgatatttgtaaacttcaatctggaatgaatgacagaaacatctggaaaaagttgataaatactgccatacaggtagaaccggcgatgaaaatggtgagggatatcgagataattacaaaccttgagaactttgagataatgaaggccatcttcgagaaaagtttggaaagggagaaatcatagatagggctccgtgtagagcggagcaaggaacagctcgaaggccgcaacgggcatctcaattccccagttctctaagacggccgggtgtatctcccctataactcctatcgtctccccgttaacaatgatcttaccaactctgcccggaatgaagctcgggtgttctgcctcttcaagctcgtactcgaagccgaggtgacgcataacgccctcgaggatttcttttgcctctgtgaaggtcacgcgcggatgagctaaagccactgccagcttgctctcgctgaccgtcttagtctccctgctctcgtctatgagcgtagcctttccgacctcgaacaacttttgaggatactcctcgtgggtgttctggctcaggaagtcgagcaaactcggaatgagccagttcctcaaagctgaccacttcgggcttatcgggttctctatttccacgagctcagcgggcgggtggttgaagtagtcccggcactcctcctggtgctccccgcaggggagattcatcctgtcgtactgggcctccctgttcgtcaggttgaacgtcatgacctcctgtaagccaaagccgaccatgagctccctaacggcgtcctcgaactcgatgaacttgtcgccccttccctggactgccagcttcggctcctctggttcgatctcgttgtatccgtaggcaatgagcacgtcctcaagaacgtccctcgcgtgcattatgtcgtcgcggaaggccggatagcggagctttgcccttctgttctcaagctcgacctcgtacatcattctctcaaggagctccttgatttccccgtcgctcagctcaaggccggctaattttctgatgtagtcgagctcgacctcgaactccttcggcgttaggtctggagtctctatctcgaagtctggataaactactttcacgctctttatctttccgccgcgctcagcgagagctgtgacgacgacgttgagggcaagcatgactttattcaagtcccagccggttatatcaacgaagacgtttttggtctcggttgtcacccttccagttgtctcggagttgattaccggcggcatcgagaggactttgccctcactgtccacgaggagaggatagtagggcttgtcctttatcaggtgtccgtattcccttcccttctcgtgcttctcaaggatttcctcaagcgtcatctcctcgtcgtagccgaggggaacgaacttctcggtcttctcagcggcgcggtagtatatcggcggcttgaccttgtcgaagtcgaagatgcctatcgctacctcccttctcctccttccgaaggtgagcgcgaccttctcctgcaggttgatcatctgcctcagggcctcttcatcgatgttcaggccctcaacgattgcatagacaccgtagggcctgatgtccttcagcttctcgtccacgtaaactacaacgtcactcttctcgatctcgtacttcggcaaacccttctggaagccaagggcgaatcgtatctgcctcgctataccctcggcactccagaggtcgggcctgttggtgtcctttgagtcggccttgaagtagatttcaccgttctcctcccagacgtcgtccagctcacatttggcgtagaggaagaggtcttcccactcctcgacgctgaaagttttcccgacgagcctctcaaggtcgcgctttgaaacgtcgaacttcggcatgagcatcacctcaacacatcgttcaggggaattgcctcatactcgccagcgtgggcgagcaaatccttatcgttggttattatcggaagccttagcgagagtgcgagtgcaacgaagggagtatccttttcgtcaaactccctgcatattcggtaggcctcatttataaaaccgcggtactcggaaagcggatgagagataatcctccccaggagctcttccctgaagtgggctaactcgggctcagttattcctctttttctggctttttcctcaataatggtccagtatcttttaagctcccttagcatataatccggggcgtggagtggtatttcggtcgtaagtaggaactctctcagcttcgagtttttgggaatgagggctgagattatgacgttggtatccacgatcactccagccctaattctttcttgaactcctgccaagcctcatccctcgctttctctattgcctcaatgtccttctcgtctatcccgagcctccgcgcgatgtcctcgatgaactctatcctcgccctctcggcctcaatcgcccgcttaacttggagctccacaaattcctttctcacaccttccggaatctgaacaacgattttgggcacggccatcacccctggctttcaacggcctttccttcttctttaaccctttcaatgaacttgaggaactctgggagaacgagctctctcgcgcgccatatctctatacccacgacctcaccgttctcgtcgaggtccataacaacgtctcctttcatgtcagcgtccacgggcttctttggtgagagctggatgtacaggatgtcaacgtttgggtcgtacttcacaattatctcctcactcataactcaatccctcaccacaccagcctcgcttccctcaaccagcgcaggtcgtagctgaagaggtaacggatgtcgtctattccgagcttgaacatagctaacctgtcgatacctattccccatgctataactggaacgtctatgcctagggccttcgtcatctcctccctgaatattccagcgcctccgaactctacccagccgagctcagggtggtaggcgctcatctggacgctcggctcggtgaacggataatagtccggcagaaacttgaccttcttcgccccggctatttcaacggcgaagcgcttgagtattccaagcaggtgcctgaagttgaggtcttccccaactacgaagccgtctatctggttgaactcgataaggtgagttctgtcgaggacatcgggtctgaaaacgcgctgtattgtgaagtacttgcccggtatctcaacgcccttcgcgagctgtctggcgtcgagtgcagttccatgggcacgaggcataaggagcatcgccctctccggcgaccagacgtagccccacccccttgagccagtatcgccgccgtgctcgtgagcggctttaacccttgcgacaagctcctcgtccggcagggagccgaccttcgggtacttgagctggtaggtgtctgtccactccctcgccgggtggttctgcggctggaagagcgcgtcgaagttccagaactgggtctctatgaggctgtcaacggtcatctcgatgaatcccatctctatgagccttctccttatcttgtcgaggaaggccctgtagggctgcttcttgcccgggtaaattctcctcaccggagcctttatgtcgaacttcctgaactccacttccctccacttgccggactttatgagttcaggtgtgagaactgagacctctttcttgagctcaagccccttcttaacgagctcctctcccttctcggttatctcggctactctctcggtgatgacgtcttcttcgccgatcttcctcctcttgagttcgttaacgggtacgagcttttcgatttccttaaccggaacttcgcccctctcggcgaggagctttaaggctttatcaatgggtctctccgaagcttctcttcccttctcggttatctcgaggactagcttcccatcttctttcctcacgtttgcccagccttccctcctgagaaggccaacgatgggcttcagctcgtcctcgctgagaacgtctttgaggtcgtcaagtgttgcctttcccttctcgcggagaaccttcaaagccctccactccggaaggccgatttgagcgtacttcattccggtctcggtgagtttgacaaccctttcgctcctctcgtggagcttcgcaagtccctttgcctgaaggccgagaagggcgcgcatcactgcgacctgttcgagaccgctctctttaacgagctcttcaaccttcgccctcttgagctccgcgagcttaatgagtgtgagcttttccgggtagcttaactccatactgccacctccccgtgtgagtgagagggagaacttaagagaattgcggttgaagaagtgtcggaaaacccgccaagttggtccctcttcttctgctcttcaggattatacccccggtagtgagggaaatggccgttggtatctatgactatcctcaacagaatggtaagacttagtattacctaaccttatgttcgttgatacttggatttatgcttctctggatattatctgacactggagtcggattgcttttcggaggacctttaatctcgggagccataaagagctatcaagagttagaagaagccgaatacctagtaacacactacaagggagagggtgctatcaagaatgcaatggaaatggcaaaggacgcccgcaattactcgataaagtcatgatacttggtgggatagcgttcattattacatggatgatcggaccgatatcaactatcttggcctgactcggcaacctcgccaacttcataatgatattcatcgcccacagccgctacaaggagccgaggaaggctcttctccttctcaaagttacagaggagggaaacgccgagatagccgttaaactctaaagctctcccgtctctttcaaaattctttcataaaactcctcacttaaccagaatccggtggctttcagcctttcgagttcttccctcaggctctttatctttccaaggagtttcgccttgagaagaatacctatggttccaacaaccttaagccctaaggccctcgcaacttcccgtccatcgtagtcgtcgatcagaatcagctcagcgttcctttcgatggcaagaactatcgcctcgctctccccctcatccagttcaagcattaaggcgcgcttcagcttctcgtccgatatcttctcgactttgatccacttggcgtttttaatagctaaggcgtcttctgagttccctccttcaaggacgcactctctataaacggcctcaggaataattatctctccaaagaactcccgaagaagttcgagcctgtctatctttgctaggtggattaagggcgttgagtcactcaccacgggcaaaggccagatcctcctcaagctccttctcagtgtagtgccttggaacctttctcttggccagttcctcaaggaactccctctttgtcattccagcgagcttggcggcttttccaagcgggagaatgcccctttggtagagaataacagcaaggtcaactctcagttccctctcaacttctccacgcgggagcttcatggcagtgattatgtcgtcagggattactatctccatactctcaccgtgggaagttggtatctcagtatttaaaccctttctgaaaaattggaaagaagaatatcaagccactcatcccttgtgagggaagaagacgacctttccggtctttccagcgcgcataagctcaaaggcttcctcgaacttgtcgaagcccttgtacttgtgggtgattatcggatcgaggttcagcttgccgctctggatgaggcttgagacggtgtaccaggtttcccagaggtgccttccggttatgccgtggacttcaagggccttgaagattatgaggttgttgaagtctatcgtgacctctctcgggaagaggccgagaagtgagacgcgtcctccgggtgttactgccttgaggccctgctcaagggctttaggtgcaccactgaactcaaggaaaacttcaacgcccgctccgtcggttatgtccataacgaacttgactgggtcttcctcgaaggggttaacgacgtagtcagcaccgaccttcttggcgagcttccttctgaactcactcggctcgctaacgatgactggataagccccgcttgccttggcaactgctatgccgagaagaccgagcggtccagcaccggttatgagggtgctcctcccagcaatcgggcctgcaagaacggtatcgacggcgtttccgagcggctcctgaagggctgcgtactctggcggcatgtccttcgggttcttccaggcgttcttggccggaactatcgcgtagtgggcgaagacaccgtccatatcaactccgaatatcttggtgttctggcagacgtgatagcggttgtgcttgcacgcgtagcacttgccacagacgatatgagtttcaacgctgatgtaatctccaacctggagatcctcaacgccgggaccgacctcgacgacctctccagccacttcgtggcccattatctggggcggctttatcctgctctgcgcccattcgttccactcgtagatatggaggtctgtaccgcagatgctcgttgcgagaaccttaatgaggacttctcctggcccaggctttggaacgtcaacttctacaagttcggcgccgtacgccggcttagtcttcataatagcctgcattttctcggccatagtgatcatctccttaaccttacaatcacagtctaaacagcttgggatataaaccttttgtgttcatgcgttcaaggttattcttcaggggacatatgtgtgtaaaattccgaggattatccagagagaaaatcggaaaccttatatcccccaaactgcacactaatggctagagggatagagatggcagtgatcgtcgtgacaggacgaggtggggctggaaaaacaacgacaacggcaaacctaagttcacacctcgccatgaaagagtaccgtgttctggcgattgacggagacctttatttaccaaacttgggtttccattttggcctggatgctgtgaagtactccgtgcacacccttatgaagaatcctgatatagacccggaatgggcaatatacaagcacagagagaccggcgtatatgtaatgcccggaagcacccagcttcaggatgttttgggaatatctccaaggaagctcgtggatgttatagacaaagtccgttacaagtttggagtggtcttcgtggactccccaacgggggtgccctttgatacgctcccgacttttcagctggccaattaccagatcatagtggtggaaatagagcgttctccgatatactccttcgaagtcatggtcaaaaatgagattgaaaagctcaaggcgttgggagagaggtacaacctcaacattggggtagttctcaacaaagtccgtgaaagtgaggatgtggtcgatgagattataaacgccattgaaactgacctcgatgttcccgtgttggggtgggtaccttttgatcccaatgttcccgcatctgtaaacgctggtattccgatagttaaatacatgccaaacagtgatgcggcaatagcctttagggagattggtgatgttcttgaggaatggatttttggcgaataacttgggggtgttgaaatgaactttgaagagcttgttgagaaggtagcaagcggtgaaattaagctccaccaggtcgagaagtacacgaacggcgataaaaagctcgcgactgaaataagaagaaaagcccttgagaaaaagctcggaataaagcttgagaacatcgggcactactcaatagatcccaaccaggtcataggaaagaacattgagaacatgatcggcgtcgtccagatacccatgggcgttgctgggccgcttaaaatcaacggcgagtacgcgaaaggagagttttacattcctctcgccacaactgagggcgcactcgttgcgagcgtgaaccgcggctgttctgccttgaccgctgcgggaggcgttaagacaaccctaatagacgacaagatgacgcgcgcgccactcctcaagtgtcccgacgcgaggagggctagagaagttgctgagtgggtgaagaacaaccttgactacctccaggagaaggcggtctcaaaggtcaccaggcacgggaagctgaggggtgttaggccattcatcgtgggcaacaacctctatttacgctttgagttcgagaccggcgatgcaatgggaatgaacatggtcacgatagcgagcgaggagataatgaaggtcatcgaggaggaattccccgacgtgaagtatcttgcactctccggcaacctctgcgttgacaagaagcccaacgcgatgaacttcatcaacgggaggggcaagaccgtcattgccgaggccgtgattcctcggaagatcgtcgaggagaagctgaagacaacgcctgaactcatagccgaggtgaactaccgcaagaacctcgttggttcagcgcaggccggctcgtacggtttcaacgcccacttcggaaacatcgtcggcgcgatattccttgctaccgggcaggacgaggcccagataacagaaggatcacacggcataactctcgccgaagtaacgccagagggcgacctctacatcagcatcaccatgccgagccttgagattgggacagttggcggaggtacaagagtccccacgcagagggaggctctctcgattatgggcgttgccggaggtggagacccaccgggaacgaacgccaagaagttcgcggagatagtcgctggagcagttctcgctggcgagctttccctgctggcggcgatagcggcgaagcacctagcaaaggcccataaggagcttggacgttaggttttctcttcttggtttgtctttgccctcacaattttaactattttaacgctcttcttttcaaagggatcgtgggagagtacctcaatgcctctgaagtagaggagcgcgaagggggtagtcaattgcaagatatatcagaagagtgagagcaagaaggaggatggactggagaaagtagttcttagtgttaaggagggatgaaaaaaggagactgcccaggaagcttattgcgaagtttatcccagaacgatgtctgtatctctttccgcggattctcttcttcccgatcaccctgagaaggacttgaagggcttccctgctattcacattgaagaagagggtaaactcaggttcaagttccccaccgggcttaatcggggtctggagggaggccaggtaaaacatcctgctcagtccatcgattagttcgattatttcaattgtttttcccgagtagagcctgtccgaataggaggcgagagtttcggggtcgggttcaaggagccccacgaactcaactccagccgttttgaaaatcgcctcaagctctgaggcacaggttgaaagaacattacacctaatctgcgcgtacatcacgtattttttgggcttccaccggggaaggcctatacgagatttttttctctgactccatcaagtcgaatactactctggattttaaaagcgttgtgttccagatgaaaaagctaaacctaaaaacttctcagtggaggcttaaacggggatgatgagcagtttccctcactccgatctgtgacgaggagccgatgctctgaccctcttcttctggtatcccttcaagataccaccaaaaacgctgaggaaaacgccgatgaagaggagcaggttgtttatctcggagagtgcgtgatagtagtagccgacgtagaacagaacggctattcccaccagaaccaaagcacctcccaggacagattttcttgaatccccgccaactatatcttcagcgacctttcccagacctttctctctctgaaccaggaactcgtaggcttctctgcacgggagtccatcggtcttaccaggaaccacgtaaacaactgaataatcgcctgaattagccttcagaacggttattacctctgaagtctgagcgacctgaaggagagcatcagtgagggtctgggtatcaggctcgaaaagtttgaggtagccctttatgtcgagacctcgtggctggtcgtccgttatgcagtaaaagacaatgaatctggctttcattttcactcacaaaagaggataggagaaaaaggacttaaaaacctcagcccgctatttcctggattttctttctgacgagggagctgacaagctttccatcggcccttccgcggagcttcgccattgcccttcccattatcatgcccattgcccccatgcccttggccttgatcacctcgatgttctgctggataacctcatcaatgattttctcgacctcttcctcgctgaggagcgtcagtcccttctcttcagccacctgctttgcagtcttctccgggtggagtgccagctccttgaatatctcctcaaaggcctccttcgctatcttcccttcgaggtagagctggaaggcttccatgatgtgcccgtcggtaatgttttcgaccgggacttccttcttgaggcccttaaggacgacgacgagtattgaagccgccagggagggtttaactcccttctccaccagctcctcgaagagctcatccctttcgtcgtttacaagggtctcggctaagctcctgtctatcttgtactccttgacgtagcgctctaccctctcctgcgggagctcgggcaggttggcccttattctctctttctcctccggcggcaggaatatagagggtatgtcagtttctgggtacattctggcctttcctggaagcgggcgcatatattgtgtattgccgtctggtaaggcccttctcgtctcctcaggaacgccttcgatggcttccctcgccctcttgatgacttcgcggagcgcgttcttggctgtctcttcctcggccgcgacgagaacgaacgcgtcctcctctccgagaccaagtttttcaataaccgcattaacctctaattctgtaattccataattaggtaattcatcgatgtggaagatgcccctcacgtacttcttggccctgtcggccatctccgttccgagccttcttccaggctgaatctctttcccgattaacccgcggaacttggggagctttacagctaagactttcccgccgctcttaattgccctcgcgattatcttcgagccggtgttctggaagatctccgtcacgtcgtagaactcctccttgatgtcctcaggcttaacacccctcctcttcagctcgtcccttatcctgagcaggttcagctgcctctcgacttccctctctatgatgagtggtatcatgtcaagctcctggacaccctttatctcgactctcgctccgcccctgatcgagacgttgaggtcctgcctgatggttccgagaccgcgcttgacctttctcgtggcccttagggcgtctcctatatacttggctacgaccttagcctgctcagggtggtgtatgtccggggttgtgcttatctcgaccagcgggattccaaggcgatctatgcggtagattacctccttctccttcctctcgacgatacggcaggcatcctcctcaaggcagactgttgggattccaacgctcccccagggggtatctaccttcccgttcacggcaactatcgccgtcctctggaagccggagacgttggaaccgtctatgacgatcttcctcatgaagtgaacctcatcaactggcttggcgttgaggaggtagcctatctggagtgcaacctcaagggcctccctgtcgggccccctcggcggctcctcgtccatgtaaacgaggtcggtaagcctgtagttgccctcgtagatgtacttcctgcccttcttgaactcttccagagcagcagggtcaatctcccccagctcgctcatcgtgggcctcaatcttctttcaaaggtgaagtcaacctcgtcgctgagctcgctcgggacaggggagaataacttcttggtgtcgagctgcctgtgtatctcaagaccgaccttgaggccgagctcctcgtagttgaacttgtctgtcatctcaacacctccaggtgagttctcaaaaagtcatcatcaagggtcacaattttggatattccataaacatcacagacagcaagaatcatagcatcgttaggtaggagcctgtactcccttctgagctttctgctccttctgatgacttcttcattctcccccaggaattcaagtaggccagcttctgaaagctcatagagaagttcatcaaatttttcgacgatctcataaagttctgggttctttttcagctcttttttcagggcgtagacacctttcttcccagtttttgatgtaaagtagtgaccgagtatcacgaaagagacctctgaatagatggttggcgttatgcatagggtgaaatcctcgctgactctgtcaagaagttcaatgacgtcgctgttcccgctcaggacttccacccagatattgctgtcaatcaccacgcgctctctcttcgatgtactcatagtactctgcctcccagtcgtactcgctcttcttcaggactcctgagtacttcttcaaaatcgggccggcttttcttatcactacctctacctcgatgccctcaggtagttccaccttttcaagaggcttgaacaccccgttccggtaaacggccttaatacccaatctcatcacctcaggaatgtgtcaaacctcgtgtagggcgttatctcgccggcgtagttggtcagcatcattctcctaacttctttgagatcgtccgtatgcccgagaacccagccaagcttgacgtaggccgtctcagggagcatgtcctcacatggaataacgccagcctttaggagcctccttccagttgagtagacgttgaggttcaccctcccgtagagacactggctcgtcatgcataccgccacaccgttctcaacggccctctcaattgcgggtatcatgtcgtttggcgtgtggccgaggcccgttccctcgatgacgattcccttgtagcccctatcaacaaggaactcaaggagctcgctggttacacctggatagatcttgagtatcgcgaccttctcctcgaatttgtcgtcaacctctacctcaccctcgcccctcttcctgtagtcgtcccttaggtactcgatctttccgtctggccagaccttggcaataggaacgtcgttgatactcctgaatgtgtctctcctgctcgtgtgcatcttcctgaccttggttccacggtgggcgaggcagtaggtgtcgctggtctctccatgcatgaccaccataacctcagcagcgtcactaactgccatcctcgtggcgcagatgaggttcatcgccgcatcgctgctcggcctgtcggaactcctctgggagcccacgagaactacgggctttgtgaggttcctcagcatgaagctgagtgcagctgcagtatagcccatagtgtccgttccgtgggcaatgacgactccgtcctcatcggagttgagagccttcgcggcctcgtgggcgatctttttccagtactcgggcttcatgtcctcgctcattatattgaaaaggagctttggcgttatgttggctatatcgaagatctccgggactgccttcgccagctcctcggcagtaaaggcggcgtgaaccgcgccggtcttgtagtctatcctgcttgctattgttccacccgttcctaaaatggtaacgcttgggaggccctctttcctcggcaggacttccctgaactccatcttgggggcttccttcgccttctcaaggatttcgatgccctctatcgcgtctatcaggatgccgatgttgtagccgttgtcgagcttaattgtgagtgtctctcctggagaaagctcgtagggcggcataacaaggccctcgaaggttatcctctcgtctccttccctcttgacgaccctgacgaggtcccccacaccgaggccgtgcctttccatgaattcatcgacctttctcttcattcccatcccctgccaaagtttatcaaacactataaaacgcttgtgaatggacttttaaggagtttcgcgtacacaaagtggtggtcatatggagctgaaagagataattgatggcataaggagaaccttagacgaggctgattccgcaagggaagaggctctaaggctaacgcgagaggttgtcaggctgagcggcgatgccgtgaaggccatccacagaaacgaccttgagactgcaaggcagaggctcaaaagtgcccagcagctcgtggagatgatcagggagagtctcaagccttacccgatgctgtactactccggctacgtccagagcgcccaccaggaattcgtcgaggcgacccttctcctggcctacagggaaggaagggagttcccatccccctgggatctaggtgttccagaggctgactatctcctgggccttggagatttcgtaggcgaactgagaaggcacttcctgctcctgctcatcgatggcaaggttgaggaagctgaagaagtttaccgcttcatggaggagctgtacggcgagcttatgacgcttgagtaccccaaaggcctcgtaaacatcaggacgaagcaggatcaggcgcggcacattctggagagaacccttgaggacctcacgagggccaagctgaacaaaaggcttgaagagaagctgaaagcggcggttggggatgagtgagggactcttcaaaaagctggaggaagttcagaggaagttggccgaaaggatagttgaaaggccgctggaagtctcgaagattaaaaccgtaggggcagttgacgtctcttatcgagatgaaagagcaagagctgccttcgtcctctgctcttttccagactgcgaactgctgaaacaaagggttgttgaagttgatgtgagctttccgtacatcccaactttctttttcctccgggagacaaggccggttctcattgccctcgggaaggagagaccagacgtactcctcgtggaaggacacgggagggcccatccaaggggatatgggttggcctcgcacatcggccttgttctgggaattccgacgattggaatttcaaagcggttgttgaggggcactccagagggttcatgggtgaaggtgggtaaggcctacgtcagtgttggacacctcattgacctgccctcggcggttgaagtagttaagactttaaacaaaaatggctatccgctaccgctgagaattgcggacaggctttcaaggggccatactagctggagtgggggagtaaatgatgaacactaagagggttcagaggttcataacgggctcaggaatggggactctggtttcgttcgttatcattgtcactcagtatcaagaatcagtatcgcccaggatatcccttacgaccatactaatcgggatgatcgtcgttggaactctttttgagactaaggtatccaaggacttcttgtcggctccgatatcctacatctcaggcattggagcggtgtttctggtagcggccttgagctattggaataaggatattcccggaagcgcccttctcctggttgtggcggtttcatcactcccgacatactttttccgaccattatcacttctggatgcttttatttcgggtccagagtacttcggtggtgcaataacaggactcgccattgttggcgcaatgggtctcattacagctgagaacgcatttggcataacttttgttgcaataacaggtgcgctcgttgtggaaggaatttcagttttcctcgccataatatcccgcgagtttactgggaggaaaaagcaggaaaagatacggtaataatcgtggactgcattccacagaaaagcctaacttggaagacaggccttacttgctctctattttaaacctcggctcttctatccactcggacttacagcgtgggcacctggaggggacttttatctcgggcttgaagacgaagccgcagtttctgcactctgcaggctttatcagaagaactttcccatctctcttgagaattttctggatcgccttcaggtcttcgaggattatcttcactgatcccttcccgtggagatcaagcgctctcgccagctcgctgggggagtaatcccgctcctccaaaaggcttattatcctctccctccgagtcggcatgggggtagtttgaagctggaaataaaaagctttagggtgggagcatgatagtcgagaaggccagtgaagtgcttgagaggtatcagctctgcgaccactgcctcggcaggctcttcgcaaagctcggaaaaggcacgaacgaggagaggggaaaggcgataaggttcgttctcaacatggagcgggctaaagatggtctcccaccggtggaagagcccaaggaatgtgagctgtgcaacaatgtttttgatagaatccctgagcttgtcgagaatatgaaggaagcagcgaaagatgttgagtttgagacttttctcgtcggctcgaggtttcctgatgaggtcaaggagaaagagaaggcgatctgggatgagttcggaatagaaaccgccgagccgataaaccgcgagttcaaccgcgagcttggaaaggcctttgggagggcaaccggaaaggacacgtcaaaaagtcctgacgttgtcttcatagtcgagccttactccggcaaaattgagctccagataaaccccctctacatatacggtcgttatagaaagctccttcgtggaataccccagacaccgcacccggacttcgaagagagcgtcgcatcaataatctgtcgcccgttttcaagggcaaccggagggaagtgcgtctttaaaggggccggaagagaggacgttgacgttaggatgctcggcaacggaaggcccttcatcctggagataaagcgcccgaagaggagaaatattaaccttgaagagatagcgagggagatcaacgcaagcggaaaggttgaagtgctgaacctaaggttcaccaccccagacgaagctgagagagtcctctcgacaccgcacaggaaggagtaccttgcccttgtgcttgtgaaggaaggtgttactcccgaagaagctgaggaagttgccaaaaagctcactggacttgagattcaccagagaacgccctggagagtcaggaaggcgagggccgacaaagtgagggtgaggagagtccactacgccgaagcaagatggatcgatgataaacatttcgagctgaggctcattacagacggcggcctctacatcaaggagctcatctccggggacaaaggaaggacgaagccgagcgtcagcgaccttctcggcaagccggcgtggtgtgagcggcttgatgttctaaacgtccttgatgaggagagatctgaggactcttcttgagtggtgaaaaatttataaacgcttcaccagaggcaatactgattcccgggttgggttagttggtaaactggtgcgaaaagagcgaccccgggaaactcgtgaaaagactggactctccctgtgggagttgctggattgagtgattaaagacacctgtgaggtgattgaaatggttaagaaggcgcacagcttcaggaggaagacgaggggcaagctcagcaagcacccgaggagaaggggccttcccccgcttaccaggttcctccaggagttcgaggtcgggcagaaggttcacatcgtcatcgagccgagctaccacaagggcatgcccgacccgaggttccacggaaggacgggaactgtcgtcggcaagcgcggagacgcctacatcgtccagataaccgacggcggtaaggtcaagaccttcttcatacaccccgtccatctcaggccccagaagggatgactatgataggcaggaagaagctcgaggagcactacattaccatagcagaggctaaggagctcctcgagagaaggcatgccgaaggccttgccgaaaaccctgaggagccgatgttctacgaggccagggttagccttgagcacgccgagcgcttcgcaaagctgaagcccgagcaggcgagggaacttaaggagaagcttatgggcctcttcgactggataaacgaaagaatagccgcaaagctcgttgacatcctaccagaggactacctcgacatccgcgtcatcttcgcgaaggaggagtacatgccgactcccgaggaggccgaggagattannntcaaggttagttgacgaataccggcccctcgacgtgnacttcttttcttttccncttgaggaaagtataaaaactggtaggtgaataacttctgggggagagactatggataggtacaggagacactcctatagggagagtgtgggtaaaaagaggcaccacaatgagtatgaggaatacgcctatgtgttagactaccttccagatggatacattgacattgccagcgggagaaggaccggaaagccggttgcccaggttattggtgagaaggcctttacgctccttgaggttactccaaagactgacctcatgctctacgagagggtctttattggaaagggaaacagggataaaatcctgcttataaacaagaggatttcctacgatgagcttaccgacactgctaaggccgagcttccgtacgttgttgaggaaatcgtgaaaaacaacgaagagaggtttgtccagtttttcaacatggcaccgccgataaccaacaggctccacagcctcgaactcctgcctggaatcgggaaaaagcacatgtgggagataatagaggagaggcagagagagcccttcaaaagctttgaggatctgaagcagagggttaaggggcttcccgatcccgtgaaaatgatagcaaagaggatcgttgatgaactccaggataaggacaggtacaagctgtttgtcggccacaggaggctattccgcgtatgagagaccgcctcttctcaattatttataagtacaacctccacccaaaccgagaccttgggcagaactttctgatagttcccgacataatagagcgcaacatcgaacgggcagaagtgggagagaaagacaccgtcctggagatcggacccggcctgggtgtcctcacggacccgctcagtaaaagggccgggaaagtgtacgcgattgaaaaagactgcaggatcgtggagatactgagaagggaatacaactggccaaacgttgagataatagagggggacgcactcaaggtagagtggccggagttcaacaagatggtctcaaaccttccgtaccagatatcctccccggtgacgtttaaacttctgagccgcgagtttgagcgtgcggtgttgatattccagcttgagtttgccgagagaatggtcgccaagccaggggataagaactattctcgcctctccctgatggtcagggcgaaggcgagggcagaactcgttgagcgtattggaaaaggggccttttggccgagacccaaggttgattctgctgtcgttgtgcttgagccaaagcctccagaggagaggattgacctcaatgaaaacctcgtgaaagctctcttccagcacagaagaagtactgtttccgcggccctgaaaaagtctgcccatatgcttggactctcgaaggataaagccagggagctgaggcaggttttctcaagggttccccattcagagagaagagtctttcagctgtctcccgaggacgtccttgagatagaggagtttttgaagaaggaaggggtcattgagtcctatccagcatctccttgagcgttgaatacctcctgcgggacagctccgatagggcgctgaaaagctccgagagcctctcatcggaagtttttgatgccagggatgaataaatctcgcgcatcaccctttgcgtctcaagaagcgtttttataacgtcctcaattctgccagttttcagagttctcttcagatctttcaaggataagaggagttctattggctcaacattggtgggagaaagctcagaagttccaaaccgtttctggtattccgccatcagcttctcggccgtctcaacgctcaactcggcgagccgctcgcagaggtttgaagcatcattcccccatctgacttctttcgcatagtttgagagagacctgcaggtctccgccagtttcagttcattctgtatccagtacgacagaagttcttgagggcttagtctctgaaggtcttcaattgctttcttcaagtggtcataagttcgctcgcccataccccctcacactctttacaacacccaagcttttttaaaacctctctccgacccgagtacatgatagtcgctattatagacggctacaccgacgaaccagctggcttgggagttcctccttacctcggtatatacccgaggtatgcctacggtgcaataaagaaggccaggaaagatgcgtcgattttctacctcacaatagacgacttgcgtgccacattcttgggtgagggggggatagcgacccgaaacaagacgccgaactttcctaagacgaaaggaatcttagaaaaagccgacatcatagtttacatcggcggtctccacactcctggaaagtacctgtccgcagtccccgggagcgtggaggaggtagcaaggtttctcactcagttcaaaggagagaaaatcctcggcgggcctgctttcatgggctccgccagcatggggggcattaagataaccagcagagaactgcagctcgcccatcaggtttttgaccacgtagtctatggcgaccttgaggcatttctctttgactacttgagcaatccaaaagatgcagacccgcttcgcttcaggacttatgcagaattaagggattatgcaattatcggagcagaagtcgtcaagcagtttcccgattatcctgactttgttatagttgaaattgaaacccaacgcggctgtcccaaagccatgggaattgggggatgttccttctgtaccgagcctgtcaggtatcgcagagtggaagacaggtcggttgaggacgtcgttgcagaggttaaagccctctatacccttggtgtcagacacttccgggtaggcaggcagagctgtatattctcctacatggcaaagccagatggcagggtccctataccaaaccccgaggcagttgagaagctcttccgcggaattcgctcggtcgctccgaatgttaagacgctccatgtagacaacgccaaccctgctgtcatagcaaactatcctgacgagagcaggagaatagcgaaggccctgatagagtacggcactcccggggatgtagtcgccttcggactggagagcgccgacccaaaggttgcaaagctcaacaaccttaacgccacagctgaggagacctacgaggcggtcaaacttctcaacgaaattgggggaagaagaggctacaacggaatgccatggcttcttccgggcataaacataatctttggtctgccaggagagaccaaaaagagctacgaaatcacgttccagttcctgaaaagactcctggatgatggtctgatggtcaggcgcataaacatccgccaggtagtagtttttccaggaacacctttgtggcacatgagggataaagtgaaggttgagaagcacaagaagcttatccagcactaccgctacaagataaggcacgagatagacctacctatgctcaggcgtgttgtcccagtgggaactgttctaagggacgtccgcgctgaagtctttgataacggcttaacctatgggaggcagattgggagttacccactcatagtcgggatgcccaagcaggttcccctcaacaaattctacgacgttttaatcgttgatcacgggttcaggagcataactggaatccctgtgccgataaatgtgaatgaagagagcccaagggtcttggagtacataccgggcataggaaagaagactgccgtgaaaatactggcaaaacgtccctttaagactccagaagagttcttcgaagttattggagaggataaaaagaacgtgctaaaagacctaatcaccctgtagaggtctggttgccctccggccatttgaatccgattatgtgttctatgagtgctacttcagcgcggagggcactgtcagattttccttcaagtactatcagtccttctctcggcactgtaattctgttcgtggtagctccttcgttgggccccagtaacacaactgccaggtgttttctgtttccaatacgcccaagtccaatgagggatttggtgaagaacgtcaggtacctaatgtcatgccttttcagggtctcttcatatgcataggccttggcactggcgttgtccatgccctcctgaaggcccttccagtagtagtacctcttaaacagagttgaagtcagggcgcttatctcggatactgcggcagttctctcgacacagctgccaacgaattcttcaggagacgatgaacatagcttgacgtttgtgtcgccgatgattatggtaaacttctcgtaaggtgctcttagtgttacgtttacgtccacttcggggattccagtcacgtatcccgtgacatttactgcgtagcctttagcgcccgcaggtagcttaaaaccctggagtgtcagattaacgtactccttgggggtaagggagagataacgaccatcgggcagtttgaaaaccaggtatgttttagcaggtgctgacttggacggatgaattgaactctcataatttgaatatccatatcctagataacctagaggagcagcaatcaggattataagaactagggcagcaaggagtcttctggacacatcaacaacctcctagaaattctaactaaaggaaagagaagaagaaaggccttcagtgaaggccagcgaggtactccataagagcctcggcggctgccttggtgccgtccctgtcagcaccagcgacgaggacgacgccgtggccgccgatggtcgggcagttgtcgatgtacttgacgacaccggccttgaggttctcgtcagcagcccactcctcgtaggtggtcgggacgccgagcttgtcggcaagggcggcggtgaccttgttgacaaccggaccaccgacgaggatgaggttgctgtcaacgctgtcgaggccggcttcgatgatctcgtcgtcgaggacagttatcggggtggttatcttgctgacgacggcggccttggccgggctggcggtggcctttatgtcgtcgattgtccagccctcaagctcgtcgccgacgccgagctccttggtggtgtactccggcttgagcgggtcgatgacaacgtaggcactcatggcggcgtaggtcttgtcgtctttagggttcttcttcttcatgatgtcggcgacgtagtcaaccttgtaggtgtcgaagagcttgacctccttgccctcaagctcctccttgttctggagggcgaaccactcgagcttgccgtcctttatgccgagcttggctatccagccgggcatgaactccttgccgtcctcgatgtagctgatgtcggtctggacctcgatgagggcgctggtggttccaccaataccaatgaaggtgtcgaggagttttatccttatgcctccgttgaagagggtttcggagtcctttatgtcggttctgtcgtcagtgtcgagggttactatcttgcttccggccgggcctgagacctcgaagagggccttgaccttgttgacgtcgatatcgatgaccttgatggtatagtcgccgaaggttgctacctcgtccttgttgacgtacttctctccccagtcgttaccgtactcgatgtagtcatcgcctatgtcgaggaccttgatggtcttgccgaagagggtgatggtgtctcccttctcaacgcccttaatgacatcggcctggtagaggctgtaggagctgctcggcttaacgtcactgacggcgtaggtctcttcagtggcaccgaggactttatccttgagggtcttctcgtaggcgttcaggctgaagctcacgttggcgaccacgtcgtcaacgatgagtgtgaagtcgctgaactcgtctatgtcggtggtgtcgacctcgtcaaagcccttaagctcgatcttgcctatggccacggtgtagtggatgctgacgtcggtagcgtcgtgccagttgcccttcgggtccttccagtagttgttgtcgtttccgtccttccactctacggcgttgtatacagtgacttttccgacatcctcccatcccgggtcgtccttgttaaagataccatcgtcccatggtgagtccttgagagtaacggtgaactcgggatagtcatccttgtcgaaggcgccattccaccagccctcaacgtccttaaggtcctccttaagcttgtagttccccttgtagaggttgtcaaagaccgggatgtcagccgggtcgtaggcgacgtccttcttaacaacaacgctggcgtccttaaccttaacatcctcctcggtgtagagcagggtaccaagggcaacggctatgtcagcggctgaagcaacatcctgagcagcggcctggcttccaatgacgattttaacgttgggctctccgttcttaacgaagaagtccttcgggatgttcgggacctcggtagcgctggcaaagccgagggttgcgccaaccatagcggcaccgactgcgagtgccgcgatcttcttcaccttcattccacaacacctccttgggttgttggggctttagcccctactaagtgttgtcatacctatctggccacttggggtttaaatacttttcgctttcagaccctttcagcggccaaaaaaagctcgctgattgccgtaaaaatgaaaagaaggcttaacctaatgcctacacataattcgccttttgccgatattatctagtcagcttgaatgaggtgttcgccttctcaatggccatggcctttagcggccttatgacaagctcgtgagcgaagcctgccaggtcggaaagaacaccctggatctccgatgggttcaaatcaacgatctctggctccactactgatatggcaaccggggcatatttccccgtcagctggaaggcagtttcgatcccggagatgagttctgtagcaaccaggaagcgttttctgccggtcttttcgttctctccctgctgctgcatggcaaacttgtttattctgcatccttcgtacatgagggccttcttgatgtctgcctcaaccctcttctcgtcctctccgtagacttcgacaacgaacctgtagaggagcattctttcgtcgattatcatggactctatctcttccctggaataccccacctttggctctgggagttcatcgagttttggatacgccgccagcggcccgaacttctccattagttgccccattagataggatacgcccccaaggattttcgtcagttgctccgcaggaatctcgatgccatttgttgaaacgagatcaacggccgctggggcgtagcggatagccaggtcaacaaggacttcaaaaggccccctgattctggcctctatcatcccggagtatggcaggagatcgttatcagggtcttcaactatctcatcgacgtagatgtccttaatctcgacacctttttcggcctttagtgattcaacggtctggcccatggcgctttctaaagctttcttgtcgttggataggccctcaatgtagaagataacctcaatcggcctcattttcaccaccacataccaggatatctcttttttgtgtatgtgccaacgattgggatgggttctccgcagaacccgcaccttccatcatcggtcacgttgtactcaacgatctcaaacccatagcggactattaaaggcttttcgcacttcggacagtaggtatgctcaccagggtggccgggcacgttgccgatgtaaacgaacttcagaccctcttccttggcaacgcggtaggccatctcgatcgtctcaactggcgtcggaggaaggtgaaggagcttgtagtgcgggaagaagcgggagaagtgtactggcgtgtcgtcgcccgtctcttcaacgacccagcgggcgaaggcccttatctcctcttccttgtcgttcagcgttggaattatgaggtaggtcagctcgacgtggatcccgaattccttcttcgctatcacagccgtcctcctgctcggctccccgctcgggacactggctatcttcatgtagaactcatcgttgaaggccttgatgtcgatgttcattgcgtctatgtagggggcgagctccctgaaaggttcctcattgatgtagccgttggttatcatgaggttgtagaggccctccttcttggccagctttgccgtgtccaggacgaactcgtaccagatcgtcggctcattgtaggtgtaggctatgctctcacagccgtacttcttcgccatcgtgactatcatctcaggcgtcatatcgtggaggtatgggaaactttcatcagcctggcttatctcccagttctggcagtgcttgcagtgcatgttgcatccaacggtggctattgagaatgcacatgaacccggccagaagtgaaagagcggcttcttctcaactggatcggccgctatcgaagagaccttcccatagttgagggtgtagagccttccgcctatgttcttcctaaccttacaggagccccgcttaccatcgtctatgatgcagttgaggggacagagcctgcacctcacgcggttgttttcgagcggctcccaccacatcgcctcgcgcatgttctcacccagttatcatagttccccttcacgtttaagcttttggtattcgtggtagaattccctaagggtaagaaactcggcgtcccttgaaatgtggaattctatcagcctgcggaggttttcaagggcacttttgccagtcccaaaccagcagtccggcctgagcctcttgctcattctcacgaattcccacggatggaatatgtaaacgattgggtcttcgaagcgtttgtggaagggcttttgcagtgtccacggaaggcgggtaactatggacgtcgtagttgctgggacttcgagcaggcccgaaatctctgtgactcctcttcgccagcccttgtgctttgccttcgttgaatcaactaaaaatccgagctctttaagtattggatagtggtcatctggaaactggaagttgggcgctctgaaggaaacgacttttccaaaccgggagaggatctctctcgcttcagaaagccggcgtctaacctcttccccggggagtctgtcaaacctttcatgttcaagtccatggcacccgagttcatgttttttggctgctcttctggcgagttcggggaacttttctgccattcttccagtaaatagaaacgtccctttgattccgctgtcctccaggaggtccatgaccagaggcaggccttcttccatccctctggtggacgaagcaaacggcggacagtcctgctcgacatcaaacgtgaggataacttgacccatccttttccgcctcctccagggactcccggtaaaccctctcaacggacttcacaacgacgctccagtcgtaaaccctttccaccctgcgctttccgagttttccgagttttctctccaggttctggttgtttaatatttcgttgatggcactgctgagcgcccgggcgtttccaggggggactaacataccgcagccgtcaacaatctcagggataccgcctacttttgttcctactacgggcgtcccgcttgccatcgcctcaagaaggactattccaaaggcctcgctcaggctcgggagaacaaaaacatcactcgcgcggtagtatagggggagtatcgaatagctgaccgtgccgaggaacttcaccctgttggagattccaaggagctttgccttgttgcggagaacgggcagcatgctccctgaacctgcaaccaaaagggttccatctacgtctttcatggccgatatgagagtccccactccctttctgggctcaagacgcccgacgtagaggacgactttcccatcaaggttcaggagctctttggcctcctctttgctcacgggaatatcaaacctttcgatgttgatcccgttgggaactatcctcactggcactcttgtgaacctctttatgaactctctggaggccttgctgactgctattatcctgtgggggtaagttaagtgatagcggtaatagggatagcttgcccgtgacatggtgcgtattgtgaaggagttctcgtagtttatgctgtgtgtcgtcacgacactgcccttgccgagttttctcgccgccattgcagccttcagggaaaggggggtaaacgcatggtgcccgtgaacgacctcgtagcccctgactaacggctcgagcaggccgtagcccttcgcaaaggcagagacgtttaggcttgcgctcggaaaaatcttgcccggaactttgacgagcccgatgccgagttcccttagctcgtcctcttttcctgtttttctgttgttcgtgattatatcaacttcatgccctctctcccgcaggtacaacgcgaggtcatgcatatgaacggctaccccgccgagttttggatagtaccagtcgctgacgagcgctattttgagggtctccattttacctcgacctgcagtatctaatgtgagccttttaaaacattagcggaattcagtttaatccaatctcgaaaaatgctcccaaccaagtgggaaaagcggctttctgcccatataaactccgtttccctctctgacctgcccgataacggtaaaatcaacttcaagctctgaaatcttttctggtggcacggtaaagagaagctcaaattcctccccgcttgcgagggctaactcaacgggactcttaccaatgacctcagccacttcatacacttccccacgtatcggaagcttcccggagcttatctcaatcccaacaccactcattttggagatcaaatgaagctccttagataggccgtcgcttatgtctatagccgagttcgcagatttactgaggataattccctccttaacccgtgcaatgggttcaaggaacttttcgtagagggcttttctggtgctctcagacacttcgaggccgtacttccatacaagatagccagcgaacgcccgccctatatctcccgtcacacaaacgaggtcaccgggctttgcacccgacctggttaacagccttttggtttttccaagggcaatgccgtctattatcaggtcatccgcctcattggtgtctgcacttagaacggggattttatagtagtcgagggcctctcctatgccccgggcaattccctcaatgtagtcctcatccaacccctccgggagtccaagcgaaaatagaaaaccgatgggttccgcccccatagctgcaacgtcgctcacgttcattgtcacggctttgaacccaacctgctctggagtcattatgtctggaacatctgttttcctgacgagcatgtcgttcgtggcaacgagccactcgtctcctatctttagtgcgccggcatcgtctccaagggggagctcaccatgccttttcaggtgcttgaggaagagctcgattatttctgactcccgcatgatatcgcctccgagggtgttaagaccataaaacagaaccccatgtggcagaaaagcttttcaccgtctcgaaggctgaggaggtctttatctccagttaccagtgcttcaacttttcccgaaactgctgcagcgattattggattgtcttttggatcccgcgaaataggcggaatttttcctgtttgcactttgatcgagaactcttccaagagcaagaggtatctgtcgaccttatcaggagaaatcccaaattttccagtaaggactcttctaatttcatcctctatataatctgagatgacgttctcgtggagtcccacaaggcattcccagaggagccgccgttcgttaccgtgccagaagtaggcagaaatgagaacatttgtgtcgagcagaaccctcattccccatacctcactttccttactgctttggcaacgtcctcctctgaaactccaagggattttgccgcttcttctccttctttgaggatctcctcgacgtcgatattaagttttttcatcactataacgtcccctctggagaagattagcagatactccccctcctttatacccagcttttctctgaggctcttcggtatcacgatctgacccttcgaggagactttcacgacctccatgagtatcaccgtaagaaattccaactttcttacttatttgactttcggaggaattcggttatgctcctctgcttgggcttttcctcaacgttgggaacttcaacctcgatggtctctaggtcttcaattctcgcattccttacctcatctggcaacttgatctcgccgtacttgccccctccgccggagataacgatgagcttgccctttctgtatgcccagactgccttggctacctcctcgtgaacctttgccagctcctcgacgggaacgtcaacaagaacccttatctcgcttccgaactcccgcagaaatctctcccagacaagccttacagctttggtctcgactcctttgccgagaaccatcgctattatctcggcgaggggggcgaggtgcaggtagggcggtctgtccttcggcctctcggtagtgtctgcaagctcaaggattctgtccctcacgcccttctttattctcccgccgcactttgggcacttccagcggaaggctttggcctcttcgagggagtacttggtgtaacagcgagagcatgcggtaaggtggtacttgccgagcctcgggtcgagacctgcgttgaggacgatctttctcccgcgcttcagtatggccttccggatttcttcgaaggtagcttcattaacctcaaagcggttgaactcccttccaagccggtggggcatcggtgagtgggcgtcgctgttgctgaggtatgtaagtttgtggtgggcctttatcatatctgccatctcgctgtcagccgagaggccaagctcgaggaagtgaattttcgctccattgtaggcttccttaagtgaatcatactccttgtagaggcttgtccaaggtgtaaatgcgtgagctgggcctatgagaacgtcgagctcgttggcaatgtccgctatttcggcagccgaaagagtgagatgtggtcttccctcgctctcgatgtcggaagaataaggcttaagcctctccctcatctcgcggacggtttcgatgttcgggaaaataaggacgtggtgaacccttcgggtatcttcaacctcggtcgtgaggaggaacctgatgccgtttctctcgtaggtcccctcgtctaccttttttgtgtatttgagaagctctttctcccagtttgggttgaggatgtctcccgtgccaaccatttcaagccccttgaagcgggcgttttcggccagatttggaatagtcattgccttggagacagcctttgagtagcgcgaatgaatgtgcaggtcggcatcaactatcataaagatcacctcagtctatgtacatcccctcaaggccgcggtagtaggcgcggtatatgtcccttttggtaacaacccccacgagtctcctgttggtaggactctcaacaacggggagaaggttctggtcgtaggccatcagcttttcgaatgccgcctcggccgtttcggttggataggtaacggcgtaggctctgtttaagaacctctcaaccttcagccttttcacggatgatggcttcttcaggatgtccttgatacctattatgcctacgacgttgaggttctcatcaaccacaggaaagcagtcgtgggcggtttcaccaattagatgctcaacgtcgaagagggtcatgtcctttgttacatagacggggtctctgctcattatttccccaactgagattgtctcaagaaccacgggtcttccagtcctgacacggtagccctttctcaggagcttgagggtgtatatggactcgccgttgaggaagaacctcgccgtcaggaagcccatcgttgctgatgtcataactgccggcagaacagcatagctcctcgtcagttcggttaccatgagtatctgcgttatcggggcctgcgtcatcccgctgaagaaggccgccattccagcgagggcataaacagttaggtttggggcaagggagggaaaagccattcccacaagaatcccgaaggccaccccgaacatcgtccctatgtagaggctcggtgcgaagacgcctccgctgtttccagagccaacggtcagtgccgttgcgagcatcttaaccaccccaagggtaagcaggagcccgagggtgagctttccgtagaaggccagctccattccctcatagcctattccaaatatcccatacgttgggaagaacatcccgagaaaaccaactccaaggccgccgattaccggctttaaaagcgggttgatcctcaggtcctcaaaggcgttgaagacgcggtagatgaacctggcgtagaaagccgcgagaactccgaggattatacccagcaggaagaaaaagggaagctcgaggagggtatgcccgaggtttccggggatttcgacctcaaaggccctcttgagtatggcgagtgtgatggcgtttccagtaacagaggagatgaagattgggactaagttaacggagaaggcccccatataaacaacctcaagggcgaacatcgctccagcgagcggggtgttgaaggttcccgctattccagcggccaatccacaggttacgaggagcttcttcatctcctttgaaaggttgaaccacctcgcgaggatcgaagtcaatgccgcacctatgaagcctatcggcccttccctgcccacacttcctccagaaccaatggttatggctgtggcaactatttttgctactgcgaaacggcccggtatgttgcctcccttgaagatgaccgcctcgatgacctccggtattccgtttccccttatgtcaggaaattcaacaatgatgaaggcaacaatgagcgcacccaaagctggaagaagagcatagcccaggtttagctcgcctacctggtaggagactacgggcagaatcttaccgaagaagaaatcatgagtccaggctatcagaactctgaagaggacggcaccgagtcccccaactacccccgccatcagcgagaacccaagcaccgttgcccacttcttgatgtagcgaccgtttgaggttgccatagtatcctaccgatgttggggcttaagcttttatacccaccgccccaactggttttggtgaagactgtgaaagttgaaggatttgtagctgcactcagagaagccgagacgataggcgagctctttaagatactccaggagaaaggcgcccctgttctcgaactggacggcggaaagttcctcatcgtggtggaaggggacttcgagggcagacccttctggaccgagataaacggtgagaaggccaaccaggccctcggcgatgccatgcttaactcatcgagcttcccattcaagtgcaagaagccctacaccggtggaaacgtcatattcgtgaacttcgacgacatagaggtcgagaagttcctggttgcctaccgcgaccccgactacggtatcttctatctcgtcgagaacggcgaagctagggagataacaaaggaggaatacgagaagctccttcccgagatgcccgagttcaaggtaaagggaatgagcgaagaacagatggacatgatgggtgctttctttggatgaaaaagggagaggctcactcagagcctttcagctcctttatcttctcctttgtttcctgtattctcccgaccttctgagcggccttctccgccttcgccttctctatctctgccttgaaagcccatttgaggagcggcggcgttatcagcactgagaccgtgatgaatatcagcgtggccgctataaacttcggagcgtcagttgagggtattgccccgccgtggattgccaccatgaggttaacgagcgctacttcagtccttggaacggagcctatgcccatctggagcgacatccagaagttctcccgcgtgaagaggaagtcccttcccctgccccatgccgttatccacgctccaaagcccctgccgacgatctttccgactatggctatgaccgatagaactgccgcgagggttattgcatcgccgtgctcgaagaccttaaggttgagcatagctccagtgtggacgaagaagaacggaatcaggaggccgtagcctatcgcacggacatcttccataatgcgcttaccttcagggagcttcgagagtatgaggcccatcatgaaggcgccttcgatggccgctgcaaaccacccttcggctaaagccgcgaagaggaacatcataccgatggccatccccaggatgcccttctccacgtgaagcctctccgcgaacctgatgtagtggtcgatgaagtaccatccaagaacgcccgttatgatgaagaaggcaactatcttaatgctcagctcgaagagacttccagtaccaactgcaaagataatgagtgctatgcccaggaagtcgtccatgacgctcgcgctgagggaagctgccccgacctcgctcctcagaacgccgagatccatcatgaccctcactgtcagtcctatgctcgtggctgtcagaaggacgccgccggcgaaggcctccctgctcgggtagcccattgccatgagcgcccaccagccaagaacgagcggaacgaagactccgagaacggtggaaaccgtcgccgtgaggccagtcttcttgagctgttctatgtccgcgtcaagagcgcctaagaagagcaggaagattatgccgagcttcgccagaaactcagcgatctgatttaagacggactcatagcccattccgctgacaatgggcagataatcgggagcaacgtaaccgaagtaaacgaggttgccgaggatcatacccattataagttcgccgaggactccggggagctcaaagcgctctattatgctgtcgccgattttggccaggattagggcgatgcctatagttgctagaagccacgctaccccttccattgggcaccacccaccctgagcagcctgaggaactcgtctatcagaattctcaggcttatctcgccgaccagcctctctccttcgaccactgccagaacttgggccttgtagcgcctcatcttgatgagtgcatcgagaaccgttgcctcttcctcaatcgttagagggtgcctgtctgcgacgtcctcagccttggtcgcaccgccgagaagggacctcatgcttctgctcgtcattccgagcttgaacctgtgagactctggtgggagaagaatgtcaatgacgtccatgtagcggatgactccgacgagcttcatactctccctgtccttcacgacccagacgtggtgcctcgtcctaaggagcttgaggacgttgaggaggtcagaatcagcggttacgatgggcattgtatcgagcctaggcattatctcagagactttgagcgagtgaaacttttcaagggccgcttcgacatccatatgcttcaccgggcgtaagatttgaaaaagtcctcttaagggtttctgaacggtgaaaagcagaagagcatagaaaaatgcattttttcacggtgatggatactgaaaaaagaacgcagaaggctcagcgcccgaattttgccattgcaccaatggagtagaagaggagctttgcagccgtcaatgccgtcggatcgccgagcttttcacctgcaacctccattatgtcaaagcccgctatctccttcttctcgaccagccattctattgcctccactacctcccagaaccttaaacctcccgcctcaggagtgcccgttgagggcaccatagagaggtcaaagacgtcgatgtcgattgagaggtaaaccggttcgggaagggcctctacgaggtcaacgaaggcgtcaaagctgtagtccctcgcgtgcacccacgggatatccctctcccttgcaaaatcgacttcctctttggtgccactcctgattccgaatatcgcttcctttacccctagctcgctgatccgcctcgcgacgcaggcatggttgtaggggttgtcttcgtagctgttgcgcaggtcgaggtgggcgtcgaagacgacgtagcttgctggcttcagtgcttcaactgctccaagcgtctgggaatgttctccgcctaggaggattggaatagcctttgggtttgccttcttgagctcttcaagggtttcccttaccctgtctgccgttttcctcgggtctcctgcgacgacggcaatgtctccgatgtcggctattgggagctccgctatgtcaaggtcgtagtctaggatgtagctctcaaggttcagagtcgcctgccttattagggtcggcccgaagcgtgccccagctttgtagctcgtagtcccgtcgaagggaacccccagcaggatgaacctggctttctcgggttctacgagcgggaactccagcttgagagtctcatacgtgtacaggaactccattctctcacctaaaggcaaaaatagaagagggcttaaaagccttcacctgactatcatcacgggaggctttatcacccccacaacgtcctcgaggagagagcctatcctcgtctttccgctctttccgtacgcacccatcacgacaagggagtacttcccgctgtttgcctcctcaaggactttctcgcgggcgtttccttcgacaatcctgaaggagcagttgataccctccctctgtccgagctccagaagggcggagataacgtcgtggatgcccttcttcatctccttccaggcagtttcctcgaacttcttgagcttttcaacgtcgccgcttctcattgcgaggcttaccgctatcgcctgcgcctccttcctgtccaggacggagaacagtaccaccttagctccctttttcttcgccaccgaaaacgcatgaagggctgccttttggctccactttgagccatccacgagcacgagtatcctcatatccaccacctcacaacccaacgtacctcaaccagattatagccgtccctatggccacggtcgttaccataatggtcattccaaccttcaggaagtcgttgaacgttattctcacgccctcgcggtgggctatacctatgacgacgacgttcgcgctggcacctatggcagtaccattccctccgaggcacgctcccagtgagagcgcccaccagagcgggtaggggttcatgtgattacccattgcctttatcagcggtatcatagtcgctgtgaatgggatgttgtcaactattgcacttgagaacgctgagaaccacgaaattatcaggactgcctcgccctcgctgtggatgtgactaaccatccagttggcgacctgggtgatcagacccgtctcaactagggagccaacgattatgaacaggccgccgaagaagaagagcgtcgcccactcgactttctcaagtgcgtgttcaggtgacgctctgctccagaggagcagtattgaggctcctgtgagggctataacagcaggctcaacaccaagtttgtcgtggaagaagaatccaatgacgacaccaatgagcactgttatggactttctgaaaagtgagggatccctgatggcatccctttcgtccagcgacattatagtcatcttaattgcttcttcgttttccttgtgagagttcatctcggcgcggtaagcgaggtagataattccaatggtcgcaaagaggtcaacgagagctatgggtcccatgttgaggatgaactcgttgaagctgaggttagctgcggagcctatcataatgttgggcgggtcaccgatgagcgtcgcggttccgccgatgttcgaggcaaacacctccgagagcagaaacggtattgggttcacacccattttcttggttatatacaggagcattggcgtcaggaggagaaccgtcgtaacgttgtcgagaaacgcgctgacgacggccgtcaccaccgagaacagaaggaggactttcatcgggcttccctttgagagtttggcggtttttatggctatgtactcaaacagtccgctctccctggctacgttcacgacgaccatcattcccgcaaggaggagtatcgtgtcgaggtcaagatactccggcactttctcccacggaactatcttaatcaggagcaccagcgatgccccgaccattgccgctaccgtgcggtgaattctctcgctcattatgagcccatagacgcctatgaatatcgcaagtgctatcagctccattggctccattttcatcacctcagtagagaacaacgggcttttcaacgtgctggactatcctaaagacaacgggacttacgcggtgtgttctcgtcgtctcggagccgtagtgacgggagattacgagtaagtcgtatttcttggcaataccctcaacgtactcagccttgtccccgaaggctattttcctgctaaacttgatgttcagatcgcccagcttttcttcaacctctttgaggaaagtctcggcaaatgccatctccttttttctgaattcctcggcagcttcttctccgagtgtttcacgtatcattttgagaacgccctcgtcgattacgtaaactatccggacagccgcttcttcgaacgctgagagtgtctcgtggacttcctctggaactttttcagagaacctgtcaaaaacgagcagtatggagtttatttctggaatcactagctcctcctcggttaaaaagaagttctcgtaggccttgagtatttcctcataccttgtgccggctatgttgttaaactttctgagtattacatcgtgaagccagcccataactacccccagctgggggagaaaaggccctcttaaatgagtttcgtttcaagttaaaacccaaggggtgtgaaagaaaaacagaaaggatcactcgcccctgatcttctttatctgaattctaccgagggtctcccagtactcgacggttattccctcggtgagctggcccttgacctcgtcgtcgacgccgccctcgatcgggacgtcgaaggtctcgtaggtctccatgtccatgagctggacggtatcgggggttatggcaatgatctgaccgacgcgcttgtcgatgatcgggacgtcaacttcggcgctggtcggcttgacgatgctcctgaccttgccgtcgaagatgccgacggcctcgatcctggccttggcggaaccgtgcttgcccggtgaggagaccgtaacgttgacgatcctgcacggctcaccgtctataattatgtacctgcccggcttgagcttgctgacctgaaccttagtcttgtctcccatctcacatacctcccataagcgttctggtttgcataggaaggggcatttaaaaaatttttgaaaaggggagctacctttgtcttccgcttctgagaagcatactattaaatgccacgggcactagcagtatcaggccggtaatggccgcgagtttcatggcaaagatcccggtaagggaatagtaaagggagccaagccctatcacgagcattactgcggctccgagggcagtcaggagcttttcatgggattggaggctcttgagggagggatatgcctcgatagcagccaagattcccacgatactgaacgggaggaagatgaataccttaaataatgcctcgttccacatggcaagggaaatcgccaggctcaggactgagaccgttgctagggcgtttcttctgtttgtctggacgacttctgccgtcatctgagcacccatctctataaggactattaccgttgtgaagcctgccatgtatagagatatcaggagggagtataccattagtttggcttttgggaggacgtcaaggagaatggagggtattaagtagaatgcctggattgactcgtgaacggagactgatggattcccagtgtatgatttcaatgtctggaattcccgatagagcctgaatacctcttctggggatgcgttgggattgcgaacggcgtcttcaaaggcctggaaggaggccccaagggagtaagctacagtgtacgaggctgcaatgcccaagatcagctgaaggacaaagactcccaacaggactctctccacgttcagttcttctggagaaaagcttcctatgacgtaatagacgccggctcccaaaccaaacgccagcaggatcccagagaagaatgtagccaacccctgtatgtttaggggcgaatcaaacgaccacatactcgagagcacatgatccatgtatagctttgcctgctttgagactatcaccgatgaggcctcgttgcgtattagaaagacagagacaagtgttaggactataaccaagactgagagaaccgctaagagttcgacagttctgccctttgcgagaagcaggaggagtgcggctattaggattgtcaggatcgccagggggactatgaagctgctatcctgcccgagaaggaatatcattgcccatccagagagatacgccgtgattccagcaactatgacaaggaacagaacgaacgttatcatcaggcctggagtacgcgagaccttgaacataaactcataaggtaaataccttgtccttttggtactttcagtctcagagcggattaatacgaggactgcaagggagactaatgcccctatcagtattcctttgagaccgaagattatgttgtacttgggaagaaggacgtagttcagtactcctataatataacctgttatcaacagcgccatcagagtgttaatcctcttcatttttcatcacctctacggtagagcgatttgaattgacaatacatgtatcgattgaattaaaagataaaagctttttggaactgaaaattggggagcttaaaacttgtggatactcaattccacgttcaaagtcccagggcagcctcaaagtttacgatgacttcgcttactaccgtccatgccattagaggctcacgatacaggctgactttcgtcccctcaataggcctcatgaagtcgccgtggggaaaacctccgactacaacgacggggttctggtgggaagccaagatctctccgaacgacctgggccttattagctccccttcctcgtgcattatgaagaccgtatcagggtttatatcttcaatcaaagattcaagcggtttcttttctatcctcaaaagctctagcccttccggaacggcacccttcttaaagaggctctccatgagacccaggaatctgttgtagttccttggaagccgtgtttcgggctttatgtgtatcacttcatcgtttctcgtgtggacatagacccgcaggaagccctctttgttcgctatactttcgagggcgttgaggaggcagatgtggactatatctggccttccgcgcctgtcgccgtccgggagcttcttcagtgccgcgtggtggtaggtgctgtccagtatcgcctcttctggcctcttcttccgtcttcttgcgtagttcacgactgccggatggtctctaatgctctccggaaccagctcaagctccgcctcagctattatcaggtgaagcatttccctccacctcctctaacgttattcccctctcacggatctcaccaactattctggagaatgtgtctatccgcattcccagtatctcaggtggtattacaccgtaaatgcagcttccctctgccactatcctggctattatcgcggctgtgaagcccgtgaccctgctcattgaggtgaaaccatctttttcctcatcgtacagaaggtaggacattctctttctctctccattctcaacgccttctccctcaaccagcattatcgagaagtccggactttcaaagctcatgaggggagatatgaccttcagtgtgaagtcaaggttctcttccctgaagaatcccagctcgcggagaaccctcatcttttcaaggtgacccggccagcggagagtccactcctcaagggtttcggcccttacactttccagcaggcttctcagaccgtcgcttacgaaggcctcgaactccatgccgtttatgttgacttccctgatttcacccagtgggtccactgtagtaacggcaccgttcctgataaccctcgccggcctagtgtattcttcaattaaatctttaggtgaccatgtaattctgtaataaagtggtggctttggatccttgggcaggcctcccacccatatccttccttcctcaagagtatcaagctgattccagattctgcccattagaatgtgacttaaccccggtgcaaagccagcgtcaaagataacagtcacgttcgccttttcggctccctctttcaactcaagcgggttttcgggcatgaaggaaacgtcaaccatatcaacgcctgccttgatggccgctttgattgacccgtagccaaacctcccgggcagggtgccaacaacgaggtcaaagctcttcatgacctcgactagttcttcgaagttggccgcgttaaccttcaggggagtggcgaactccccaactgccttcagcttctcgccgtctatatctccgacgtaaacctcgaactcatctctcaaatcccaagcaacggcccttccaacgttgcccgcacccagaactagaaccttcatcctatcaccatcctgacttatggaagcatgccttataaggtctcccgacgtatattgaagagaagcagtaaaaaggtgccgtgcccgctatgcttgagttccttcggagaaagcgccttcgaagagagaacgaagatgaaaaggccctactccacataagcgacacacctgagagggcttaccccaggatagcgcagcttatagatgagcttcatcctgagtacatagtccacactggagacctcgttgacaacataaagcttgagagaagacctgacctgaaacctctctacgtgggcggagtcagaaagcttgcgagaattttgaaaggctcaggggctgagctttacgttgtccccggcaacgaggacgatctggaaattctgaaagagtacttcgagggttcagtggtggaacctggcacggtcgttgagatagagggggtaaagtttgcacttggccataaaccggaagaagttgcgagattggatgcagatttcagactctacgggcacaacttcgaagtgataccaggagggctaaacggcctcagaagtatcaacatcgtctttcttccctcaaggcgggttgtaaagataggctatcccccgggcaccgatactcaccggggttacaagctctggaggggattgtgatgaggtttatgcggtttggcccttcaatcctgtttttgaggactcctcactctgaggcggtcagcgaggacatcacgaagatattcggggctaagccaattccaactgatcgggcgataaaggagagcagtgagtttgaaactttgctcttcgtcaccttcgaatggcagaaggagacgataccacccgagttggggtttttaatcagggactcagcccgctctgttttggcggccatcataaacaacggccttccaatagagaaagtccacgtggagagtacgataatattccttagagtccctgaaaaagtagaagaagccctaaagttcctgtctgaagagctcaacggcgaggtaatgtcccttagggatgccctggacgaaggcgaggcgagggacaccgttatagctgtgacaagaaaaaggctctcctgtcctctcgggcctgaggaagttgagggtgcagtcctcgtcagggagcacttcctgaaggtctaccgccgcttgagcatagaggccccgatgctcctcctcaagctgatgccggagtggaacgaaatcacgataaaaatttacgacacggagaagaggtacgaagagaacatcgcaaggctcatgatggttctcgaagaccttgacctaggcttcgtcgttggcgagggctgggactgggactatccgaggccgttcatgcgcgttccggtttacaagctcaagctcctgacctgggaagaccctgtaaaggtgaagttcttcctgaagggcctcgaatacagggactacaagaggttctgcgacatagacgtcttcgtggaagggaagaaaatagactggataaagctcggaaagttcgactcgaagttcgagctggcgaaggcagctagggaagagctggagaaacacctgagcgaggacgtgaagaaaaggctgcacgagatcgaggaaaagcttctgaaggaagccgagaatgaaaagggttagagcttcttaatcttcgcaacgaagaagccgctcgtcccgtgcctgtccgggtagaagcgcctcgccttctttatttcctcgctcagctcgatgccgaatggcttcgtcaaagccggctcaccgtatctaagcggaaggagttcaacctcaaagttgtccagaacccattggattacgaactcgttctcctctggttcaagggagcaggtggagtaaaccagaacgccacccttcttcagaacgctcaggcccttctcaaggagcttcatctggagcccctggcagaacttcacgtcttccattgtcctgttggcttttctctcggggttcttgtggatagttccggaacctgtgcagggcgcatcgaggaggattttgtcgaactcgacgccgagctcgtctatgtggagcgacgagctgtggaagagtatggtgttagtaacgcccagcctcgacagattgagcctcgtctccctcagcctgtcctcgccgacatcgaaggcgtagattatccccccgttctccatcagctgggccatgtaagaggtcttcccgccgggggcggcggccatgtcggcgacgacttcacctggtttgggcccgagggcaacgggaggatacatcgagctcgcttcctggatgtagagtaagccgcttagatattcgggagttgaggttatcgagaagggttccctcgtgaggcagaagccctccctcgcccagggaactctcttaaactgaaagcccttcttgttgaggagcttagttagtttgtgaacctcgatgcggagcgtgttaacgcggaagcacctcggaagaggcctttccatcgcctcggctatcgctaaagccctctcaccccagagctggtaatagcgctccgcgaaggtctttgagtagccgaggctgaagagacgttcgagcatgtttgggagttagggaattgatttaaaaggttcgccgtttgcaatgcctacaactcgaagagaccttcctctgcatggtaacaagtgcaaagacaaatggagaaaagagtccaaaatcacaccttaatcccgcccatgacgagggccataactgccttctgggcgtggagcctgttctcggcctggtcgaagacgacgctgttcgggctgtctatgacatcatcggtgacttcttctcccctgtgggccgggaggcagtgcatgaagatgtagtcgggcttggcgtgctttacaagctccttgttgacctggaagggcatgaatatctttctcctctcctcggcctcggcctcctgtcccatgctagcccagacgtcggtgtagatgacgtccgcatccttgacagcctgaacagggtcgtggaggagctcgaagcttccgccgctttcggccgcgttctgctcggcccacttgattaccttcgggtctggctcgtatccctctggggtggcaacgacaacgttggcaccgagcttggttccggctatcatgagggagtgggcgacgttgtttccgtcaccgacgtagacaatcttaagtccctgaatcctgcccttcttctcgaggatggtctggtagtcagctagggcctggcacgggtgtgagaagtccgagaggccgtttatgacagggacgctcgcgtacttggcgaggtcctcaacgtccttgtggtcgaaaaccctagccattattccatcgacgtacctgctgagaacccttgccgtgtcggctatggtctcacccctcctgagctggaggtcctgggcgttgaggtagaggccgtagccgccgagctggtagattccgacctcaaaggaaatcctcgtcctcgtcgagggcttctggaatatcatggcgagggtcttgccctcaagaacgcggtgcggctttccaatcttgttccagatcttcatcatctcggcagtcttgagaatagtctcaagctcctccctcgtgaagtcctggaggcagagaacatctcttcctgcaaggctaaccaccatgtgcatcaccgtatagaactgtggagcgagtttaataaccctttcgtcggaaaaggggctcggggagcgaaagggagttgggggagaagaaagacaactttacaaacgcaaagttttatcagtatggcagaatgctggctcaatcttggggcttatgctcactgaactacactctcctcggagattgtcccaactagaacggggtagaagatataaagaagtactacatctcactgcaggtgggcaggatggacaatggaataagggtaaagcttgtcaattatacaaaaaaacctcttgaaactgtcacatgggcggctctcataagctactgggatgaatgggaaactgagaccttcgggagaatgagcgacaaggacgttgagatgcaccttccgagggttctaggttatgggcacgagagtatcctcgagcacgcgacgctgaccttcgccatagagggatgttcccgtgtttgttcgcaccaacttgttcgtcataggcttgcttcttatacccagcagtcacagcgttatatcgtgttgaaccctgaagacgttgaggagacctttgtcattccaagtgggataaaagaagacccggagcttcttgctgagtggaaggaactcatgaaaaaatccatcgagctctataaaaagagtgttgagcgcggtcagcatcaggaagacgcgcgttttatccttccccaagctgtcaggacgaagatagtcgtcacgatgaacctccgggagctgaagcactttctgggactcagggcctgcgagagggcgcagtgggagataagggaagtggcctggaaaatgctcgaggagattgcaaagaacgacgagctcagaccgataataaagtgggcgaagctcgggccaaggtgtgtccagctcggctactgccctgagggagaactgatgcccccgggatgctggaagaggacaggggaaaagtggaaaacgctttttgagggttagaaacctttggttttagaaacggttttatttctcttctctaatgcccctccggtgatggccgttgaaatcacggagatgggaagtggaagttaacgtcgattgggacgtccttaaaactatcctgagcgagccgaaaaagacactgctgttcttcccgtactttaaggaattcgacggacaaaaagtcagatttgaagtgcctaggttcatattcaattttggctatgagtttgagttagacgttgggtttgggaacagcgaggcgatatataccttcagaggggagcggggaatactcacagtgacctttaaagtccagaacggccgtctcaaggtaaccgcagattgggcgggttttggagaggccctgatgggcaagcccttggagatttttgccagcgggatagcggaggcagttcaagagttctgcacctcccttaaatgtcccgtggttaaggtgtccgaggaagggggagaagttaccaggataacccctgatagtgcacctgctctcttaaagagacttgcgcttgagttcggtaccagcttcatggtagaaggaaccgcggatgacgggacttacctggcagcaaaggtagttaacggaaagctggttgaacttcgtctaaaacagggaacaagggaatccgtgataagcaccgatgtcagcgtggttgaactggatgagggtctgtttgaagacttacccttggacagaagcttcaaaataaaagtgagagagctcactccttgagaacttcgtctatcgcctttttcagctcctcgtaggcttcctgcagggactctgggatgaccttcgtgtccgctatgaccggcatgaagttggtgtccccgttccagcgcgggacgatgtgaaggtggacgtggtcgtctatccccgctccggccactcttccaaggttcacgccgaggttgaagccatcagggttcatggccttctttattgcctttatcatgagctgggagagcttcattatttccaaaagctcttcatctgtcaggtcttcccatctcccgacgtgcctgtatggagccaccatgacgtggccggggttgtagggatagttgttcattatcacgaaagcatgcttcccgcggtagaggatgagcctttctttatcccggttctccttcgggaagtcgcagaatatacagccctcatgcttgggtgagcgtatgtactcgattctccaaggtgcccacaggactttcattttctcacctccagcgggagaaagagggggaacttaaaagcttaactagagcttcgcccccgaaaacagcagaacgagataggccgcatagaggatcaggaagtaaaaccctatccttctgtcgaggccgccagagcgcttcagttcagctatcattgggagcatggccatgaggacgagcacgatggttagggtcgatgcaccggtcgggattggccttatcagtgaggccagcccaagaactacgagggcgttcattatgttcgccccaattatgttgccgacgcttatgcttccgcgctcccttattgccccgtaaagggcgttcgtcatctcgggcagggaggtgccgatggcaacaatggtggcacctatgacgtactccgccaccccaagggcctcggcgatgtttctgccgccgtaaacgacgagcctcgccccaataaccattaagccaccatatatgaggagtaagacgtagtcgagggccgttgcctttgtgtgacgttcagctccactttcgcgtccctttctgaagtgcttcttgtagagccaccgcaggtacagggcgtaagctacgagaaggagggcaccgtcaagccttgaaagggtgccatcaacggagagcaacatgaggaacccgagagaagcaagcatgacgagggaattctcataagctccgctaccagcttttagaggtcttatcactgacgcaaggccgagaatgagtgctatgttggcgaagatgcttccgagggcgttgccgagggctataccctcggccttagtgatgcttgccatcgcactggttgttatctccggcagcgtcgttgcgaggcttatgactacaaggcttataattaggggggaaacccccgccttttcggcgacctctacgattttatccgagagcctgtctccaaagacaacgaggagtattattccgataactattgaacctgcccacaccagcatttccactttctctcaccggcgggagatttgaaagggtgttcataaagttttatccaacaaacctttaaaccccatgccttaatcaccaaaggtgatagatatgaagaagagaaagggacttctcataatcctggacggtctaggggacaggccgataaaagagttcggcggaaaaacgccgcttgagtacgctaacacccccaacatggacagactcgccaagatgggaatactcggtcagcaggatccgataaaacccggccagccggccggaagcgataccgctcacctctcaatattcggctacgacccctacaaggtctaccgcggaaggggattcctcgaggcccttggcgttggactcgacctcaacgaggacgatctggccttccgcgttaacttcgccaccatcgagaacggaatcataaccgacaggcgcgctggaaggataagcactgaggaggcccacgagcttgctaaggccgttcaggagaacgtcaagctcccggttgacttcatattcgtcggcgcgaccggccacagggccgtcctcgtcctcaggggcatggcgaagggctaccgcgtaggggaaaacgacccgcacgaggccggaaagccgccgcaggagttcacctgggaggacgaggagagcaagaaggtcgccgaaatcctcgaggagtttgtccagaaggcccacgaggttctcgacaagcatccgatcaacgagaagcgcaggaaggagggcaagccgccagcaaactacctcctcatccgcggtgctggaacttacccggacataccgatgaagttcaccgagcagtggaaggtcaaggccggggccgttatagccgtctcgctcgtcaagggcgttgccagggcgataggcttcgacgtctacactccggagggagcaactggcgagtacaacaccgatgtgatggccaaagccaagaagaccgttgagctgctcaaggactacgacttcgtgttcctccacttcaagccgaccgacgctgctggccacgacaacaacccgaagctcaaggccgagatgatagagaaggccgacagaatgataggctacatccttgagcacatcgaccttgaggatgtggtcatagcgataaccggcgaccactcgacaccgtgcgaggttatgaaccacagcggcgacccggttccgctcctcatcgctggcggcggagtcagaccagaccacaccgagagcttcggcgagagggagtgcatgcgcggcggaatcggcaggataaagggccacgacatagtgcccataatgatggatcttatgaacagaagcgagaagttcggtgcgtgatttccttttttctgttcttaaaacttcttttgccggaataaaaagaagaaagaattcagccctcaacggggcaggtgacgggctggaagttgtagccgtaggcctctggatggatgaagtaggagagctcctcaagggcctcgacgagcctcggccccggccttgatatggcgttgtcgtcgctgacaaagtatatcctgccgttctttacggcatctgtgtccgcgagcgggctgttgcagatgtcgtcaatggtggctcccgcgtgggccgataggattattatctccgggtttctggcgacggcctcttcaaggctgacctgggcccagctagtagcgtcgtggaagacgttctcaccgccggcgagttcgatgagtgagtcctggaaggtgccgttgcccgggacgtaaagcggattccaccagcttatgaagagaaccttcggcctcgtcttatttgaaacgcggaactgaacgtcggcaacctcggccttcatgaactcgaccactccttcggccctttcgctctggttaagaaccttcccaaggagttcaacggcttcgtaaacttcatccatgttcttagggtcgagtattatgaccggcgctatcttctcaagctggtcgaggtactgtaggtgcatcgaagtgcctattatcaagtcaggttcgagagaagctatcacctcgatgttcgggtcgctgaagccccctattattttcctgccctcctgaactccagggggatagtcgtcaaacttggtaactcctatgaccctgtcgagggctccgaggaagtagagggtctcggtgatgctcggggcgagtgaaactatcctcttcggctccttctcgatggttacgtttctgcccgcgaagtcagtgatggttagaggatagtagggcttggccttcgggcactcgcaggattttgtggcagtttcagtcggcgtctgggtcgaactgggggtggtgctaagggtcgcactcggtgtggaagtgctctgggtctggctcggggtcgttgagcttcccgagcctcctatgcacccgctcacgaagacgatggccactaaaagaagcgctccaaagagcttggtcttcttcatttttatcacctggattatttgtccggctgtgggtagacttgaggcttaaaaagttattggataaaacggccaaagattgggatggctctagggggaaatttccaacaacgcccgaactaaggcatcgttttcctcaggcttcctgaccgaaaatcggacatattgcggaaggccaaagctcgtgcagtctctcacgagcatcccctttctcttcagctcctcaactgtctttttggcatctctaacgtactttatgaagaagttcgcatcgctcttgactccaagggctttctcaatccgcctcttctcccgccagattaagggcatcgtcccctttaagtgctggaacctgtcctccagcaggaactcaaggaaggcaacaccaaccgatcctatcgcccacggcattctgacgctcctgaaagcttctggaaaacccgccacgtagccgacccttatccccggcaggccgtagctcttcgtgaacgtcctcagctttacgatgttctccccactggggctttcgggactttcaacgaagtcgatgaaggcctcgtcgaggacgagtaaagcgtttctgtcctcaacggcatccaagaggggtcccaactcctttttcccgtagaacctcccgtccgggttgtttggattacagaagaagacaactgaatctctctcaacaagctgggaaagctcttcggggtcgttcggacctttgacgaccctcgctccaaaaattctcgcaactctctcgtactcgccgtaggtgtgggctggcactatcaccctcctgcccctcagcgcgaggattccaaggaggtagagggcctcggttattcctgcagttacggtgatcggttcgcccacaagctcagcgagaccctcctcaagctcttcatagtagggatagtggccgcttatctctctggccctttcgaacatctcatccagccactcgggcggatagggattcagggaagccgagaagtctatcaaaccttcctcttttctccttgccccgccatggtatgcggagaactctacaggcttaagcatggacatacccccgttgcgagcagtaataccacaactataacccacccagttacaaccagccagtaaattctcaaagctcgttttatgtcctcgtttttcggctctttccctggaaagcggtaaactccgggcttttcgagccaaacgccaaggaccgcgctcatcgccgccattggcttgtcggagtttatcttgaaccttgccagcctgtagtactcaggaactttcctcccgccgaggggaaggtagagaagaacggtcagccgggcaggaatgaagttcaaagcatcgtcgagcctcgctgagaacttgccgaaaaactcgtagcgctcgttccggtagccgagcatagcgtcgagagtgtttacggctcggtaaatcaccgctccctgaagtccaaaaaggaggaagtagaagagaggagccacaacggagtcgttcagattctccgcgaggctctctatggcggcggagtttagatgggcctcgtcgaggacttttgtgttcctgctcactatcattgagactgcccttctcttttcctcgatatcatccgttatcgtcctcgaaacgtgctcgtggaggctttttatggcaaaggaactcttgaggagatacgccgctaggaaatagtttaagggaaagggcgcgtaaaacggcacgatcgagagcagaaacgcgaaggtgattacaaccagtgcagtgagaaggccggcagtgaaatcaaggactggagagcgccttttgtagcgggagtcgataaagccagctatcctcccgaaccagactacgggatggagctttgcaggaggttcaccaagggttaagtcccacgcgagtgccaggagaaagggaactaaagcgtgcatcctgaggactcctcccgttggttactgctacacagtttttgctcatgggcgcaatggataaaaactccatggggtttatagctttggtggtgaccatggaaaccaaaaggtgtcccatgtgcggtggaacgatggtaaagggcaaaaactaccaagccggatacgctcgatacttctgggaggcgccctggaagcacggccttagagatgccataaaaggccctactcacgcatatccttggctctgccttgattgtggggccgtgattccctacgtagatgaaaaggagctccagaaaatacgagaggaatatgagagggttaaactggaggggaggctttgaggggagtcgcgttcttctcgggtggcaaggacgggctttatgccctccacttagctgagaaaaaaggaatagtggtgccctacctcctcacgctcaaaaccacgataggcctctcccctcactgggaaaatctagaggcgctaaagacgctggcaactgccatgggaaaggagatgctcacttttgacatgaaagaggggagcgatgccctggcagagttcataggctccattggagttgactacctcatagctggagacgtttacctcgaagaccacctgaggtgggtaaagcttcttgccgagaaagcgggcataaaaccgctcgaacccctctgggggaggaacactagagaactcgctgaggagatgctggaagcgggctttaagtgggctataatagccgtgaacaaagaaaagctcgggagggagtggttaggctacatcttccgctcggttgaggatttggagaagttcctggaagcgaaccccagtgtgaccccgtcggggaagcaggggagtttcacacggtcgttttggaagctcccctctttgaagaaaggttcggcatcgaagtgaagttcgttgaagagagcgagcggtacctgtgggcgaggtttgggttgagaaagacataataacgttataggtgttaggcgtattgaggtgaggattatgggggcgtccgagatcgtcatacggatcaaggtacctcccgagtgggaggggatgtccgaggccattagggaaaaggtgatccttgaggtctcccaggagatacagcggaggattgaggaggcaagaaagtttgaggagatcctgaaaaaagctcaaccagatgaagaaggactcaaaaagctcgaagaggagataaaagagtcaatagcccggagatacggggcggtatgaatggagcttgtgctcgatttcaacgtcatcttctcggcactccacggaagaggcgttgcctacaggatttttatggagaaccacgtccttgagaggttccgattcttgattccagcctatttatgggaagagcttgactccaagcgcgaaagaatatcgaggctcacgcatttgagtgaagacgaagttgcctacgtgctttcgattatacggagacagactgtcgtaattcccgaaaacatagtccttcaagggatggaaaaggccagggaaatttgtcctgatccaaaagacatcccatatgtagccctcgctctggcactcaacgtcccgcttctcacgggagacaagaagcttgcgaaatctgttggcggatatatcaaggtttacactcccagagaagttttgaacttcctcgaaggcaggtctgagctatgaacgctcaagaactcctccaaaagctcgaatccaaaggagtaaccctggaggcgatgctcgacacggccatggagctctacatcggagaggaaaaagaagccgccagagaaaagctcagaggtttgatgctccgttacttaaacgatatcaacgtccaggcccttttgatggccgccctgcttctcgaagaaggtttcaaagttgagggcgaccccgtgaacctcgtggctgatgaactcatcgggataaacctagcggagtacatcggcggaaagatggcgctcttcaacttcttctactacgacacgaggaagcccggaattctggctgaacttccaccgttcctcgatgatgccatcggcgggtttatagctggctgcatgacaaagctgttcgagggagaattatgaggaacatcctgccctttctcacgagaatccctgtcaaaggagattttgaaaaggcccgaaacgagctttgggccttcccactcgtggcactggttagctcggcccttccaacccttatcctgtatctcggacttcctctctctaatttgcttgcggttctcgccctctactggacgatcggtctcctccaccttgatggtttggcagactgggccgacggaataatggccaaaggcgacagggagaggaaaattgaggttatgaaggacgtgaacacgggtatagcggggctttttgcggtcgtgatagtcctcctccttcaagtttattccctccagcttctcccgttctacgcgctctttctggcggagctgaattccaaatacgcaatgttgttggctctagcaactaaacggccccttggaaaaggattgggtgcgtacttcatggaggggatgaacggaagacagctggcactcgggacgctcctctatgttttgttgggcctttcagttgtcctgtttgagccgagagccctagccggaatcctcgggctcctctttggagtccatatcattaggatctctctgaagaacttcgacggtttgaacggggactgcctcggggctactgcggagataacgcgcgctggaacactcgtggttatggcgctggtgtggtggtatctgtgataatcatcctcgcgggaggcaagtccacacgcatgggcaaggaaaagcccgttctgaaaatagccggcaaagagatgctcctctgggtttacgcttccgcttcccgggttgatgagaccattgtggccctctcaaaaaacacgccgaagacaagggagctgtgccttcgcgaggggatccccttcatggagacccctgggaaaggctatgtcgaggacgttcagtggcttttaaatgagttcggaccgtttataagctcctcatcggatattcccttcgtaaagccgagcgatttctatgccgttaaaaaggccttcaacgggaaaacgagcctgaccggagttttgcctatacagaaagtcccaaaagaccttaagccactcgtttatcggggctacgcaatagtgggcctcaacgcggttggcttcgagggggagggattctttgagcttgagaacccgcttttggccctgaacgtcaacacgccggaggatttaaagctcgcggagaggatagcgaggcttgtgagaaaagttatatttgggtgggaagacctaacaacgggacggtgatggtatggtagagattgcccgtttaggtgtcttccctattcggaaagtgttttccagggaagaggagttcagtaactggcttgttgagaacattaaaattctcgaagaaaaaataggagtagaactcgaagacattgagagggaataccagattggaagctattttgcggatatagttgcgagggatgccaatagcgagggaatggtaatcatagagaatcagttcgaaaaaaccaatcatgatcacctcggaaaaatactcacttatgcatcgggattagatgcaaaaatcatagtgtggatagccgagaagttttcagaagagcataaacaggcactaaactggcttaacgagaacactggccaggatatcggattctttggaattgaagtgaaggctgtgaaaatcggagactccccctatgcggttgacttcgatatcgtcgtaatgcccaatcagtggaggaaaatcagtaagagtgccattgaacgattgggacccagggaagagacttatctagatatctggagaagagtcctggagagatacggcaaaaaccttaggccacggccaagatacagattcgtgtttggtagtggcgtctctgatgttccctacgagtggcgtatatgggaatacaaattttcaattggagtctatataggaaagccctctcccgaggagaacgaacggatacaggaatgtcttcaggaacgtattgacgaaatagcaagggcaatgaatgtaccaatcgaagagatcaagtgggaggaaccatacggaactactagaggatcaaagaggttgtgcatctactaccccctcacgaagtccctattcgagatgagcgaaaaagaaagggaagccctagcagaaagaatggcatctgagatgaaaaaactggaaaaagctacgaagaaaattctccatcggtgtcgctaaagcccaagtctctggattatgtactcgacatcaacgctctccctcacaacccgggtaaacttctctatctcctcttcgatgctccactcctcgaccttaacaggctcaaggcccttctcggctctcagcatgttgagaaatctctccgtgaaggcgaagttgtggaagattccgtggaggtatgtgccgaaggccctcttgcctatcgctccctcaggctcgaaggctctggccccgtttattgaggttattaccgagaaaggcttttcagaagttgagcgccccattcttatctcgtagccctcaacccacataccccttgcgggttcccaaagcacttcagcctttagatggttggttctcttctcccctgtaaagacagttttggctggcagaaggccgatgccttctactcttcccctcttcgactcgacctcatcgattatctcctttccaagcatttggaagccgccgcatatgccaacgacgaaggaaccttcgcggtgagcctcgattatcgcgtcctcgattccgttctccctcatccagagcagatcctctaccgtgttcttgctcccggggactattatgaggtcgccctttatttcctcggccctcgttacgtagtccacgccgttagcccagtggaggggttcaaagtcagtgaagttgcttatgtgggggagcttgattatctgaatgtggaggtcgcccctaaccttcgggaactcggcgagcgagtcctcctcgggcaggcgatgctcgatgtacggaacaacaccgagaacgggctttccgcagcgcttttcgaggaactcgaagccgggcttcaggagggaagcgtcgccccggaacttgttgaatatgaagcccataacgagctcccgctcttcctcacttaaaagctccatagtcccgactatctgggcgaagctcccgcccctgtctatgtcggccaccaagatgacgggggcattaacggcttttgccacgcgcatgttggctatgtcgtagtccttcaggtttatctcaacgggagagccagcgccctcgattataacgaggtcgtgctctctcattagctccttcaaaacctcgatggccttttcaaaaagctcagccttctttgagagcatgtagtcccttgccgagacgctcccaatcggcctgcccatgaagacgacctggcttctcatgttgccctcgggcttgaggaggatgggattgaacttcacgctcggcttttttctgcacgcgagcgcctggaggtactgggcgcggcttatctctcccccctcgatgcttggagccgagttgagactcatgttctggctcttgaagggaaccacatcgtagccgaggttcgtgaatatcctgcagagggcagcaacgaggagggactttccggccccagacatagttccctgaaccatcagcgcctttcccatcttcacacctccgggtagaggacttcggggggctcaacgcttcccttaacgcgtatcctatccgctttcggcagaatttccctcacgcgctctatgcattcgtccaccttctcaatgtcgaccccctggacgagtgggtctattctgagcctcatttctgggctgatggacgctatgaagcgtgctattctctctatttccccgcactccacgaggccgggcacaaagaccgtctccgcgacaagctttcctgttcccgcgtagcgcctgaagttcttaatagcctttccgtttggggctcccgttattctgcggtggagttcatcgtcgagggcctttatgctgaaggtcgccccctcggcgagctccaccatctcgtcgtcgaggttctcgccgttggtgacgagccagggttttatcccctcgcgtctaagggcccgcattagagccttgagctcggggtccaaggttggttctcctccgccgaggaaggccgttgttacccttgcttttttcaggaggtccacgacttcattaacggagaggtacctaactctacccgtcctccacatgtagtcgagctttctgcgcgtttccaacggcaagcagaggctccatcgcgttaccttcctccatacgcagaaagagcagttccagttacagccgtcgaataacacgtaggcggttccgcccttgaacctgaccgcgtggtaaatcctcgtcattcccacacccaacaagtttaaattggctctggataaaaagtccacggtggttgaagtgaagagcatcttcattctggttctgggaaacactgaggtcagcctgataccagggataagcgttgctggagcgactcccgaattgacaaagctgactccgcccgccgacgccgaatacctcttctatgaaaagccgaggataatagacgctatccccgtaacccccgaaggacacccgacaccggctataatcaccaaggccgctagggaacttgcgaactttccgatactcgtggtcaggggcggaacatacctcgcccccctcgtaccccacgttcacataagctcagccgttgggagggacttcaggagagagccagcactccccgaattcggcgagattgtcaggatggcaaagctcctcggcgaggagctcaataggacggagatagaagagctggttatcggcgagtcaacccccggcggaactaccactgcccaggccgttctctgggctatgggctacgatgcgaggacgagctcagcttcacctgagaacccccagagcctcaaggagcaagttattgctgagggattccagagagcggggatcgagaggggccagctgaaagacaatccgctcgaagcgctcaggcagtttggtgaccctatgatggcaaccgtcgtgggtctggcgctcggtttcaggaaaaatgtagttttagcaggaggaacgcagatgctggcagtatctgccctcctgaaggccctcgaagaggacatgagcaggttcatgatagctacgacaaagtgggtagtccgcgataagagcgcaaccttcatagagacggcgaaggagataggaataatcacctatgcggccgacctcgacttctcgaagagtgagttcaaaggattgagggactacgagaacggctacgtcaaggagggcgtgggagcgggaggagcaacctggcttgccatcaaggcaggcttttcacccgaggaggtctcagcgaaggttgaggagctttacaggaggctcatggggatgaaatctccctgagaagctggctcattattcctatttctctcgccttttcatacatctttagatcatctgtgatgaggactgctccacagacctttgcacaggccaggaaaagaacatcaaagccgctggccccagttttcttacctagtttcatagcctcatccattaggtacacatccgactgacctcctccccgccctaaagggcgagggttccaacgaattaacccctcaccattggcggagaggtttgaggagtctcattcagacccaatttaaagcgggtcttcgacccctctggccgggtctccggccaattacccctacctcctgacaaagcagagaggctcggggttatcgtttttacagcctttctcaaaatgttaaacgctccaacgaggtctgcattgaagataagccccgttgcgggacacttaaacaaaccccgaacaaatctcgccccatcgtggggcttcccgcagacggggcacgtttttgaagtgaaagcctcattcacaaccaaaacctgaataccatactcttcggcgacttccttgagccgttttatcaccgtgttaaaccgccagacgtgggagaggagataattctgcttcctacctctgtcggagtttcttgctatccccttcggataaccgactattattctcgaaactccgagatgataaagcttctcaacggtttgtctcaccatcgtgttaatgtagtgtttcgcctgaagcttggccttctggtgcattctggagagtttcttactctttttagctccgcttttgttaagtttggactgatactctgcaatcctcttctgccagtaaaaatcaatactttttaatggcctaccgttcaccaagaaactctctccattctcaacgtaaacggccattaggttgttcactcccaagtctatgcctgctgaaaggttgcctaagggttctcttggaagcttaacccacttaccgttaattagtttctcctccaccgtgtatgaaatatgagcataccattttcgctttacagggtcgaaagttatctctaagcgaccttgcttgcctttaaggtggattctccctttgaactggacttccagtcttctgaattttccgaggcctttgaggattagcttgtttccctcaattttgtattggtcgtttctgaggattattaagcctccttccttgatgtagttcgggggttttggcttgaaccattttggtagttctccgttccgcttgttccgaaggagtgagaagaaacttctccagctttcggcgttctttctcgctatttgctggactgttgccgagcctatctcggatttaaactcttcatagactattttctcggttttgttaaagtctattggtttgccctcgaagaattcttttcttcttaggtagttcaccttgttccaaactttggagctaataagagctaactcggaaagagctttctcttgggcttttgagggttgtagttttactgttactgttcgcttcatttttcctcgctttcgacttttttaatccagagtttaattgcttcggttaccgcaacacctaaagcccctctgattttcccgtattttttctccacgagttctctgaatttcttttcgacttcatcatcaacggagattgtgattactcccactccactcaccagtatttagtagtatggtttagtatttaagtattttggtgaagtgctttctcgctttcaggctggtcttttgattactgcatccccgccctaaagggcgaggctttcagaagaaaaaagtaaaagagggaatgtgcctccaaaaactctatcccaacattgactattcgttcacttttcgaaagtctccacagcacggttgaagtttcaataagggctacaacgggttcgtgaagcgagaatattccgtcctgaacgttattcaaaagttccttggccttcaaatgaagggagagctgtctataataaacatcatcacgtttcctacgcagagggggcaaaatacccttaacgagaacgctggtatccagtaccacgtcagtactcaaactcataatctctctccctcatctgacgaattatctctgttatgtcttcaacatcctcgtcaacagttaactcctcctgaacaattctctcaatgtcttcaagtgtaacgtgatccttttgaagttccttcagccgaagcttcaagaggaggttctgggcgtacaggaaaagtctctcaacctggctctccatatcttccattctctcaccgaggtgaattttgacgaacgtgtatttaaccctttctcgatgatttccacttccccaaactctcctccagcgccttcctaacggctcggcctatgtttattccgagctccgtcgccgtcccggcccattctttttctccctcgaaggcgaaaactcctatcccatcgctcgtcgttcccgtcgcgttgtagccaagtctcagcagggtgtatgtcttcgcctcggtagccgtcattattgcgttggccattgccccgaccgtcaggccgtcttcaataacgagcgccatatttatcgtcccgggcttccaaggcggtgggacttctccggctatcgcggggttggttacccctgcagttatgtaggctgtaacgcttccgctccttgagacggccaggactttctcaatgttagccgccgtcatgaagccgacgaagttatttaggccgttttcctgttcgaacttcagacaatcggccttatagtcgccagaatagttcttgtgaaccatcatgaagaagaagccgtttgccttaaagaggcccccgttgtgaggtgcgttgctgagtgagaacattggttcattaaagggtcgaataaagtgtctcatattgggcgtgaatctatcgttgttaataaaactgccgttcatggtagcgctctcagaatgtccccaaccgttttggccaaaactcagtttccagagttggccacgacccatcatttcttcttccattttatcgttcagagagaaaccttaattaaggtcgagttccaaatcgttttggtgtgaaagatgaagaaggttaggatttttaacgaccttaagtggataggtgacgacaaagttacggccataggcatgggcacgtggggaataggcggctacgagagtccagactattcaaaggataatgagagcgttgaggttctaaggcatggcctcgagctcggaataaacctcatagacaccgctgagttctacggggcaggacactcggaggagctcgtaggagaggccataaaggagttcgagcgcgatgatattttcatcatcagcaaagtgtggccgacacacttcggctacgaggaagcaaagagggccgcaagagcgagcgcaaagagactaggcacttatattgacctttatctcctccactggcctggcgacagttgggagaagatcaaggagacgctccacgcgctagaggagctcgtcgacgaggggctgatcaggtacatcggcgtcagcaacttcgacctcgagcttctcaagagaagccaggaggcgatgaagaagtacgagatagtcgccaacgaggtcaagtactccctcaaagaccgctggccagaaactacaggtctgctcgactacatgaagcgtgaggggattgcgctgatagcctacacgccgcttgaaaagggaaccctcgcgagaaacgaatgtttggccgagatcgggaagaaatacggtaagacagccgctcaggttgcgctcaactacctcatctgggaggagaacgtcatagccatcccaaaggctggaaacaaggctcacctagaggagaacttcggtgctatgggatggagactctcaaaggaggatagagagaacgcaagggggtgtgtctgatgtatggctaccagaacaagatagcccgtgtaaacctgacaactggaaaggtaacctacgaagagcttcctgatgaggtgataaggaagttcatcggtggaaaggggctcggctactacatcatctacagggaagtcccgcctggaaccgacccgctcagcccagcgaacaagttcgtcttcgcggctggtggattgactggcctcgttccgggttcgagcaaggtaatcgccatcagcaagagccccgaaacgaggctcatcagcgattcgagcggtggcgacgcttttggcccgaagctcaggggacacttcgacgcactgataatcgaagggaagagcgaggagcccgtttacctctacatccacgacggaaaggtcgagattaaggacgcgagccacctctggggcaagggcaactacgaggttgccaaggagctctggaaggagtatccgacggcgagcatggcaatggtcggcccggctggtgaaaggctcagcaggatagcggacataatttacgacaccgagagggccagcggaaggggtggtcttggtgcagtccttggaagcaagagggtaaaggccgtggtcgtcgagcccggcgagaaacctaaggtcgcggagccagaggagttccagaggctctggcaggaatactacaacgagttcgccacaaaccccaagtacgagcacacgagaacctacggaacgaccgacgccctaaggagcgccgcttcactcggaatgagcccggcctacaacttctcaaggccctacatcccggacgagcttgcttccaaactcggtggagatgaggtcaagaagtacgaggtcgagccggagtggttcgtccatggaaagagctgcccgataaagtgcgcccgctacgttgaggtcgagtacaagggcaagaagatccgcgtcaagcctgaatatgagagcatagccatgctcggagcagctactggcgtttttgacttccctgccgtggcatatttcatacacctcgtcaacgactacggaatggacagcatagcgacaggagcgacaatcggctggctcttcgagatggttgagaggggactgattagcgaggacgagataggttttcccgtgaagggcttcggcgatgctgaagctgaggagaggctcataaagctgatggccgagaggaagggcatcggagcaatcctcgccgatggagtcaagagagcctgcgagaggcttggaaggggctgcgagttcgccgttcacgtcaagggcatggaaagcccggcctgggacccgcgcggcaggaggacatacggacttagctacgccaccgctgacgttggcgcttcacacctccgcggctggccgaggcctcaccagctccccaatcaggggccggcgaaggagcttgtaccttctctcatcgagggtagagacgagagttacatcacggacatgctcggaacgtgcaagtttgtgccctacaagatggaagacctggccaagctctactctgtagctaccggggaagagtggacagtagaagaactcagaaagagggcatggggagttgaaagcatagcgagaatacacgacgccctcgactgggtaacaccgccgctcgacgacaccattcctcctcgctggtgggagcccgagccggacggaccggcgaagggcaacgcggccttcatagactacaacgacttcctcgaagcgagaagggagttctacaggctgaggggctggcacgaggagctcggcgtcccactgccggagacgatggagaagctcggccttccggagttcaaggaggacgcagcgagggcgattgatgtagtaaagaagaggatggagtttagcggacagtgagcccatgatacccaaatcccaaatttttctcttttcttcattgttgcaaggtgcttattttctccccttcgtcttttgaaaaagaaagaactagcggcaaaatatttgaaacgaaacagcagaacctaaccaataccctcatttagcactaattgaaattgaaaacgccgatttcttcccgattatctcttccctgctctttccagcctttaagtcatcgattagcttcaaaacgcggcgctttatctcgtcccttacttcgcggtacttctctattggctggccgtaggggtcatcgagcccccagtcccacgttttttcaggcggagcgtaggggcacttgtcgagacagcccatcgtgatgacgatgtacgctttatcggccatctcctcggtgtaaagcttcggatactggccctcaagggaaattccaatttcctccatggcctttctcgcgagcggatctatctcttcggcaggctccgtcccggcgctcatggccctgaaccttggatcatcgttaaaatggttgaagaacgcttccgccatctggctccttgcggagttcttgacgcagacgaagaggatgagcttttcctccattttttccaccaggaagagctcggagaagaggtttaaaggcgttgccgcagtagtctatagagtgccatatagatgaagagcatttcatcaacatttccacctttggttttaaaaacccttttatttgaagcctcattcaatccaacgggtgtggaaatgggcgagaaaaaggggttaagcttcttcgaaaagtacctctcggtgtgggtagccctctgtataatagcgggcatagcgctcggaaagctcataccgtcggtgcccgaggcgctctcaaagctcacgatagagaacgtcaacatgccgatagcggtcttgatatgggcgatgatataccccatgatggtcaaggtggacttttcggcgataaagagagtgcacaagggccagatgcttaaggggttaaccgtcacttgggtaaccaactggctcataaagcccttcagcatgttcctcataagctccttcttcatagggacgctattttccatcaagctcggcatcatcgagccctcacttgccaaggagtacatagcgggggcaatactcctcggggctgcaccctgtactgccatggtcttcgtgtggagctatttggccgatggcgacccgctttacacgctcgtccaggtggccaccaacgacctcataattctcttcgccttcgccccgatagtcggcttcctcatgggcctcaacgaggtacccgtcccatacgacacgctcctactttcggttgtcctcttcgtcgtcatcccgcttactgccggctacatctcaaggagacacatcctgaagaccaaggggccggtgtggttcgagcgccagttccttccgaagctgagcaccgtttcaatagctggcctcctcctcacgctgatactcctattctccttccaggggaagataatcctcgaaaacccgctgcacattgccctcattgcgatcccgctgacgatacagacgtactttatcttcgcgattgcctacgggtgggcgtggctctggaagctcccgcacaaggttgccgctccagcctctttcataggcgcgagcaacttctttgagctggctgtggctgttgccatagccctattcggactggagagcggtgccgctctggcaactgtggttggcgtccttgaggaagtcccgataatgctgagcctcgtttggatagccaacaagacaaggggactcttcactgccaagttcgaggcaggaaacgcggttccaacgcttgcagaggagtgaaggttttactttttttctccccttcaccccacgacccatatcgtccagaccatgaagatataggccagaatgctcaccagcaggtgcacctttatccagaactgcctctttttggagaggaatatgaaggcgccgctgagcattgagaagctcataaggccgaaggttatgtatccgagagtcccgtggtctaaaaccaccatgttaggccctcccaacggggaatatatagagcggagcccccttcgtgcccagtatctcggcaactcgctcatcatcaaacgctcccacagctacagttccaagtcccaaagccgtggcctggagatatatattctgtccgatgtggcctgcctccatatggacgtacctgatgcctctctccccgtagtacttggtagtcctctcataaaaggccacgagcacgatgtccattgcagccttcccaacccactcctggttcagcgccgcctcctggagctccctcctgaagtcaccttccttaaccaaagtcagactgtgctcaaaggggtcgtagtggtagattccgggctttaatccatcaactctgcccacgacaacaaagatttcgaagggatacgtggctcctgcgcttggggctgccctcatctcctcgtgggttattccctggcaggcccacaggagctggccaagctcctcccggcttaggggttcgtctttatactccctgatgcttctccgctttgcgatggcttcttcaacgctcatgctgccttccaaccttggtgggggcaggagaattttctccccagagtactgagtcctgctttccccgggaatgtatggcttcaggaataacgcgagagatgacaccatcacgaagactacaacgagtacggccgctctccgatagtccatgtttgccgttacgtcgtcatgatattttagagttttgaacgagaccactcgaaagatacaccccaaggctgttcgaggccaaaaccctaatcaatgaaaataccttcattaattcgggatgtaccatgcggattgaactccccgccccaaggcttaagggagaaatgagcgtcgaggaagcgataaacctgagaaggagtgtgaggaagtacaaagatgcgccgctgacacttgagcaggtctcccagctcctctgggcggcctacgggatgaacgcctggggcaagaggacttctccaagtgcgggtgcctgctaccccttcgaggtctacgtggcggtttcgaaggtgaaaggcctaaatccaggcctctaccactacgacggggaagcacacgcccttgagctcgtgagagaaggcgacataaacaaaccccttgcgaaggcctgtttgggtcagaggcatgtggagaccgcgccgataaacatcatcatagtcgcccactacgagaggacgacgaggaggtatggtgagaggggttacaggtacgtgcacatagatgctggccacatgggtcagaacatctaccttcaggcgaccgctttagggcttggaaccgttgccgttggagcattcattgatgaggaagtcaaaaaattaatgggcgttcccggagagccgctctacatcttcccggtcggagtcccgcaggtgtgaacctgggaggcgctaaagttcccggggctcttcgaacttgatgagaacctcaccctttccccttatgaggttctgccgcgcgacctctttcccatctttgaggtagacgagcgttgggacgtttaaaattctgaacccctcaaccagcccgctccacttctcagcatttacgtggacaatggctatttccccaaattcttcgctcagctccttcataaaggcctccacgagcctgcacgggggacagccaggaattgaaaaccaaagcacggccttccccttggtaaagtcaacattctcatcgtactccactatcataccgacaccagccattatttttgttttcaaaagataaaagggttgtcaaaccctaacgcgcttgagcatgagggagttcgtgacgacactaacgctgctgaggctcatcgctccagcggcccactcgggcctgaacgtaaccccgaagagcacgtacgcgagccccgccgcgaagggaatcagtatggtgttgtagaacatcgcccagaagatgttctgctttatctttgatatcgtcttctggctgagctttatggccctcacaacatccctcgggtcgtttctgaccagcactacctcaccgctctccatcactatgtccgtggcgttcccaaccgctattccaacatcagcctgggccatggccggggcgtcgttaattccatcgccaacgaagaccaccaccttccccttttcttggagcttctttacctcgtttgccttatcccccggaagcacctcggctaagatgtagtccactccgagggccttccctatcgcctcagccgtccttctgttgtcacccgttatcatgcccactttcttgcccatcctgtggagatcctcgatggcctctctggcccctttctttatcgtgtccgctatggcaatgattcccacgatcttcccgtccatcgccaccactatggccgtcttcccctcgctctcaagcctctggagggtctcctcaacgctctcaaggtctataccgttctcgaccatgagcctcctgtttccagcaaggacttccttcccgcggactttggctctaacgcccttgcctgttaccgcctcgaattcctcgggctcttccacttcgattccaagctcttccgcctttctcacgattgcttcacccaagggatgctcggagcgcttttcggctgaagcgacaagttccaaaaactctccctcgtccacatcgaaggttataacatcggtaacctcgggcttcccctttgtcagcgtccctgtcttgtcgaagagcactaccgttgccttcctcgctatctcaagggcctcaccgttcttgatgagtatcccgagctcggcccccttacctactcccacagttaaagccgttggagttgccaagccgaaggcacaggggcacgctatgaccagaacgctaaggaaggcggtaaaggcaaagaccagaggtttgcccgctatgaagtaccagtaggtgaaggagaggagggctatcgtgagaacggccgggatgaagtacgtcacgaccgtgtcagcaagcctctgcacaggtggtttggtgttctgggcttcttcgacaagttttattatctgggcaaggagcgtgtcccttccgaccttctcagctcgcaccttgaggacggagttcctgtttatcgtcccacctattaccttctccccgctctttttgaggaccggaataggctcgcccgtgatcatggactcgtcaacgtagctctcaccctcgataacagtaccatccactggaatcctctctccgggcctgactacaactatatcgccaaccttaacctcgctaatcggaacctcgatctccttcccatccctaacaacggtggctttctttgcctgaaggcccatgagcttctttatcgcctcgctcgttcttcccttggccctggcttcaaggtaacgacctaaaagaagaaatgccataagaagaacgcttgcttcataaaagttgaactccctcggaattacgcccaacgtagcgaggacgctcgtcagataggcggagcctatgcccatagcgtacatgacctccatgttgagcgtcatgtgcctgagcgacgagtaggccttcttgaagatccctctgccggcgtaagctatggctaccgtcgcgaggaggaactggacgtaaattaggttttcaacctctatccctaacctcttcaactgcattgagaggaagagcggtatcccgataccccatgccaccaggaggcttctcttcatttcctttatgtgcctctctctgacctctttctctatgtcgtggctttcctccccctccacgcccaaaaactcgtagccgacgccctcaacggcccctttgatgtcctcaatagttacaagagccggattgtaggagaccctcgcgctctcggtcgcgaggttcacgctcacgtcgagaactcctgggagctctcttattgcgttttcaacggtcttaacgcacatcgcgcacgtcataccgcctatctttatcacggcgtccctgcgctccctgataacctcgtagccaacatcctctatcgccctgatgatttggtttatgctcacctttgattcgtcaaagtccacgaagaccgtctcgctgttcaggttggcctttgcagctttaaccccctccagcccagctagggccatctctatggttttaacgcacatggcacacgtcatgccgttgactttcagagtggtcttcatgctctcacctgaatgaagtttattagaagggcttatggggcttattcgtgacaaattggaaagaagagccggaaaatttttccatattgggaagtctgcatcactttccttgccctgtcacttggaggtactcctcgtagcccatctcctcaagcctctccgccttctcctccacttcttccctcatcctcctcctgtactccttgagcttctcccttatctccgggtacttcaccccgaggattgagagggccagcagggccgcgttcttggcgttgtttatggcgacggttgcaacgggcactcccctcggcatctggactatggagaggagcgagtcaagcccgttcagcgtggatgtctttacggggactcctatcacagggagcgtggttatggatgccgtcatgcccggaaggtgggcggcacctccagctccggctattattacctctatccccctttcttctgccgttttggcgtactcgaacatcctctcgggggttctgtgggctgaaactatggttatctcgtagtcaacaccgaactcctcgagcacctcggccgcggccttcatgaccgggaggtcggagtcgctacccattattattcccactttgggcattcacctcaccccttacccttatcagtgccttcgccctcagggccttctcgatggcgcctgggagggttctatcaactgcggtaacgtgccccatcttcctgaaggggaacacctccctcttcccgtatacgtggacgaaaaccccaggaatcctgagcgcttcactaaccccatcatagacgggctttccgtaatagcctttttctcctagaaggttcaccatggcggcgtttaaaactacctcggtgctcccgaggggcaggtcggccactaccctaacgtgctgctcgaactggctcgatacggccgcttctatcgtccagtgccctgagttgtggggcctcggggcgatctcgttcacgagcaccctcccgtccctggcaaggaacatctcgaccccaaaaaccccgcgcccatcgagggcttcaacggctctaatggctatctcctctgcctccttctcgacgtccttttcgacccgcccgggggccacgaggaagtccagaatgttcccctcattgttgaagaccatctcggtggttggataagccagcgtctcgtcatcgttgcgaaccactatgacggaaagctccttttcgatcggcacgagctcctcaacgtacgagggaacgttcagagccttttgaaggtctttttcgtctctaatgaccacaacacccctcccatcgtagccaccgctccgggctttctggacaacggggatcaggttttcaagctcatctaaactcttcagctcccgaaaccacggaactgggactcctgccctcctcaacaccttcttctggacgtacttgtcgcggattacctccaagacgtgcggctctggaatgaccggcttctccttcgccacctttttgagcgcctcaacgttgacgctctctatgtcgtaagttacgacgtcagccctttcggcgagctcgattaccatctccccgtcctggaagctcccaactatttgctcagccaccatactggcgggacatcccggggttggatccagaactaagacatcaaaccccatccttctcgcttcctgcgcgctcatcttggccagctgtccgccgccgaggattccaattctaaagccgtccctcatgtttttaactaaaaaatgctaagtttataaatttttttggaaaaaattagcatttttatgctaaaaaagtgtcgcggcgtaagtttgcacagcataaaatttgagcgccagtttttgaccacagtggaaagagtgaagggaaagtatttttatgagtgtgcgagaacacccatcggtggttttatgaaaatagacgaccttgatctgaagctcatatatctgttaatggacgatgcgaggctgagcatttctgaactcgctgagaggctcggcgtcagcaggccgacggtgagagcgaggctggagaagctcgaaaaagagggggtaatccagggctacacgataaagctcaacccggagctccagagggctcacaacgttgtcgctcttgttgtcaaaacggagaacccggagaagatggacgggttcgaggagataatcgaggtaaaccgcttcacgagcacgaagtacctcataaaggtggcagttgagaacatggaagacctcaagcgggtaatcgagggcaccggcgttgaagtcattgagataatgccgatccttgagagcaaagagaaaccacccagaccaaaaataaaagtctcttacaagtgcgactactgcgggaaggagatagttggcgagccgatagtctacaagtacagaaacaaggtctacttcttttgctgtccgacgtgtttgagggagttcaagaagacgagggagaacttagagaaagccatggcaggagaagagaaagaatagagaatctcacgagcataggtgatgtaggattagtccctcgatatggggggttagacttggactacacaacccgcttttacctatctggattcctcaggatagccttttactctggtttctttctggtttacctccaggagattgggctttcaaaggcccagatcggcttcctgatgggtctctctttaattttagtcgccctccttgaggtgccaacgggcgtggttgccgacagagtctcaaagaagctgagcgtccttctctctgagggcctctccgtcctctacgtgacagttctatatctggcaagctcttttcccatggttctcgcttccatgataattgccgcgctggccacggcatttagaactggtgcagaaaccgcctgggtttacgaactgctcagcagggacggcagggctaacgactatcccagggtatacggcaggctaagggcttttgaactggctggtgggctcgtggggatgatcactggtggcatgctggcggagacttttggaatgaggttcgccgtcctaatgagcgcaccgttcttcctgctgtcgctggtgctcacggcaacaattcctgcggacacggtaaaaagcaggacatcttacatgtcccacatttttgagagcatagatttcgttcgaagctcttccgttgtggcgtggctcatcgtatatgcgaacttcatcgggctttccttcgccgcttttacctcctttatgcagctctacttttacgatgtcctctcctctgtccttggagtctctatggtcatggcccttcaagccgtaattaacagtgcttcatggtacatagacaccgggaaatataggaaatggatctacgataaagctggcgctattttacccatccttctgttttttgcaggtctcaatgagtggtttggctttcttacgatgattcttggcacattcgtttttacccagagctttaaggagtggcagggacggttccaagctgctattccagacgagaaaagggcaacgttgggctctctttactccctcacggcagcaataacaagtggagttctgaacgttcttcttgggcttctcttcaactgcgttggaataatgatggggcttataaccacttcgctctttatgctggtattaggctacgctctccagttgagctttgggagaaaagtgtccaaaacttaggctttttcggttgtggccgttgaatacctgctttaatatgggccagttagtagcgggatattatctacacacgcatatccctaaccaacgatcattaatcccaaatttttccagaacgccgggccttcagcccgcggtagatgcctttaacgtataggaacagccccactcccgacgttacgagtgccaccgggacgttcacctcaaaccggacatccttcagtgcggcatatgtgggcacggcgaagaggggaataatgaggggaggtaggtacctgtaggcgggagccctcgaacccctgaggaagttcttctcacccttcagccctttgagtgcgtacagcgtcagggcaagcagagggagaagcacaaggggtgaaaagggcaccgctataaacgtgaagagggcgaagaacgccaccaccgtgccgaacgccccaatctcccacctggtcgggataaactcctcgggaacggtcaagtcgaaggtaaagtacgcgaccacgagaaagaccgtcgaaattaacgtgtaggccgcgaagtgtccaacgctcaccgcgtagccgtcctcaagcttccagtaggtcgcccagaggccgaagaaaacgccgaggccggcaaaaaggaccgccgctcgagggaggctccactcaccaatggcccttctcgcgagataagcccccaggagcatggaaatcagggcgtgccaagctaaaggcgtccatacaagctggaagggaaaggccttgtatgcttcttggacgataacaccctcaacgagccagccgaagaccgctcccaccagaaagacggagtagggggaatcagccttgaggcgctccgccatcaggaggacgaagaacgccaaaactgagtagattagccacgtcataatggccccgatgatggtatcgtcagccttccacctgccccagaaggcgagctcggagtagaagtagaggacgtagccgagcgagagggccgcgaggagtctctttatcgcgttcatggcgggagctcggactcagggaataaaactttttttgaaggcacaaaaagggtggtgtgcgataaggcggttgagaggtaaaaagagaataactcaaagcttccccaccagctcaagactgacatccagggcttccttccctggctcccagctcgcggggcagaccttaccaggatgctcgcggacgtacttggaagccttgagccttctcaggatttccttggcgctccttcctatgctgaggtcgtgcatctggactcattctccccgaactgctccatgccgttgtataggaacgtggagccgaggatggtctttccagcaccgggttctcccgccacgaggacagtgaagccctccgggaacccgtctttcagaatgttctcgtcaaagaacttgatgcccattttcacggccatattatccctccacttcatacataggttcgaacttggatataaggctttctatgagggcgtaagaattcttattatcctaagataaaacgaatagaaagttcaaacttcgttctcgtaacctcagtatatcgagttggatacccctggaggaagttaacgaagaggatgctcattaatcaaaagtatcaaattgtaaagatcgagtgttttaacttccacttttcagcgccactaggagcgtgaaagccatcaccagcgctatctcgtatgtctcctcgagcgccaaggaaggccagtggacgaaagtcccgaagagagcaagcaggaagatcaggatggagccgtacttgacctccctcttctcgctcccagcaccgtaaaccagcgctccgaggaagaactgaacgaagaagtacgtcgagacaaagacgtggggcctcgttccgccgtggaagatccctatgagagccagaaatatcgccgagatactgatgtaagcccctccaaccgtttgaagcttgtttttggcactcagaatgaggtagatggcaaaggcgaggacgaagatgctcgtcgctatcagaccgtagttgtatatccacggcgatgacgcctttgacgggtcgccgaggtcgctgagggcgttgtggaagaaggagaaccacccatttctacttatgctccacgcgacgaagagccagtagacgatgccgcccgttaagccggaccatttaaggactttgagcacatccatgcagatcccctatgatagcagggtattcaccagataaggattaccagtgccgagagtacagttcacaggattataattgagcaatggaggtatatttttgcgtgaggggattgagacattgttgtctcttgtggttgtaaacctagagttctcgaactccttaaatacaccgcggagaaattctgtcggtgcaaagattatggaaatcgttatcattggaaacggccccggcggcgttgagcttgccaaagaactgtccggagagcacgaagtactcatctttgagagagaagaagtcccattctactcaaagcccatgctgagccactacatagcgggtctgattgagaaggaaaagctcttcatatacccccttgattggtacgagaggaaaggaataaacctgaagcttggcgaagaggctaaactgatagacagggtgaggaaggttctcgtcacggataaaggcgaatacccttatgatatcctcgttatagccactggagcgagagcgagggagcctaccgtcgatggcaaggagcacctcctcacactcagaagcattgaggacgcggaggggataaaggccctgcttgaggagcacggggaggctgtgataatcggcggaggtttcatcggcctcgaactggccgggaacctcgcaaaggccggctacggcgtcaagctgatccaccggagggatacttttctcggcctcgatgaagaactcagtagcctgataagggaaaagctggaggaatcaggagttgagttccatctcggcgcggaactcctgaaggccgatgagaacggccttctaacaacaaggggctacattgaagggaaagtaaaaatctgcgctataggaatcactccaaacgtcgagatagcgaggaggagcggcatacacacaggaagagggattctgatagacgaccacttcaggacatccgctaaggatgtctatgccatcggagactgcgcagagtacagcgggatcatctgcggcactgcaaaggccgccgccggccacgcgaaggttctggcaaacctcttgaggggaaaagaagaccgctatcccttcgaactccgctcctcagtcttcaagttcggcgacctgccgatagccatcattggaaagacgaggggagagggcgagtggctcgacgagcacaccaaggcattcttccaggacggaaaactggtcggagctgtggttattggagacattagaaaggcattttccatagagaaagagctgaaaaaagagctttacggggcttgaggattccaactttttgccccttctaagattcagcactccattcagcaacagcttgggagaagcgtttcgataaccttataaacgcaccaacaggaacttcaaccatgctcagcggttacggaagggacgcgaagatactcatagcggccaatgcagtgggtcaactgttcctccagttctcgatattcataatgccattctatctccgcgccctcggctacggcatggattcaatggggctcttcttctccgtccagaccttcatcggcgggctgttcttcctcatagctggccagatttccctcaggcttggctataggaagacccttctcatgggagcagtcttaggccttttggggaggcttttccaggttctggcgctaaacaagtacttcctactcctcggatttttcctcgttggtgttaatatgggcatcagacagcccaatttctctgcactgttaagcgaagaggttggagaaaagctcagacaccacgccttctcgatcagcttcggcctcgggacgatattcaacgcaatcggagtcctcatagcgggctttgctccagattttctgaccgagaccttcgggcttatccccgaaatagcctaccgtctggtcatctcgctcgcgcttctccagttcgccctggtgattccagcactgcttgttatccacgatgtccccgtgaagaacccgaggataaactggaaccgggagctggtaatcaaaatccttaagttctccctgccaagcgccctcatcgggcttggggctggtataacgattccctacatgagcctatacttcaacatccgctttggccagactttggcggcaataagcggtgtcttcttcttccagcagcttgtcatgggtctcggctccttcggccttccaaagctggtggagaagatagggcccgtgaacgtcataacgtccttccagctcgtcgcggccctgctcttcgctaccttcccgctaattgacgtcttccttctggcggccttcctctacatcgttcgttccattctcatgaacatcgtctggccgataaacgactccttcatgatgggcttcttcacgacagaggagaaagccaccgccgccgggataaggagggccttctcgacattcatgcgcggcgctgggaactacatcggcggagtgctcttctcaatctcgctcagctacccgttctacgcgactgccacgctgtacgtggtggcaacgctgatattctacggcttctttgcgaggtacaacagggcctgaaagagaataggaaaggcaaaaggcctcagaagttgaagtttatgtccttcatgagctggtcgtagagctcttccttgtagagctctggatagcgcattatgtagtcgtactgcttcttgaggatgttgtagtggttcctctccatgtccgcgagcatctcaaggaggagcttggtcttctcgttgctcgcgtacttggcgagctccttgtagagcttctcgctcaccagctctgcctgcatcgctatctcgtatatctcgtcgaggttgatatcaggcttcttgatggcctcggccatcttctcggctatgaccttgaactctcccatgacctccatctctatcttcttcgactcgccaccttcggccgcaaagcgctcggccatcttctctattatctccctgtgcttgtcctcttccttggccaagaagagaagctcatctcttataatgtcgctcttggtcatagaagcgagcttttcgtaggcctccttggctctgatctcggagtttacggcaatctcaaagatttccttctcagtaacttccatgcagaatcaccaataccatattgaacaccgtccctattaaccctttcggccgttaaacccgtaagttcgaacctcgaaacttcaaaatgcgaacctaggaggggaagaagatgagtgtcgagctggtgttcaaggttctcaaagaagctggcagaccgctcaagtctgctgaaatagccgagttagctggtctcgataagaaggaggttggcagggcgataaagaagctcaagaagaagggaagatagtctcgccgaagaggtgctactacgcccaggccgagtgattcagagcaggagcctccacgtcatcagccttgagtagtgatctctttccatgtttgccaacatctggagggcgcttcttgccttctcatcttttgcgtaatctattaggtgcgcgtagaacttctcgctcgccagctctgcccgaagggccacatctacaacgtccttagcagttgtctcaggggagagcagcctctcagcgttctcatagagaacggcgaactccgttactatctcctctggcagttctaccacaggactaagggttttctcgtttatcagcctctccacaacctccttgtggccccactcctccctcgccagagtaaggaagagtttcttcatctcttcattttcggtaagttccgcaagtgcttcatacactctggcggcgcctatttcggagcgtattgccatggctctaacttcatttatccctatcctcttcttttcatcactagccaatgcgctcacccccaagaatttggcaaaagcgttataaagcactttccccacccccaaagagggaagcttatgaacatacttttgggtacatcactaaggacagtccttctcctcgttttcgcttacatccatcttcgaacaaagagaaaatcggccctattccttggaatcgcgcttttattgagtggtgctgtagattacgctgcctatattggtgatcctactctttttggccttatagtcggtgttgtgggtacgactataatcacggcccttaatcttctcctcgatgaggagaacatagacactatgatgccactcacaatgaaaacggcctctacctccttcccataggctcttcggttctcggagcacttgttcttgaactgggagttgggcgcccaactggggccgtgagctatccttatgtgatcacgggtataacccttgccctagcgggctttctaataatcgagttcctcggaaagcggtacggctggagggcctacctctttggggccagcatagttctcctcggggttggagcaaccagtaccgctgttatgattggaaatcggggcgttccaattgtcaatccaaacgattgggtagttttaacagctcccattatagtgacgttaacgtattcccttcttgttctacatggagggatgatcgaggagactccagaagagatcaatataaagtctggagtcaccatagcacggaagatagaggagagaagtctgaagggctatcccgtgctggccttcatgagaaagcgcatctccgttccaggatggaaaacctactggataacagctgctggaagggacgagacgagcatatacccgaccgagctccataaaatcgtggacatggtggcaagatacgttgcagaggcaaagaacaagggtgtaaccccggtggttcttgtagagggccttgaattactcgcgatgtacaacgattttaaggctctcctcaaggccctggcaacaatacacgatatcctcgtggtcgaaaacggtgcgctcataattctcctcgaggaagatgcttgggacaggagggaattagaactgcttcgctccgttctcggaattggcgtttctgctcccaaaaaattgaagcccacagtatcaaagtgactattcttgctaaagaaacgatttggaacatgtagaacatatcgaaccaggcaggtttcaccgagtccctaatatcgacatcctctctagtcctaatgggtggtggcatggacagggcgaggatactcctcattgccatagttatagacctcatagcgattggagtcgttgcaagtgccatctatcaagagaactcaaagaagacatcggaggaagtctcaattgatgggactcccatagaaggggtgctcaaactctacaccactccaactgggcccatcaagagcatcaatggaaccttaatcggcaacgtcactgcatatggaagagtgctccattttgatgggaacggctacgttgacctcagcaatgccatcggagaaatatcggacatgaaggttggagctatttcactcgtcttccgctacgaggaaaccgaccagaatgtcctcccaatcctctactttggcgacagggaaggaaagagcctcttcataattgagatagggcacaacggtgagaacaacaggaggctctacgtcacctggattccggagggagataagcctgccctctgcttcgacagcggcttcaacctcaagcccggaaggtggtatcacctcgtcgtggtcgtgagcgaggatggaaacaccgcctacctgaacggaagggagatgacctggaggcactacaacttcgggaacgagagcatgaggctcttctgtgtcgacatcccggggaaggagctcttcaccctcggctacggaaagacggcggactctgtaacgccagagttcctctacttccacggggacatcgccgaccttagaatctacccctggccgctcagcgcggaagaagtcagcagccttttggaagaaataaggagcagaaattagttcactttccatttttcagtttttcaaggagttccatcgcggcttttcttatgtccatcacttcttcaaggtcttcaaggaagccaagccctgtgtagaacgcctccatcttttcaagttcattaaggagagtcagggcgtctttctcagtactggagcgcgagtctatgccgtgttcctctttgagccgctcgaaaaacttctcaccgagttcataaacgccctccctggccatgccaaaaactatgtgtggaacatcagacagttcaaagaggaatctcacgagagcgagcctttcaagatctttctcgctggaagatggaatagagagatactagaggctttcgttaaaatagacgactaagtaccaggaatccctcctgacaggaaactcctgatctctcccccgtattaccactcccatgaaccctcacctaatttttaggatgactacttaaaaatcccctcgtaagcggtgtagccgtatcttctaagctcatcccttggaataaagcgaagtgccgcggagtttatgcagtagcgctttcccgttggtgtgggctcgtcgaagacgtgtccgaggtgggaacctgcaaagcggctccggacttcccgcccgcagaggaagccctcgcactctccagcctcaacgactgcccactcttccaggggctttgtaaagctcggccatccggttccggagtcatacttgtcgagcaagctgaacaggggctctccggagaccacatcaacgtatattccttcctcgtgattgttccagtactcgttgtggaaaggctcttccgtatctccgagctgtgtaaccctatactggaggggagttagctgacgtttaagctctgcgtcgctgggcttaacatagccgagccagtagccctctctctcagggaagagcctgaagtgccggtttttctcccaaacggactttatgaagcccagtcttccagagtagagcttgtagcctttgtagttcgcctcaaagcggaagtagtagccctggtggtagtcttcagccggataaaactccttcgctggcagaatctcggtagctatcggctcgtcgaatattcccgaaagctcaagccttctcttcgattcttccgcgagttccctctgttcctcgtcgaggtaaaatatagcggtcttgtactgctcgcccctatcggcgaactggccgcctggatccgtggggtctatgttccgccagaaaacatccaaaagtctctcgtaggaaatttttgatggatcgtaaatcacctttaccgcttccctgtggccggtttcacctgttgagacgagctcataggttggattttccacccagccgccggtgtagccagagattgcctcaatcactccgggaagtctctcaaaggcctcctccatgcaccagaagcagccaccggcgaatattgccgtcttaggttcaattttgataccacccattatcacatctccaaccgaatgatgtcggaaatctttatatagttttgcatactattacctgttggtggttaaaaatgaacagaagtgctctaaggcgcattctctccgtttttagttttaggatgatacccaagggaagggccctcccaaagggcagacccagggcggccctggtggtgaggaagcatgagtgagtttaaggaagacgtctccatagttctcggcggagcggccggacagggcatccagacggttgaggaaatcctcacccacgccctcaagaagtccggctaccacgtctatgcaaacaaggagtacatgtcccgagtcaggggcggaataaacaccacggagatacgcgtttcttcaaagcgcgtcagggccttcgtgaagaggatagacatcctcgtgcctttcaagcagggcgttctgagctgggttagagacaggctcggagaaaacaccgtcgtcttaggggagaaagaaaacgttgaggaggagtttttggacaaggtcaacctcgtcgaagtcccgctcacgaagatggtcatggaagtcggaagccagctctacctcaacactacagcggccggcctgatagtcggcttcttccacggagactttggggctgttgaggaatacataaggaagcgcttcggaagcaagggcgagaacgttgtccagaagaacatcgaagcggcaagaaagggctacgagctgggggtgaagctctgcgaggaagggactatcaagatcgaggttgagagagatgagaaagttaaggatgaagtcctcctgaccggcacggaagcggtcggaataggcgccttcgctgggggtatggacttcctgagcttctatcccatgagcccatcaacgggagtttcaaccttcgcggcccagcacgcggaggagtttgggataatcgtcgagcaggtcgaggacgagatttcggccataaacatggcgcttggagcgtggtacgctggagcgagggcgatggtgagcacttctggcggcggcttcgcgttgatgagcgaggcgataagcttagccggaatggcggagaaccctgtggtggtgcaccttgcccaaaggccagggcctgctacaggtctcccaacgaggacgatgcagggcgatttgaacctcgtcctctactccggccacggcgacttcccgaggataatcctagccccaggaagccttgaggaggcgttctaccttacggcggaggcgttcaatttagcggacaagtaccaggttcccgtgataattctcaccgatcagtacttcgttgacacctactacaacctccctgctccggatatggagaaagtcaagttcgagcgctacatcgtcgaggcgaagccaggttataggcggtacgagcttacagaggacgggatctcgccgagggcggttccaggctacggagaagaggtcgtgattgccaacggaaacgagcacgacgagtggggcgacataactgaagacgccgagctcacgataaagatgcaggagaagagggccatcaagaagcttgagaccataaaaaagaacgcgccgcttccgaagcttatagggagcgagaatgccaaatacttagtgatagcatggggttcgacgctccacgtggttgaagaggcccttgagaagctcggaagggacgacgttgctctgctccacttcagctgggtctatccactcaaaccgaaggtaagggagttcttcgaaggtaaggttctcatcgatgtggagaacaacatcaccggccagttcgcagagcttctcaggaaggagcttggcatagaggtgcaccataaaatcctgaagtacgacgggaggccgttctcggttgaagaggttcttgagggcctcaagggggtgatagaatgaacgtccagcttcccactgggagggagctcttcgagccgaagagacccggaagccaagatatagcatggtgccctggatgtggcaacttcggcataaggaacattctcatctcagcactggccgaactcgggctaaagcccaaccaggttgccatcatcagcggtattggacaggcggcaaaaatgccgcactacatcaacgtcaacggctaccacacactccacgggagggctattccgatagccactggtgtgaaggcatccaaccccgagcttacggtcatagccgagggtggagacggtgatatgtacgccgagggcggaaatcacttgctccacgccataaggaggaatcctgacataacagtcctcatccacgacaaccaggtttacggactgactaaaggacaggcatctccaactaccatgaagggcatgaagacccccacccagccgtggggagtgtttgaggagcccttcaacccgctcgccctagcgatagccttggatgcttccttcgtcgcgagaacctttatgggatacttcaaggagagtgtcgagatcatcaagaaggccatccagcacaaaggcctgaccatagtggacatcctccacccgtgtgtgagcttcaacaaggtgaacacctacgcctggtacagggagcacacatactggatggacgaccacgacccctacgacagggaggctgccttcagaagggctttggagagcgacccgctcccgctcggaatattctacatccacgagaagcccacctttgaggagcaggttccagcttataagaaggacaagacaccgctctggaagcgcgagccgaagcccgagctggtgaagaagttctttgaggggaagaagctctgaaaggcccagaatgatttttttttctttttcttgctttattcctgcgatcaaaactaattggggtgtgatagtgtgaaagttggtgaaacggctctggattttgtcctaaaagatcaagacggaaaagaattcagactcagcgacttcaggggcaagagagtcctcctctcattccacccgcttgcgtggactgggatatgcgagaagcagatgaaagctttggaagagaactacgagcgctttgaggagctgaacgtcgttcccgttgggattagcgttgaccccgtgccgagcaagaaggcgtgggcagaacatatggggctgaagaggctgaggattctgagcgacttctggccgcacggggctgtttcaaagctctacggcatatttagagaagacggtggcttctcagagagggcgaacgtgctggttgatgaggaaggaagggtagtctttttcaaagtctacccgataagcgagcttccagatctggaggagatttttgaagtgctccactgatctcttatttttagcctctttagggcaacaattctgtccaaaacatatggtttggggaaagcttttttatgtttccgcaccaaaggggttcggtgatggaaatgccgaggctgtgggttgaaaagctctgtactgatccggagctctacatcataagggttgatgatgaccaaataaggtacttcgaggccacatgggacattcccgaggggataacttacaacgcctacctgatgaagctcgacggtgcagttgtcctctttgatacaacaaagaaggagtacaccgacctttttatggacgcacttaggaagctcgttgatccaaaggagataacccacataatcgtccaccacacagagccagatcacagcggtgccctgcccaaagtccttgaggagaacggctacagggcccaggtgataggaacccagttcgcgaggaacctccttcaggggttctatggagacaaagttgtcgagaacttcaaggtcgtcaaggacggcgaggagatgcagatcggcggaaagaccttccgattcatagcagttccatggcttcactggcccgacacgatgataacctacgtcgttgaggacaggataatcttctcctgcgacgcaggcggcgggtactcaattcccgaaaccatcgacgacagcgatgaggagttcgtggagaagtacctcccgcacgtgaccaagtacatcgtcaccgttatcggccactaccacaagtacatcgtccagaacatcaagaagctgaagagtcttggaatagttgagagcgctaggatgatactccccggccacggcttggtgtggaagagggacccgctcaggatattcgaacactacgagcgcgttggtgcaggggtttccgaaaaggacaaggttctcgtcatctacgactccatgtacggtttcgttgaaaggagaatggagatcgttcttgatgaactaaggaagcacggaaagaaacctgtagtttaccgcttcacggacaaggaagctccagcggtcagcgacatactcggcgaggttccgagcgctgaagccctgataattggcgcatcaacctacgaggccgagatacacccgagaatacgctacgccctctacgagatcgttgacaaggccaactacgaaaagcccgttctcattgtcggggccttcggctggggcggcgttgctggtaggaaaatcgaaacgatgatcaccagaagcaagttcgaccacgttgcgacagttgagagcaaaggctacccaacgccagaggacgaggagaagctgagggaagccgtcaggaagctcgttcagtggactttgtagtcctagcaacttttttgtccttttatacctttcatttctgaaaaatcttagaaaaaagttcagctctcttccatctcagccttcagcttgagggatgtatgctcctgcttcagctcctctatcttttccacgagttcttcggcaacactcctcagcttcagcgccagctcttcgacctctcttatcttctggtctaactcgcgttcccttgcttcaacctcctccatggcctttgcgagcctttcctcctcgctcttcttgtagacttcgatagacagggtgtcgtagtcccacactattgaaccatccttgatggagaactcaacgcttatcctgacaacgtcttccttctcaacacctaacttctggaactcttcaaatatctttgagttaagctctccagcggccctgacgacctccttgggatcaacttttcccttaactaatgcaaagagcaccctccttactttgtgagcgtaaccactggcgcggacgtagccggtgtttaacttcatcggcaccaccaaaagtttattcaacttcgggtgcataaatatttattggtggtcgtccgtgaacatacttatcttcggcccgcctggaagcgggaagagtacgcactcaagaacaataatggaaaagtacggcctcgtctatatttcgtcgggagacctcatcaggagagaaatcgaaaggaagtcttctctcggcagggagatggaggcctaccttagcaggggagacctcattccagataccatcgttaacaccctgataatctcaaagctccgccgccagagggagaactttatccttgacggctacccaaggacgccagaacaggtcatatcccttgagaactacctctttgaccatggtattaagctagacttggccctagaaatcttcatcgatgaggacacgagcgttgagaggatttccgggagaaggatatgccccaactgcggagcagtctatcacgtaaagtacaatccacccaaggtgccaggaatctgtgatgtctgcggctccgagctcatccagagggcagacgacagggaagaggtcgtcaggaagaggtacaggatatactcaaagaacatggagccgataatcaagttctaccgtgccaaggggatatacgttagggttgacggcgacgggccgataagtgaagtatggaagaggatacagcctttactggattacattcactcacgcgaggagaagaggaaggaacatgagtaaaggttcagagctttccaagggccttcatgatagccctaacgtcttcgttgccgatgatgttctccacttctttctccatgagctttgttttcttcattaccttggcaacgactttatcgctgggatcaatgatcttaacagaagtctgcatcggcttctttatcaagagttttatgtaccccgcaagcttttccctgagagctttaacgagggaagccttttcttcccttcccatcggttctctcagctttacgaccagactaacgcgatttaaacctgaggggtcaactcccaaaacgattgatgccgcggctattccccattcccgtaaggaaatcacaagccccttcccaatccgtctgaaaggtccctccagctcgagggggacgtcaagtaccaacttgggttgatcttggagactttcgtggtcttttgggagttcctgctcaatactaacgtcctcaattatgaaagttacaccataaaccctcccaagcgactcgttggcttccattacaagtttttcaataagtcctttaacggtcggctcaacatcaatagaacctgccaaactcgtctgaatcaccctaagatgaaacctgaggaatacctcttttccgacaggattaacgtaaatcgaactgctcactaacctcatcccaagggagtctaaggcgtctgatatcttggatatgaaaagcctctgcatcaggggtctgtacttctctggtataacttcaaacaccttcctcgcccgatgctattttgtgccgttcagaatttaaagttttctgttctctttgtataaaatacaagatgaatcgacaaaatgttggaaaaaatctaaaattagggggccaaatattggaaaatttctaatggccttcccacagcacgtactccttctgggtgaggaatatcggctcaaggcgcttgccaaccaccacgactttgtccccgtacttctgcttcagttcttggatatatgaatcgaagaagtccttcgggacgctggcctgacctctgattaagttgtccccctcctggactttatccagttctgcaacagggatgtagccgattatgtccatgtgaggctcaaggtagaactcgggcctgtttatgtcgttgccgttgggtgccacgtagtagtaaacaacgcccctcagagtgaacttgacgttcgtgtagtccttctcaaacgcctccgtaagctcgatattgccactttccccaggtttcagcggcatgcttggatttgcgagctttccattgacgtaaacagggccgtttgtgacaccaacgggaccctcctggagcaggatgaagcggtacttctctgcttgcggaatcttcacggtgacctcaacgggagtttcgttgaggtggtcaatattgaggttcttcacaagaacctgcctgtcaaccagctctgtaccgttgtaggcttcaaatatcagcgttccgttctttacgtctcttccaaacgccgaaatgtagagcctgagcttctgttcgccagttaagggcagagtagtgttgccgctcttaacctctagtccgccgccgttgatcgaatcataaactctagtccagtttccgttcatcatggcctcgatgcggtgtattgcaaacggggtgaacttatagaccctaacgcttgggacatagaccccctgctttttcgtgtagccattgtaaccggtgtattcgagcttgaagtttgcaaagagcttctcactctcctctccgttgagcgaaatcggaacccccaatccaagctggaggtagttgctgagtgctatcttttcgtaggctagaatcccaatggggtatatttggttgctggaagtcatgtaaggatatatgtagaggacaaacgggtgggtcggttccttgttcttgaatacctggcctctgattagatccactacaatatcaggtaccacgtacccgtttccagctttgactgctatggtatcgttggtgaccacgatgtcgttgtaatagacatagctgaacattggatatctctctccataggctatcgcaccgccgaggtaggctatggcgttgaacttgccgaagtcgctcgatccatcgaagggatcgaggaacgttataacgtagtcgtctccccaggcttccaggtcaacctctcctgcgttcccgctgtgggagaagaacttggctatgatgtatctcctgtcgtagccgtgaccaccatcgcttaccgctctgcggtggctcagcaggctcgactcctcccagtagccgtagtcccaccagcttagaactgttgcgtaggggtcgctgttgtttttaatccacagaagggcgtcggtccaggcctctggaacgcttccaggcattttggagttagttaatctaattttgagactctcgctcttcatagcatcataggagtagctagcggacacatagggcattggaactagcattagaatcaggaaggccgtatatagtgccttcacagtaaccgtgtccctcatcctctcaacgtagaggaaggcctctcccattgcaatagccgccaggattatcgcggctactgaagcctggaaggagaagcgaactgcctgcttgaagaggtatattgtgccgaggtagtggaacagaggtatgaagtgcttgtaggtttcgtagcgcttctcctttacccccctatagaacttccagccgagaacaaaaaggcccaagagggagaatatgaaaattatgctgtccccctgtgagcctttgggtttgaggctgaacgttgctattatgtatctccagcttggggtctggagctcggcgacggtctggtaaaggggagttgactgagtggccgctctgaggaagttgaagagggcctttccgaagtaggcgtaaaaggccaggaagccggcaattccaataccaactacggttccaagcctgtgcatccagtctgaaaagttcagaaacctctcaccgtaaagcattatcaggacgagcaccgtacccgctatgagaacctcaaaggagaacacaaggaagtttctaatgccaacgaagccactctgggcgaggaaaattccagctataatggaaagtccaaaggcaggatagtactcagtgacaaagcgcctgaggtgttcagtgtcccctaccgtgaagaatatcaccggcactaccacgccagttgcgagcagaatcattacacccagcgagctccccgtccaaactcccatgtacagtggactgaggacaaggaaaaagaccagcccaaggactttcttccagttccagcgctcttcgtcgagatagaggagcaggaaatagactgtaaacaggaagaacatcacgaaggggccctctccacggttgttgcccgagtacgtcttttctatagccccccagaagcccatcatcagggccgctccccagaagcccgcccagcttgagtggagctttctgactaccagatacgtgcctatgaccatcattgccccaacgaagggtggccagaccttaaaggcctcaaactcgttcatgccgaacaaggcatgtgcgaacttatagaacatagcctgaaccgtgtagagaccgaggtaccctgagggctttatgcccatcggaggttccgcataggcataatacttgggaatccaatcctggattgccagcttgtacatttcgaagtgatagaacgtatctggatcgaggaacagcttgaaaccggaagtcactgccctgatcctgtacccaatgtaggccaacagcaggacgaggacgggcaacccgtactctttgaaataaaggtaggccttggggaaggcctgtccctccccaggttcggattttttcaatttttctttggcttcggttttcatattgaccacctcactccacagtaactgattttgcaaggtttctcggcttgtcggggtcgttgcccctcaaaacggccaggtgataggcaaggagctggagcggaacaacgtagacgatcggactcaacagctcatcaacttcaggcatcttcaccagaacgtccgagaccctgcttagctcttccctatcggagagggagattatcatagcccccctggcctttgcctcctcaatgttgctcaccattttgtcgaagacctttccgctcgggtttattgcaaccacagggacaccgtcttcaagcagtgcgagcggcccgtgcttcagctcgcccgcgctcagcccctcggcgtggatgtagcttatctccttgagcttgagtgctccttcgagggccgttgggacgcttatccccctgccgatgtagaagaagtccctcttgtccttgagcgtttcggcgagctccctaagagcctcgtcgtgttttagggcgagttcaacgagttccggaactttcataagctcatcctcaagcttctcaaggtagtcttcgctcgcagtgccgagaaccttcgcgagctctattgcgagcattgtgaggaccgtgagctgggtcgtgtaggtctttgtggccgcgaccccgatttccggcccggcgtgcgtgtagagagttaaatcggctatcctcgttgccatactgcccacaacgttgaccactgcgagaacctttgcgccattcttcttcgcaagcttcattgccgctagggtgtctgccgtctcaccgctctgggttatcgctatgacgagggtcttatcgtctatcagatcctcgaattcatacctgaactcgctcgcctcttcgacgatcggaactttcttggcgagcctctggaagagagacttcccaacgagggcggcgtgataggaagtgcccatggccacgaagattattttatcgtagttcgctatctcctcggcgacgctcctgatgatctccctgttgccgtgaatggcgtctttgatggccctcggctgctcgtatatctccttcagcatgaagtggggatagccagctttctcggccatctccagcgtccagcttatctcgtggacgggtttttcgacgacttcccctgtgtcgattctcttgacgacgtaggagtcctttgtcaggattgcgtactccccgtcatccagaaagatgaccttatttgtgtattcaaggaaagcgggcacatcgctcgccgcgaacatctcaccctccccgatacctagaacgagcgggctctcattcctgacgacataaagcttatcgggctcatccgcataaactatggcaagtgcaaaagaacctctaagcttatttagtgcctttctaagggcctcctcaaagttttcagagcctttcagctcctcttcaataagatgggcgataacttcggtatctgtatcgctcctgaacacgtgtcccttcttgaggagctcctccttcagttcagcaaaattctcaattataccgttgtgaacgagaacgatttttccagtacagtccttctgggggtgggcgttgatgtcgttcgggacaccgtgggtggcccagcgggtgtgaccgatgcccctgttgccctccatctcaaggaagccgagcttctccgtgagtttgtctatcctcccagcccccttcctaacgtcgagggtttcgccgtttcctgtcacgacccctgcagaatcataaccccggtactcgagccgtttgaggcccttcacaatgacttcgcaggcctttctgtcgcctatgtaaccaatgatgccgcacatggcaaccacctttacttctcaagccgataagagaggagagttaaaagctttctggaaaaaagcatttatacccaaagtcaattcattacaggatgcctatggacaggaagctcgacgagttcatcggcgatgcaactccgaaaaaggtttccaaagaaaagccagttcggaggaagaagcggcttaaaccgaccagcctcgactcgtttctgcccgaggaacacataaactacttcagagacctcagaataggctcaaagaagataaggaacgcgaaaatcgaggagttatagttcttcagctattaccgccttttctcccaccttgaagacgaaggcccttctctcaccccttaggttctcctcgattttcttcctgatcctccagtactcgctttcggggacgcttatcctcagcgttgcccttccaaagccctcctttctgaggaagtcgtttatcctaactggatggaatgggagaaccccaacgacgctgtaagtcctcttgaggtatgggcttttaatcggctcgtctccggtagctaggactctcctcttttccctgagcagcattctggcctcgactggaagcctgtggaagagctcgtttattaaatccgcataatcgatgctctgtggtatctcgtagaggtaatcgcccggcctatccgcccactcaacgatgtcttcaagggaagggtcgctttcaagacgtgcccccgctggaagaatgaccgcgctcctctcagccctcgcgaggggttccgtgtaaaaggtcaacctgttcagcgccccaaagaggtctatgtattcaaactctcccttccatgggactttctcccgcttcatctgcggcggaaggtcgaagataaatgcccgggtcttctttttgtaggcctcgtagatctttagggggcttgggagaagtccctcaaggtctctctcgggggcctcaggaggtctagcaggatcggagaatactacctccgcatccactctctcaacggtttctggtgagagagaatcggcgtttatgaactcgatgttcgagacaccgtacttctcggcgttccttctggcgaactctatcttaagagggtcaatgtctattccataggccctctcaactttcatggcgtagaagatgagctggattccaataccacaagaaacgtcggctatgctctccacaccaaattccttcagcctctcggcgcggtatttggcgacgacctcgtgggtggcgtagcgcagtccttccatgtccatccagaggtcgctccttgagaacttgtccttagccctgattctggccctggctatctccgctatcagctcccagtccttaccaagcctggcgcggagctttttctcgctatagcccctctttataagctcttctgcctctctgatcttctcctctgtgattccctcgagcatattgggaggttaagagagaggcttaaaaacgttgcccgccatgaccattgggggttagaatggagcgggaaaaaataatcagggcggtgtttgttgcggttgttgcccttaccatgatcggaacaatctggtattcgtacagttttgcatcgcgtccggacctgaacgattacataggagacgaggtctggtacgttccagcgagcagaaacatcctccacaggctcggcgttgacgtcttctacatccacaacggctcgtatggcgtgaacgttgtattttcaaacacgagtgcaaagataaaaaatctcgccatgacggattgggttgcagggatcaacgatgccagatacaggatggagtacagggagtttcctggagtctattatgagatacctgccgagaactacgaagattttctccagagattaaaatcagacctgccagatggaagctacgatgtaatccccgggttcaggtatcctgacaaggagaacatacagaactacctcaacacggagcacccgttcatggggaaggacatcataatgctctccatgcttctcctcggggacagaccaattgcctggagaatcccgggaataatagcgtttgccctcattgagctggccgttgttcttgcaacgtacagaataagcaaaagctatcttgcgtcccttatagcacttctcttcgtcgcggcggatccaacgctccaggcaacggctgtaactgcgatgctcgacatccacgtggcgttcttcgttgccctcttcgtccttgccatcgtttatgaaaggaaactctcctccgcggtgttgctgggtctagctggagctacaaagctcagcggagcctttggatggccggtacttttgtggaagtctcttaagagcgagaactcctttgtcaggttcttttcagcggttgttgtaatcccgggaattgcgtttttagtacccgaacttcctgcaataaaggcgatggggttcgagaggtggctcaacgagttccttgggagctttaagtggcacctcagctacaaaggtgcgaacccaaacacatctcccttctgggagtggttcataaactaccgtccgttcccgttccactttaacccaaacgtcttcgcgtcaactgaccccgtgctccttatgggaatggtcgttatgatactggccctgccgtgggtctacaggaaaaagccaggagttagcgagcccttctttattttctggagcacggttggactcttcgccctccaatactttctcgggggaaaaactcagttcagcttctacgccacggtactcgttcccccggcggctgtctcaatgggagtcttcctgaatgaggtaataagatgggaggccttcagggagtccctagcactctacaagataaaagtcctcgcggctgccagttttgcatggaaaaagctcagaccttccgaaagtagcggtcaagagtagcctgcctttcttcggcctttttctcgctctcaactttttctgctatcttcttcagcgtcttccagcccttcctaactatcggcggaaactcaccgtgctcccgataatagttctcaagaaaagccctcgttcttgggtcgcttgggtagccagagcctatctccccgtactcttctttgagcttttcaaccgccctgtcccttgtaaccttggcgaggattgaagcagctgagacgacgggaaagatgtcgtcggccttgtgcttcgcaacgacttcagcctcgaagttcagcctctccccaagctctctcgcaaagcgttcctcgtcaacgtcagccgcgtcagcgtagattacatcgggctttaccttgagcgagttcagggccttcgcgaagttctcaacctcgaactcgttgagcgtgccctccctggaaccaatgacatcgggaggcaattcaagaattacataatcatctaaaactccgagtatttcattgaaaagcttctcccgtctctttggtgtcagttttttagagtccctgaccttcagttcttcgagctttgggaggctattctcatccaccacaaccgccgctatcaccattggtccgataactggccccctcccggcctcgtcaatgcccgctatcttcattggttcacctcctaaataagagtgcaccatagacaatgcccagcattatcgtggctataccacttgggggtatggcggtgaagtaggcaagaaccactgaggtaagctggacggtcagagttaggagtagacttattccgagaaccttcctgaagtcagaacttaccatcagcgctatcgcaccaggaaggatcgcaactacttggagagttatcagaccgacggtctggactataagagcaccgattactccaacgagcacgtaaaggatcgtgagatacgccctcgcgttgcctccgtagctctcaacgccttccatatcaaagctgatgtacaggaagtcgcggtagaggagcagcagaacgaagaacacaaccgccccaccgacgataagaaccgtcaggtcgtccagtgtgacgaggaatatatcgccggttagatacgagactatgttctgggtcagcgggaagtagggtctcgtagccatgaccttgtagaggacaccgaagccgagaacggtgagcccagcgacgaagctggaaactataccgacagcggagtcagaagtgaaccctatcttctccagctgggctatgaggatgaccaggagcgttgtcactactaaggccgtgagaatgacgaggccgtagttattaagaagaagtgccagtatcattcccaggactgcaccgaacaggagagcgtggaagagggcgtgggtaaggaaagcaagccccttcgtgttgattatcgggcttagaagtccgagaaggacgctgaccattatgctcgcgaggagagccctgattagaaactctggaatcatattttctcacccccgcggtggatgtggaagtccccggttatgcagtagacttttccgccgaccgggatcacctttgccatcgggccgtagacagactttataacttcgtcagtgagcacttcctcaggcctgccgaaggctatcagcctcctgtttatgagcatcacgagatcccctatctcgaggagcgggttgatgtcgtgtgtcgtgattatcatcgtcactcccttttcccgctttatcttatccagaacgttggcaacctctgccctcgcgcttgggtcgagtgccgaaagcggctcgtcaagtaggagcagccttggatcgctcatcagtgctctcgcgaggagaaccctctgcttctgcccgccggagagctcgcggaagagcctgtccccaattcccccgagaccgacgaactccaggactttttcggctttttctattacctctccgggtatcctgaagtggacgaagcccttcctgtaaacaccgcccatggcaacgacttcaagcgccgttaggggaactctctcgtttagactctggctttggggaacatagcctataagctctctcgcctcgcagggtggtctctcaaatactctgagctccccagtgtactctctgtgaaagcatgctatagtcttcagtagggtcgtcttccccgcaccgtttggcccgaggaggagcagtgtttttccttcctccagggtgaacgttacatcgctcagggctggctgcccgctgtataagatcgttaaattctcggcttcaaccgctttcatttttcctcccgtactcacaatgtccggttctcttttaaactttgatgtgtactaagtggacaggattgtgaactctctttgcaaaaattttttaaagttctatccgtagggtctttggagaatttttgcagggctaagcttataagccctaatcacgactcacgggaggtgatgctcatggctggtaaaaagaagaacgacaggcatgttgaaggtgatgaggtaattcgcgttccccttccagacaggagcaagggacagctcttcggagtgatcgagcaggccctcggagcaggatggatggacgtccgctgtgaggacggtaaggtaaggagatgcaggatccctggcaagctcaagaggagaatgtggatgcgcgttggtgatgtggttatcgtccagccctggccggtccagagcgacgagcgcggggacatcgtctatcgctacacgagaacccaggttgactggctcctgaggaagggtaagataacccaggacttcctcagcggcggcgagctcctcttctgagccgcttttccatcaattagcagggatggacaatgagggaagagttccttgacagggaaatcgaggagatgctcggcctcagggagagaagagagaaggacagcgagctctacaagatagccaacgaggtcttcgacagaacgacgaaggaaacgcttgcctatctccacaggagggggaagatagagaccctctacggtgtcatcagcacggggaaagaggccaacgtcttcgcgggaattgatagcgagggcaaaaggatagcggtcaagatatacaggacttacaccaccgagttcaggcggatatgggagtacttggcagctgatccaaggatcggataccttcctaaggacatgaggaagctcgtcttcgtgtggacgaggagggagttcaagaacctccagagggcgataaaatatgccgtcagggttccagagccagtaatctttagaaacaacgtcctcgtcatggagttcgtcggcgatgaaaccccagctccacgcctcaaggacgttgagaaagagttgagtaaggaggacttcgaggggctttacgacttcacgatgggggttatagagcgcctctggaagcgcggtgacatggttcacggcgacttgagcgagtacaacatactcctccacgacgggccggtcgtgatagactggtcgcaggcgactgtgaggagaaacagaatgagccttgaactcctgaggagggacataaccaacgtctccaactacttcaggaagaagggcgttgatgttgaggatccagaggggaagttccgcgagctcgttgaggggtgagatcatggacgagtttgagaggctccttaagaagtatgagcgcgttgataaggacggcaggtttgagagagaagaggatgaagaagagatcactttcaccgctcttggtgagcaggaggagttcgttaaaatcccgaaggagaggatagcggtactcatcgggaagaaagggcagacgaagaaggaaatcgagagaaaaaccaagacgaagatagaggtggacagtgagacgggtgaggtcttcataacagcgacggaagaaaccgacgacccgctggcggtgtggaaggcgagagatgtggttatggccatcggaaggggcttctctcccgagagggccttcaggctcttcaacgagggggagacccttgaggtggtgaacctcaccgacatcgttgtcggcaatgagaagaacgccctgccgagggtcaggggcaggatcatcggaagaaagggaaggacgagggaaatcattgaggagatgagcggtgctgacattagcgtctatggaaagactgtcgcgataatcgggaacccgatacaggttgaagttgccaaaaccgccgttgagaagctcgcaaggggttccccgcacggtgttgtttaccgctaccttgagcggaggaagaaagacctcgagcttgaggccacaacttactatgaggccctcgagggcaaactgcccgaagaccttgatgaatttgaggaagaggaggagtgattatggccgaggctaaccagctcttcaaggagtttaagattcagagcgtcagcgagttcttcaggagaaacgccgcaatgctcggctacacgggcaaggtccgctcgctgacgacccttgtccacgaggcggtaaccaactccctcgacgcctgtgaggaagcaggaatcccgccctacgtcagggttgaaatagaggagctcgggaacgagcactacaaggttgtagttgaagacaacgggcctggaataccggagaagtacataacccacgtcttcggaaagatgctcgctggaactaaagcccacaggaacatacagagccgcggtcagcagggtatcggtataagcggtgccgtcatgttcgcccagataacgagtggaaaggccacacgtgtcatcacttcaaccggaaacgacgagataatcgaggcatgggttaagatagacgttgacaagaacgagggtaaaatcgtcaagaaggagaagcatccaaacccgaagggctggcgcgggacgaggatagagctcgaagttaagaacgtcaagtacatgcgctccaagcagggtgtcttctggtacctcaagctaacggctatagccaacccccacgcacacatcgagcttattgaaccggacggaaaactcatagtctttccgaggtcgagcgactacatcccggaaccgccggtcgagatgaagcctcacccgaagggagtcctcaccgatgacgtttacagattggccaagaagacgaggaggaacaccgtcaggaggttcctcatcggcgagttctcgaggataagcgacaagaaggttgatgaactcatcgagtacatcgctgccctcaggctgataaagaccgtggaggacaagaagctccaggagcagtactaccagaagcttatggagggacacgtcaaggctgttctcagggcattcaagggctacaccaaggtggtcaaacaggtcgccaaaatgatggagaagccgcccgagaagctcacctggcacgaggctgaggagatagtcgaggccttcaagtacatgaagttcttggcgcccccaactcatggcctaaggcccatcggggaggagaacatcgagaagggccttaagggaatactcaaaccagagttcgtgactgccgttaccagaccgccaaaagtctactcaggtggtatcccgttccaggtcgaggttggaatagcgtacggcggcgagattccggctggcttcgacctctaccgctacgccaacagggtgccgctcctattcgatgcaggttcgtgtgtgacaacccaggcggcccgctctatagactggaagcgctataaaatagacgaccttgacagggcaccgctcgtcctcatgataaacgtcgtttcggtccacgttccttacactggaacaggaaagcagagcatagcgagcgttgacgagatttacaacgagatacgtttagcaataatggacgccgcgaggaggctccagacctacctgagcggcaagcacaggaagctggcccaggtaaagagaaggaagaccttcgagaagtacgtccctgagatagcgagggccttaagcatactgacgggagaacccgaggagaagattagggagtacttcatcaggtttatcgagagcaagtttgcaagcgcggaggttgaagaggtagcagccgaggaggtggccgagaatgcctaagcgcaaaatccagagggagaggcccaaggagaagttctcctacgaccccaggaaagtcctgaagatgctcgacgagcacgcaaggaggatccttgaggacatcaaagccggcaaaaacccccacttcgacatcccgatgcgcgggctgagcaacgtatactttgatgaaaagtcgaggctcatcaagatgggcgacaagctctcgaggcgctacttcctcaacgttgcccatgcgagaaagttcatgcagacgctcctcataatggcctacgtgaagaggctcgtgagcgagggcaagcacgcgagccttcgtgaagcctactacgccaacaagcacaccattccgggaacgagggagaacaccttcgaagaccagagcgagagcgacccgatcatcgaagaccttgagagaatgttcggcgttttgagagaggagatgcacataaccgccgataggcgcggttacatctacggcgacatcgtcatccgcgatggggaagacgagttcaacgcgagcaggctcggaagcggtggatgggccgttccaggaacggtggagcacatccagttcccggagataaacgttgactacgccttagtcgtcgagacagcggctatggccgaccgtctcatcgaggaaaagttcccgaagagggagaacgccctcatcatagccacccagggacaggcctcgcgtggggttaggcgtttgatccacaggctccactacgaggaagggttgcccatcattgtcttcaccgatggcgacccctacggttggtacatatactcgaccataaagcagggttcgatcaacctcgcctacctcagcgacaagctggcaactcctgaatcgaagttcgtgggcatgaccatggacgacatcaagaagtacggccttgagaacgtcaccgagaagctcaagggcattccaccgaacaagaagggcggcccaacgggagactacaagagaatcctcgaggagatgaactacccctggttccagaacaaggagtggcagagacagctccagctcgccctcaagtggggagtgaggattgaacagcaggctttagccaacaagtccctcgagttcgtcgcgaaggagtatctcccagaaaagataaacaacggtgatctcctgccatgacgacgacggaagaactcgtcgcccaggtcaacaagatactggacgatataggcatagacctgggcgagctcttccaggactttgaccccgtcaggttagccctgactctaaaccgcaacctttccctccttgaggagcttgaggaggagcttgagcgcagagttggtgagggaggcccctccgtaccgatgggagacaggaaaaaccgcgatccacacctccagtggctctacagaaagaggcactacaggacgctcgccctggagaggctccgctcggcgataacggcccacaaaatcgcgttagctattctcgacgccaactacaccttcaagagggggagcagtgagataaaggcgaccgagataaaggacgagaaggtgaaggccaccagaaagccctacagcatcgggagagtggagatactgccttacctggcgtactcgggagacgtcctcaagctcctcgccagggagagcctctccgtgagggacgccttcaaggagatcaagggcaggctcagggaacagggaatggttaaaaccaggagcataaggcttgaggtggagtactttgagaacaaccgcctgaaaaaggcccacgtcagccttcccgccgatgcagacatcgaggccgagctgaggaagcagttcggaaggcgcttccgctggagggttctcagcctcgtgaagacaaggggcgtcctcataaacaaccactacacggtggacaacctggcactggcctatgcctcatttaatcccgaaaagggcgccgaactgctgggactcgacatattccgctactacttcctcacgtcgccagcggacagggaaaccctcggagttttcccggggataaagagctgtctcgactgccactactcaatcctcgacctgccctttaggtgggatccaaacttcaaaacaggccagggaagcctctacatcataagaaagtgcgagatggaggaacagctcgttggaaggaagaaggacctcagcggggttcctaactacctcctcggaggagttctactctacggcataagcaactacgacgagaagaaggttgccgaaatactgggaattcccgaggacgagcttaccgaggccatgaagaagttcgtgatatcgggccttgcaaacgtcctgttcaccaaggaagaggcgaagaagtttgacaagttcatgccgaagagcgacaaagccaagcagttcctcgccctgctccaggggtgattgaatgaaggtcagggtaaaggcgaagacatattcggaactcatcaggaagctggacgaggttctgaacgaggatgtgagtgaggtctatgtgaacctccgaccaacaaaggaggtagtcgtcaaaatcctagagcgctcgccgaacgtcaggaaaatcacgtgtccgccaagcctttaccctaaggtgtctcaaaaagtcatcatggccctgaatcagcttggggtggagcttttgccagagagctatccgaggggcaggccaaagaagtacgatgagaaaacgataaaacaggtcgttgaattggcccggaagggcgtgcctatgaaagagatcagcagaaagctcggaatacctctgaggactgtctactacctggcaaatttgtacaccacttcttactcttcttttcgaggggagtgattttccaaaccactgagggcagttatggttatataggagttgccccacattacctcggtggttcacgtgggcagatttgagatttccgaaaacgctctggaaaaaatagctgaaagcctcagggaagaatacgagggcagcaacgttgattacgttatagaggacatgagaatttcagagaacggggaatacctctcggtactcataagggacgactacgactccaggtttctccacatctttgatacgaaggggaacccgcttctggggtggaagagtggggttgggattccctgccaggaggacgttgtcgtttttccgggcgttgaaaacgtggctgtatttatgaagtgcggtactggggaaatagcactctatccgtttcaggatgaaaacccaaaagagcacgccctaagggtaactttctcaaggcttcccatctacgtgagcctgaccaacatggagagggtggttatttttggcgacatgagactcgacttcagtgcccccgccgaccttgagacagtcttcatacctcgccttcagggaggctacgcctttttccatgccatccatgacaccgacgatgaaatctacatactccacaccttcaaagagcccgggatgaaaaaccccaccctcaggatagggaggataaactatccgcctcacccatattattcgccgattgaattctgggacggagtagagacgatttcggcccattccccagcgcccccgacaaaaggcgcaataggggacatcgtactgagggacaacgagccaatagcggtcctcgggacgaagctcgggaaggagctctacatcctcacatccaagaaagcgcggataattcccctgccgggagagctcgtgttcacgaagttcaccgaaaagggccttttcctgcttataggccagttcaggggctatctgtacgggggctttgtcacgtacgaagacctccttcaaaagggctctctaaaactggatgacattgtggacagaacagtcttcggcaggtacaacccagaagcctttgacccaaagttctcgggaatatctaggagcggagacgttctcgttctgggcaaatcctctggaaaagtaagcgccagcggcaggttctactattacgttcgcccggattcgaactatctatactcttacgtctccacgcaggccgcccctggggagggggacattacttacgaccagttcacccagctcgaagaggttctcagaaggttcggcggcgtaatcctctacggaccccctggaaccggaaaaacgaagcttgccctggatctctcaagagatgccgataaggttgaggtcgttacgttccaccagtcgtacagctatgaggacttcgttgaaggttttaggcccgttgaaaaggagggcaaactgctctatgtcgttgaggacggcattttaaagaggcttgcagtcgaggcgattttccgcggcctccacccggacgagggagaggccgattacaagaagaaaaaggaagccgtccttgaataccttcaaacaggaaaaggcgagttcaaaccccgcgggaagttctacctaataatagatgagataaacagaggaaacatctcaaggatcctcggtgaggtcataaccctactcgatcccgataaaaggctcggaatggagtacgagacaaaaataaccctgccgtattccagagagcccttcgcccttccccccaacctctacataatcgggacaatgaactccacggacaggagcatagctttccttgacatggccctcaggaggcgctttgcgttccttgagatactgccccgccctgaggagctcggggatatcgaagtcggcggtgtaaaccttcagcacctcctctcgacgctcaacagggttatcgaggaagagcgcgggaaggactacacgataggccacggctacttcagggaggtcataaaggctaagccggaggagagggcaaaggcactcaaggacgtcttctactacaagatactccctcttctccaggaatacttctacggcaactgggaggcaataaggcgctccctgccggggttcgggttcatagacgagaaagggcgtataatcgagatggacgacgacgagttcattgaagccctccgcaagctggtgacagagaaatgatggacttcagagtcgtaaccctctacgagtttgagaacaggccactctcagaactgaagaaactcgggcttcagacaggggaaagagaactaatgaagttcgccgaggctgtgaattctctctacggcggcgacagtccggtctttacagtcacctacgatccgagaagggatgaataccacctgaagacccatgggagtgtggggtttgcgtactacctgggcgatgacgggattgtgcttgtgcaggtactgccaaagcccttcaggtacgacagggaggacggccgctctctgctgttcttccttcagctcttcaatatgtactaccagatgggtcttgagccgggcgaaattagggccttggtgtttgaatacggcaggcagaaggcgctggacgaaattttcaagtatctctacgtcctcatgctctccagagcgctgtccagaggactctactacgaatacggggagattgaggaaagctcccagaccgtccgcggcagaatccttgtaaatgaactcgcccggaggccagcatggaaggccgacctgcccgtcaggtactcactccttcttgaggacaatcccctcaacagggttctaaagggtgccctggaagtcgccgtaaagtctgcccgcctgagtgagacgaggaaagtcggaggaatacttctcgacctcttcagggacgtgggtgacccaaaacccggcgacttcgggaaagtttccttcaaccacctcaacgagaggttcagaacggtcttcaggctggcacgggtgatgtacttcgggctggccgcgggaggttcgaggaagttccttccaggagtgttcatcaggatggatgagctttttgagacgctcgtttacaggacgctgaagaccgtcctcgacaacgaagcagaggtgagattccaggttcagctgccccacgtcataaaaaacgcgggcgaaatcgaggctagatttggcgcactcttcatgatgggcaacccccttccagacatagtggtcagcaccgacgaaggaacctgcgtcgttgaggtaaaatacagaaacctctacgtgtatcacagaggagagaatagggcccatagaaaactcgttaggaagagcgacgagctttatcaggcctacacgtactcccgccttgtcagcgagtatttgggggcaaaaagagttccagttctcctagtctacccgcggctcgagggaatttacaaccactggattccaaacctctttagcgcgcgcccggaggatacctttgagttcttcgacgggacgagggtgggggtcttcgggtacgagctttcgatgataggggacgaaatcctgctgaggaagaactcggtagttatcgatgaggacaccgccgaaaacctgaagtctttcatcctcggcctctgctcttcgggagaggtttaaaaacccgcaggcctactccagtcgggtgagagaatgttcgtcgagacacaggaagaagttcccgaaatcagagagcctctaagaagggtcggcataacgaacctaaggacggtcgccaagataaactggaagggaagggagtacacattccttccgctcatagaggtaaccatagacgtgccggccgagaagaagggcatccacatgagcaggctcgtggagagcataacagaagccatgagcgaagctgtcgaggaggaagtggcaaaagtccacagctccctagaggagcttggaaagtccgtcatagagaggctcgaaggaaaacacccgcataagagagctgaggtctggatcaagacgcacctgataattccgagaaccactccggccagtaaaaagaccagctacgaaccctacgacgtcgaggtcggcgtcataaagaatgaggacggctccttcgagaaggttctcagggtgagggtgataggaaacacggcctgtccgcacgccatggcgaacaacaacggcaagacccacatccagagggccatcggcgagctggagataagggcaccctttgaggaagagattccacttgaggagatgatagacgtcgtcgaaagctccttcagccacccgacctatacgctcctaaagactgtggacgagaacgccgtcgtccagggaatgttcgccaacccgaagttcgtcgaggacgtggccagggagatattcgcaaaggccaaggagcgcttcaggggcagaatccacgtgagggtcatcagcaacgagagcatccacaagcacgacgtcatagcggagacgtggagctgaagggaaaatttaatttgtccttttacaaatctttttgtggtgagaactgtgagcgttactctggttgagatacagaggaagatagacgagatagagaagttcctcaaagagctcatagaagtaaaccttcagctcattgaagagtccgagccagaggaatgggagattaaggaaattcaaaagcgcagaaaggacgagtttatggaatgggacgtggtcaaggatgagctttgagaacagaattctcataagcaaaagagccctcaaggaactcaagaatgtccccgaaagtcagagggacattataaaagacagaatctccaaactcgctttctttccgctcgtaaagcttgacgtccaaaaactgaaaggatacgacaatgtctacagactccgggttggagagtatcgggtaatatttgagtataacaaagaagagcgaattgtgatgatcctgaaggtaggaaaaagggggaacgtttattcctaaagaattctcagagaaaatggaaaataagactcactccttcttcctcatgaccttggctatcttgtatgtcttgccgttgcactcgacttccccagttatttcgattatcttcacgctgtccccgtcaaagagcccctccggcttgaaaagatcccttttgtccaggtcggggcagtcctcgagcttcagcgttatcaccgagcccaccactgcaagcctcggctctattgccacctctatgctcggctcgaccacctccactaccctgacctttccctcgtgcagcgggcaggagtgggaaggcatgctccttaccctgagaatcttgtagcgccttccaggctcaaggttgccgacacaaacgcccgcgagcttgcaggtcttgcagggctcggccggaccgtagaatatgaactcaacccccggttttgcgagcttttccccaactaacgtgattatggccactttcaacacctcctgatggatgatcatatcactcctgtgattttagcggccttttcagcggcctcccgagttaaaccgtcctttccgaggatggtgtagcgctcgggccttatggtgtgggctatggtgagcgcctcgattataacctcggggtcgatcccaagttcgtatgcgtttgtaggtgcgccgaccctctttaaggtttccctaacgcgctcccacttcataccgtgcaggtaggccatgattatcgtcccgaggcccgtctgctcgccgtgaagggcgggcttatcgaggagcatgtctagggcgtggctgaagaggtgctcagcgccgcttgctggtcttgaagacccggctatactcatggccacacctgtggagatgagcgccttgatgaccttcctgacggactcctcgtttccgaggcggattatatcggcgttccgcattaccatcttggcactcatgagtgagagtgatgcggcgtactcgctgtagtattcacctttgattctatgggcaagctgccagtccctcacagccgttaagttgcttatagtgtcgccaacaccggccgctaagtagcggtagggtgccgttttgatgaccttgacgtcggcaatgactgcaactggtggaacggccttcacggacgtttttgagccgaggtcctttattgaagcgttcgcactcgctatgccgtcgtgggaagcggttgttggaaagcttatgaagggaacgcccgttttgaatgaagagagcttggcgacgtctattatgctcccgccgccaactgctatcacccagccgatgccttcgtccttgatcttttcaatcgttctctcgacttcctccatcgttgcgccttttctgatggtgagggagctcacctcgtacgcagattttatcgcatcttccacatctctaccagctatttccttcgtttttgggccgtagataacgagtgcctttccagtaaggcctatcctcttggcaacgctaacaacttctcccgtgaggttctcgcccagcagtacctcccttgggagctgcatgagatgaatccttctctccatttttatcgccgaaaaactattggtgggaaaagctttaaggctatcggaagactccctacggtggtcgaatgggagttggggagtttttttacaggtatttcgttgagccgataaaatacaaccagggctacaaccctgttaacacgcttgtctacgcggtaatccttggaataatggttctcctcctctaccgaatacttaagaggatgggaataaggatagacgaccgctttttcctctccctgatgccctacatagtcctcggcccgctgatgagggccataacagatgagggcctgcttccgaggacttaccttacagttagccccggcggctacttcgtcatagcggcctttgcgatagcttccctctttgcggtgtggagacatctgggcccggatgagaggctctacccgatataccgcgacttcggctgggtgctcgtgggagggctggttttcataatcataatcaactgggggaagctttctgtcagatgggagtacttcaagtacttcatcccgagccttgctgtctccgaggcctttatctgggctctagcaaagaagttcaaactgatagtcgacaacaaagtgctgttctacacccacttttacgacgcgaccacgacctttgtcgggatacagttcttcggcttctgggagcagcacgtcctcgcaaggacgctcatagacctaacgggcacacctgcagtaatgtatctggaaaaattgctggttttgattccagtcgtttacatactcgacaggatgatggaagatgaagaccccgagctgataaatttcgtcaaactggcaatattcgtcctcggcttcggccccgggacgagaaacctgcttatagccttgctggggtgatattatggagtttaactggagtgagatagcgctaaataccgccaaggagcttgaagagaaaataatgccactctttgggacaaaaaaagccggcgagaacgttgggactaacgtgagcggagacgtaacaaagtacgtggacaaggtcgccgaggacataatactcaagaggctcgtccctctcggagtaaacgtcgtcagcgaagaggtcgggacggttgacagcgggagtgactacaccgttgtcgtcgaccctctggacggttcctacaacttctcggccgggataccaatcttcgccttcagcctggggatcttcaaggggaagaagcctgtctacggggcaatctatgagttcctgcctgagaacttctatgaagcaaagccagggaaaggtgcgtacctcaacggagagaggataagggtgaacgaacccgaaccggggaaggaagccctgagcttctatacccggggaagatgcctcggtctcgtgaagaaggtgaagcgagtccgcgtgctcggggcgatagcggtggagcttgcctacgttgcgaggggctccttagatggggtctttgacataaggaactacgttaggccgacggacgttgcagctggagtcctccttgtgagggaagcgggcggaatagtaacggacgaaaggggaagggagttcgaagtcaagctcagcgcaacggagaagaccaacataatagccgtcgcaaacgagaggctcctgaacaccatcctggaggcgatgaaggatgagccttgagcactacttccaccgctacgggcgggcaaccttcacgctatttctaatcaacgtcgccgtttacgttgtcgaggcagttttgagcggcgggaacttcctgagcataaggggcagcgtcctggcactcctcggtcagtggaactacgcggttctcaactacggctactggtggcagctcttcacggcgatgttcgtgcacgtcaacataatccacatattcttcaatatgtactttctcctgacgatggggagacagcttgaaagggttctcggcccgaggagggttgtgatgacttacatcgtctctgggcttgttggaaacgttctgacgctcttcctcaagcccccaatgaccgtcagtgcgggagccagcggtgctctcttcggaatagtcggagcgttgataacgataagcggtgtcgtcggtggaaatatgcaggcagccatgatgaacgcctttttcctgttcctgataaacagcgtccttcctggggtcaatgcatacgcccaccttggaggcctgctggcgggcatcgcgataggctactactacggaaaggtcatcaggagaaggctcacgtggcagtacgcgtacggcgactactggtgacgccgaaagatttaaaaatgccctccttgaggtataggacgagcgctcgggaagtgccggggtagcttagcctggtcagagcgctcggctcatagggccgctccccttcgggggagcctgagaaaccgagaggtccggggttcaaagccccgccccggcaccattcagcccttgcttcgcaagcgctggcggaagagtagtatgcgtttttagcgagctggcttttgagtgggtttacgcaccaatctgctgatttagcaggattttctcacaatatagtgcccaaagggcactaaaaagaaagtcaaaatcacaattaacaagagatgttgagagtaaacccgcgtgaagttgctttctggtagagaatacactctttgacaggaaagtcaaaagaaagggagcacttttggtgaagctttttccaaaagtttcctgcgcgacgttgaagctccgcttcaacgcacggaacggtagttccattgagtttgatcaaggctcgtggttcttcttagaattgctccaccacaaggattttcaaaatactcaagctaaacattaatgaatttcccaattttggccttctaaagggagttttctccccttgacgccctacgggcgtcgattaaaaagcaaactcacatcgagaacccttactaaaattgaattcacactcatgcagtgagttcctgtgaatgaaaatctccctagaaccaccttctaatcaagaaccacgaactttgatgaaactttgcaaagcaaagtttcagcgccgctttcactaatgttcaagcgtcctaaacggatgacgaaatgttcatgactcttctaactcacctgtttgaaaagttaatgtcttgcatcctcgctcccttttgatagattctcgcttaataagcaattttaagagggttactcacagcatatcacccgaagggcgttaaaaaggaagaaaacccccacttctctgtccatcaatcaagagaatctaactgcattaagccaattctcgaagacattcaagcttttggtggagctttttctaaagcccctaactagtactcagtctctagactgaatgttaggataccagagcaaatgcactgattactttttccttccgaagcttgcccgagtaccccaactgtttcttgcgaaaaccttttctggaaaagcgtgtattcttatcccgatgaagataattaaagtcccctccaacgacagcattgggattataccctacggttctcctccagaggtcgagcttgagatacaagtcaagcagcgaaaaggcgagcttgtcctctggataacaaacccaaacaccacgaaggtcgagatcgacaacgaggttgagctttacgagttcataggctactggcagaagcttgacccagggatcgtattcctgaggaagatgattgtactcataccaggtgagacgatcgagcagaagctcccccttgagcttccaccgggcaggtacatggtagtcaagcacgcctacgtgaacggggcgagggtcagggtggagaaggagttcaccgtccgttagaccagaaccttttgaggtagagtctcatcgtcgggagagttactggcttcatagtttccttcatccagtcgggcagatccttccttatgctcctccagagtacgcggtagtcgaggattacgatgctccccttctcttcagcggagcggtgaaccctcccagctgcctggacgagctttctgtgagctggaaggtaatagccatagtagcgaccctttccagggaacttcttctcgaagtaccttatctgggcctgaaccctcggcgtcggcctcgcataggggattccgacgaggacaacgccgttcatctcgtcgccagaataatcctgtccctcgctgtttcttccccccatcacgccgagcagaacggcgccgtttcccttcgcgtgggccttgaactgggctatcatgaggtcgttttccctcgaagagacaccctgctgttctatgaaaactgccctcccagtttcctcgagctttacgtcgagatttgccgagagaaggccctggagaacctcgtaggaggccgtaaagacgccgacgttcttgggaatgagctttaccgcttcaactatgtagtcgaccattttcctgtaagcctggagggagcgctcgtctcccctcgtcgagacgtccttggcaaccagcacctgagcgttctccctcttcaccatcctcgggaacttcttcatcctggcgttttcaatgcccataacgtccctgaaggcctcaagcggcgtgagagttccggacataaatatcgcgctctgaacgtcttttatgaaggacagcgcccgtgacgggtcgagggcaacgagctcaaggctcatacccttctcccgcgtcatcaggaagaggtagtcgtctctaccgatgagggagagccacagcaggaggaactctccgaccctaccaacgtagctcctcgggggtttacctttctctatgcggtcctcccttatggcatccccaaccgaaaccatctcgttgagcgtcttaacgagccagcgttcgtttatccccagaatttcaataacatgggtaaagaccagctcgggctgtacaggggcttcttcgacgtctctctcggccagcttttccgagtacagcttctcaagccccttcccgagaatgctcaggaagttagctatctcgtgctccctgtactcgtcggcctcctttattgccctgtttatcgtgtgtatgctcaacctgtcgctcaatgccgagattgcctggtctgggaggttgtgagcctcgtcaaagatgacaataaggtcggagtaatcaacgccgagggagcttatcaggctctcccttatgcttggacttagggcgtagaggtagctggccactattacgtcggctttctccgctattctcttggtgaggtcgtagggacacagctcaagcgtctcggcgtagttgaggatctcagccggatggctcggttcggtcaggaaaaaccgtatgacttcctcaaactcggcctttttcttcttctcgttctcatagaaggggcacttcccgagcttcttcaggtttttacagacgaccatggcgttgtatgcatcggtggtgaactgtttgaggtaggtgtgaaggcacagctccttcctgctcctaagctcgacgccagaaacgggcttttttcgatggatggctttcagctcttcaataaccctgtccatctgcctgtgggttctggcaagatagagaaccttgtagccgtactccttggcgaaggggagaactccagcaagaacgctgatcgtctttccaaagcccgttggagcttcgactatcgcgttctcgccgttcttgacggcctcgccgatgagttctatgaactccctctggttaggtctgaggttctcgtagggaaagtactcactcatgggaaagggttttaaccggcccgttttaacctttgccgtgatgggcatggaagagcggtggggaaaaatagcagagtacatcgtggaggcagtgctaatagcgtggctcggctatttgttcctctaccagaactacctgctccacaactggcaccgcggtctgccacttccgagtaaaacgccctacataatcctcggtgtcctcatgggggccacgtttctggccttcgagctgtggaggaacaggaatgtgctctttgatggaagaagtcaggggatcgccgaggttcatcccgaaaactcagtcccagagaactttgaagatgtatcttcctccgatgccgaggtctgaaagttcatcctccgaaacgccgagaaggggttttttgatttccactattgccagactcccatcttctctgaactcgatcccttcgagatttccgcctttcactttaatcttgatttcccccttccctgttccaacgatctcaaaagtgtcttttcctccaaagaaacggacgtatctggccagatgaatcagatctccaggtttcaggtcagatactacgatcttgccgtgttcctgccttatttttggtataactctctcgtagctctcagaaaacgccagggcagtcctcccaaagccctccgcaattttgaggagcttttctttagaaacctctcatctagatcggccgaagccctagaaaccagaaaacccccatcaagctggatggtgactattagaagccccagaggggacttcattatgtaagttgtagtgttatcggcgtacgtcatctcaaagcttcctgagaatgcgaaaccgaacaccttcccagggaggcgtattgagacagtttttccatcaagcgacccgggaaacggcagggaagctataaggacgtctggccttgatgttatcctcttcagggcctcccatgaaaatctggccgggactttgaatattcctgattccatatcaaaatcaagactcaaagagattgcttataaaaatttgggaagaacgtaaggaatcaaagctcaagctctccgatgtgctccagaaccttgaccatcagcttgactccagcgtcaacatcgcgctcatcaacgacctctgcgttggagtggatgtagcgcgccggaacgctgatggctccggtcggaacaccggatttgttgaggtgaatggcccctgcgtcagttccgccgccgaggagaatgtcccactggtagggtatctcgtacttcttggcgagctcctccatccagcggacgatcgttggatggcagatgaccgagcggtccattatcttgattgcggtaccctttccgagctgggtgacctgcttgtgctccggcgttccagggacgtcggccgctatggtaacgtcaatggcgaagccgtagtccgggtcgatgccgaaggccgagaccctcgcacccctgagtccgacctcttcctggacggtggcgacgaagtagatgtccgcatcggtctcgccaagctcctgggcggctttaacgagagtataaacagctatcctgtcgtcgaaggctatgctgacgagcctgtgctttccgagcctctcaagtctgccgtcccaggtgattatggttcccactctgacacccatctcctcggcctcttccttgctctcggcgccgatgtcaatgaagacctggtcccaggtgggagccttgctcctctcctcgggcttctggatgtgcggaggaacgcttccgccgacaccgtagatgaacttatccttgtcaatccagaccttgaagcgctgggctatgagagtcctcgggtcaacgccgccgaccgggacgacgcggaggaagccgttcttctcgatgtggttcaccatgaggccgatctgatccatgtgtgccgcgagcataacctttgggccgttgcccttcttgtgggctatgacgttgccgagcttgtcaacctttatctcgtccacgtagggcttgaaggcctctataacgacgtccctgacgccgagaaactcaaaacccgaaacaccaggggcctcaactatcttcttgagcagttcgtagtcgaccattcccatcaccttccgtttagatttccatctaaaagtaacgcccgggatatttaagggtttaggtgggagagcagttcctcgatggttaggcagtcgtcgcactttctcctgaagtcccttgccacgaggacagacgcgtcgtgtcctagttatgaggcttcaaatattatccacctgctggattatccagtgaccggataaaagtttgaggttattacccttcccctaccctaacaattatgggtagatcctcacacccatcgccttctccccattgtcgtaaatctccttgattttgaaaagataagcgggcgtcttgctccagtccctcggtttctttggcctgtgaaagacgtcgtggacggcgtttgtgtactcccacacctcgtcgtcctcgtgcacctcgacctcgcaccgaacctcataggaggtgctcgggggcgtgaagaagagcaccgttgcctcgctgcttcctcccgtgatgtttgtccacgtgtgctttttagccagctcaagggataccagcttggtgaagtctattttctccctcacatatatctcgttgaggagaaagttgagagcatctctggggttgtagggctttttcagctcctcacggagcttctggagggtctcttctaaatattcctccttgtgaatgaagccaatacccttgattgacccgttcggccctgctttgccgcaggttattattgccgggttgtgccgcgtgaagccgagcaaaaccgaggggtcgaacttcccctctgcgagctttcttattcaagcaaccctctcctcgaaggcgtatttgatgaactcctcgggtatcattgaaccaccgttcctttttgccaccaaggtttaaaaacgtctttcggtgtaggtttactcatggcgaagcccgtactgctcaccctaaacgtcgttccatgcacgttccttaagcgtctcaaccgcttcgttgctctagtcgaggtaaacggtgagaccaggaaagcattggtaacgaacactggaagattagaagagttcatgatccctggcagaaaagccttctgcgttccgaaggaaggggggaagactgactttgttttagtcgcattcgaagatgaagagggcaaaggagcagtgatcgacaccagaacgcaggcaagagcctttgagagggcccttgagctaggtctcgtcccctggctcagggactgttccataaagaagaaggagatcaaagtcggaagctcccgcctcgactacctctttgaatgtcccggcggtgatgtctacgccgagatgaagagtgccgtcctaaggggcggtgagaaaggggaatatgcaatgtaccctgactgtccatcaacgagggggcagagacacataagggagctcatcgagctgtcgaaagctggaaagagggccatgatattcttcatcggcgcaatgccaggtgttgaaaagttcaggccttacgagaaaggcgaccccgagatagcgaggctcctcaaaggggccagaaaagcgggcgttgaaatccacgccctcagcatctcactcctgcccgatggaaaaatcgtcctcgaaaggcccgagcttgaggttgaagtatgagaacggttttaaacccgatgtccaagatgagtttaggtggtaaagatggcaatagttgacgtaaggattctggtagagggtgcaagcgacgtagaggtcgtaagcaaggccctccaggggctcgcccttggaagcgagtacaacatcactatatcagcgataatcccgactaccaacgttgagatagcgaagagcgctgcggccggcgcggacctgcttatcatagcgaccgacgcggacagggtaggaagagagcttgccgagaggctcttcaacgagctcggtgagatggtcggccacattgagagaatgaagctcccgctcggccacgaccttgagcacgttgatgttgagctagtcaggaaggaactcaaaaacaccctggtaagggcgggtctcaagagtctccaggttcttcctgagtacatggagctcaggaagcagctcctcgacatcaaaggcaagtacgacgagcttgccaacgagtacgaggccctctacaaggagcacgaagagcttcagaagaagtacgatgaactctactcggagtataagaggctggccagcgagaacgagggccttaaagagctcctcgaaaagagggccaggccagtgaagatagaggacgcctggaagaacctcttcccggcagagcccgtacccgacgaaaagattctcgcactggcagtcgagaagctcggccttaacggaaagataatagtcggccaaggctacatctttgccgaggaggatgccctgatagaagagctcctcaagactgtttacctcagcctcgcggtcaaggatgagcttgaaagcgaaaagcccaaagcggagccaagggtttatcctgcagagccaaaacccgtggagccggaaaccgagaacatagttgagaaccccgaggtgaagccagaagagctggagaggctcctgaagggtatggacaatgagtgagccgaacgaggtcattgaggagttcgagacctatctggaccttgagggtaaaagcccccataccatcaggatgtacacttactacgttaggcgataccttgagtggggcggcgatctgaacgcccactccgccctccgatttcttgcccatctgaggaaaaacggctactctaacaggagcctcaacctcgtcgtccaggcgttgagggcctactttcggtttgagggccttgacgatgaagccgagaggctgaagcctcccaaagtcccgaggagcctgccgaaagcactcactagggaggaggttaagcggcttctctctgttataccgccaacaaggaagagagacaggctcattgttcttctcctctacggcgctggattgcgcgttagcgagctgtgcaacctcaaaaaggacgacgttgacctcgacagagggctaatagtggtaaggggcggaaagggagcgaaggacagggtcgtgccaatcccgaagtacctcgccgacgagataagggcctacctcgagagccgctccgatgagagcgaatacctcctcgtcgaggacagaagaaggaggaaggataagctctcaacaaggaacgtgtggtacctcctcaagcgctacggccagaaagctggggttgaggtaacgccacacaagctccgccacagcttcgcgactcacctacttgaggaaggggtggatataagggccatacaggagcttctcggccactcgaacctctcaactacccagatatacaccaaggtaacagtggaacatctccgcaaggcccaggagaaggcaaagctgatagagaagctgatgggggagtgagaaagcttcattcttccccgagctcctttctcaggcttttctgggcgagagtcaagagatcctctggggtgagcacttcaacggtttttggctctgactcaaggacgctttcatcgggaacgacgagcacttttctacagttgaaccttgaaagcttttcctcgattttccaaacttcctctctctttaccctgctcttccatttcacttcccccactagctcaagacgcttgaagccctgaagggctatgtccacttcaaggtcaggttcttcgattctaactggtctgagcccgtatacctttcccagcaggctctcgatgtatttttcaacgtgtctcgggactttctcattaacggcactccttatgaactcaagtggggtttccagctcggtgtacgcgtacttggagctgaggtagaagtgcaaatccagcaggggggatgctatggagtaactgaacctcctgcgttttcggaagatgggaactttccgtatgatgtccattgtggagagaactttgaggtacttctggatgcttgagggcgagtcaagaagtccctgggacaccaggtagctcgctatctcgccgctcttggactttccatccgctactgcgtggagaatcgctcgataaacctcagaaaacaggatttcttcttcagtgaaagcctcgccgattaaatcttcaacgaccggccctgatgagtacaggtattgagccatgaactccctcagtggtggcttgtaaaggggaacaagcataggttctctaagatacgtggaagcttccacaagctcttttccactcacttcctttgaaagctcgatgataacttctctctcgtcaataagtccgatttttatcggcagcactaccccaagtaagggactttcctttttggagagaagccgcagtgagagccagagcgttgacgtgaggagaaccagatccttttcacttctcccagcgtttgcgtgcaggaaatcgaggaagtcctcagggagtctatggaactcatcaataacgattgttttctccccaaggttcttggatagctctttcagcagttcctgatatgataaccttgcaccactcctcctctcaaggatggctccatctcgctgtacaaagtaatagaggtcgtgatctaagaacctgcttgctataaagctcttccctgtttttctgcggccgtagagcatcttccagcctggatatcttagggttttcatttcaattcttctgggaataattctcatgagaatgattctgttgagaatcaatttaagcttttcggcaaatgtgataaaaatttggaaagaccaatcagaggaacttctcctcgatgtatgcccttatcagctccttcgtggcgagcattcccttaacgtgtgttctctccatgccgtggctggcgtggactccctggccgatgagggcaaccctgaagtcccagccagccctcaaggccgcgctcccgtccgagccgtagtatgggaagacgtccacggtgtaagggattcccctcttctcggcaagttcgattagtttggtcgtcatctcgtagtcgtaggggccgctcgaatctttggccgctattgagacggccgtctcctttccagccacgccttcgccaactactcccatatcaacgactaggagttccttcgtgctcttgggatagcctgccgaaccgccgtggccgacctcctcgtacggcgagaagaagaacgcaaccgggagcttttcaagggtctgactaaggtcgagcatgaggtcaattagcactgccacgctcgccttgtcgtccaagaagtgggccttgacgaagccgttcacgtactcgaacttcgggtcgaaggcaatgaagtcgccgggccttatgccgagcttttcagtgtcttctttcttctccacctctgcatcgaggcggatgtacatgttctcctctgttctctccttctttcctgcctctttgttcacgtgaacgctcgggttcttgaggaggagcgtcccgcggtagcgctttcctgagcgggtgattatcgtgcagtactccccctcgaaggcaggaaggagaaggccgcctattctcgtgaagctcagatgtccgtcggggaggatgccctttaccatcgcacctagagtgtcaacgtgtgccgcaatcacgagttcaggctcggggtggttgcccgctatcagggcgcccttgttggtgtagtaggtcttaatccctgcctcggtaagctttttctcaatgtgctccataacttcccttgtgtagcctgttggggacggtatctcaagtatctccttcagaatctcaacgacgcgctccatgttatcaccgttcaaaaatccatcgaaggactaaaaaggcatcggtcagagaagagcctttaaggccatgaagaggccgataacgatgagagtaaggacaaaggtaacgcttattgcctcctcagccttcagctggtactgtgcaagaatcgcattggcggctatcgccggcggcatgctggcctcgaccagaaccgagtagaaaacctctgggctggcgttcctgagggtgaggaagacgaagatgaatggaatcgctatcctaaaggcccccacttcgaggaacttcctgagctcgaacctgctgagggttatccgcgagccgaagtagattatcaggagcgggatgctccaccagccgatcgtcttaatgggctcgatgatccagcccggaaggcggattccagctatcacaagggcgagggcaagcaggttggcgactgtcggcgggaacttcagggccttttcgatgctcctccttagtgaagcaccgccgctggagtagtgggccgctatgaacgtcactatcgggattacgatgaggctgttggttgttgagtagagaattgcgggggttatgtcgtccaagaagaggctcgctatcgggaagcctagggccgcggtgttcgggtaaaccgagagaaccatgagtgcaccagcccaggggtcgtttttgagaacgaacctgccgtagaggtaagaggagccaagacttatgcctattacgagaaagacgtagatgaaaaccgtctttatgctgagtaagtatcccaaatccttgctcgcgacgttgccgaagacgaagaaggccagaagaatgtcgtttgtgaggattcggatgtagtcaaagggcttctcagacttaaacagacgcttgagaacgtatccgaatgctatgagcgcgagcatctcgtagatgttcatgttaaaagctaaaattcagcgtttaaaaggatattgaactaaaaacattaaatgtactcaaattcgtcgctaaattctggctcaaatccgcattttcttattgcctcttctagtatctctttaaactcaagtggagcttttttctctttgatcatcatttcaaataatttgggagttatttcggcttttttgcgatcccattttttatgttttttagtatataagagctcgtcaatcttcttaaggatgtcctcacagggtgatactctatttattgccctaatcatgttttgttttctctctatctctctcaaattagactccattcttttgaaatatttgagatattgttttttgaaatactctttactcttaattttgttgactttaagctgctgatccccaattttggttatatatttcgatttaatgtatccctctatgaaatacttttcaagaatattaagaggaatgtagttttcaatctctcttctttgaaggatatgaaccgtgagcccatattgctcgaagttttcttttatcttaagcttttcaggttttggtttacaacctccactcttcttatcttcttgctctccatctgaatcaattacaacaactccattcggatttagtgaagcaagaccattgaataacagcgtttcggataaatctcggatgttgcctcctcctaaactaacaattgaaatattgtactcttcccacttggggcatatagcctttgcaattttactaaataccttaatctctgtttttccttcgacgtatatgaccccattggataaaaacagatcactgggagttgccccaatttcttcaaggatctcagataataccttaggcttttcgaatgttgtaatctttgtctccccattctctcttcgtataagccatattgactttaaatcacttctgtccacaaatattgttgaatgggttgttatcaaaacttgagcctcattgcttatgcgttttaatgcagagaacatttttttctgagcttcgggatgtaaatatagctctggctcttcaaatagaagtatataaccttttcctgcaccgacttctgcccatattctgaacattgccaagagaaattcacttctcaatccagctcccctttgctcgagaggaacactatctggcaagtatttatctttgatttgtattttaggactaaagttaatttgaactttattaggctcaatttttatctcttcaattgaactattgaatacagttaattccttcaaaatttttttagtgagcttcttagactctctgctaatcagattttgcaattctttctttagctctgttatacttctctgcttttcttttccattttcttcattagaattgcttttattttgtttttctaaaagtggcaaaagaagctttgacattaaaaaaccagatttttgagttgtttctgcaattgcatctctaatagccggaatgtaaatgacctctggaagatcatttaatatggtattaatgagttttttatctttaattttaacccatttgttcttatcctcatcaaaatattctacaatagtatctcctttataatttcgtgaattaagtttatctttttcaaaaatcttttttatttttattttagtatttgtagaactcttgttgttatatctactgaaaaatgcccccagtccctttgcagtttcattagaatcatggtttatgatatgcataatctccgtattttctgtggcatcaaatatcaatgaaatttcaatgttttcattggtacccttatgaaaatcatctttggttactttatcctcttctagaactatcctaattgcgttcaaaatatttgatttcccagcatcattttttccgattatcgtgacaaaattttcaaccattaagtattcatcgtttaaaggaagctctttaatggacctatagttcctaatttttaatccgattaactttaataatctcataaacttcaccagtaggtatatccatgggtctctatttaaaaattttacttttgatatatagttacgagaagagtattttataaagaaccaaaaagataaataaaaatcataacgatcaaattactttcttctcctcggagacactttttccctgttattgaacagcggccaccaggccttctctccgaagagggccatggttgctggcccgatgaagtagaccactgccgtcgccgtaaggagcactccgagggcgagggcaaagcctatctcccttatgccccacgtcgcccctgtcatcagggagccgtaggtggccgcgagcactgccgcaaggccaacgacgagggtatccatggttccagcggcgactatcagggcctcctcgggcttcctgcgctcgaactcgtccctggccttaactagatagaagctgttgtagtcaatgccgactcccatgagcactatgaagaccagcatgggcaggaaccacatgacctgctgtccaaagaccttctcgaagagccagctggagacaccgatgctgaggagcacgcctgccgctattgtacccatggtcgttatgaccgctggaagtcccttgagcgtcgggattagcgacaggaacatcaggagcagcgccacagggaatatcctgtgccagaagacgtcgttgatgaggttgctgaggtcaagggccaaggcggtgtttcctccgaccattccgtcagctatttttctcgagtccttctcgtcctcaacgatgctcctaatctccctaaccatgtccttcgagcggtcgtcggttgctccgtactcacccgtcacctgaatgaggaccttgtgcctgtcctttgagatgtagcggtctccctcgaacttcgtgagctcatccagggtcgcgttgtcaattctctctccgaacggctgggtgatggtgtagacgtacctgacgccgctgacctttgatatcctgtcaaccagctcgtttatcctcgccagatcagagtcgcttaccttatgcccaaggtcgatgacgacataggtcggggaggtaactcccgctccaacggtgtcctcgctgagctggaggaagtgataggtctcgctgtccttcgggatgaatagcttgatgtcatgggttccattgaagtttacgaagttgtaagcagcgggaaccgctatgaggagggctataattgttacgactttggcgtgcttcacggcccactccgctatcctgcttctctcgtggaggtcgatgttctcaaggtggtgctcgatgtgtcttggccaccagaagatcggcttgtcaccgatgagaacggttattgacgggatgaaggttaagctcgccaggaggacgactatcaccgcgagaggggctatgatacccattgtcttgaatatcgggaactcgtaggcaaggacgaagctggcgaaggctatgatgtcggttgaagcgctcgccagaacggcgtcctttgccctcttgagggcctcgctcgcggccttgttgtggtcgtagccctcagcgaggtattccctaaacctgtggaggtagtaggtcgagtagtcaattccaaggccgagagcggtcgttacggtgagcatctgcgcccagctgccgacatccagtatgtcaccctttgccaggaggtagaggattccaagggccgtgagtgtggccgttgcgacgccagtgaaagggagtagagtcgccagaaaggccactcccataagaatgaggaggactatgaacgctcctgcgatgctgaacttggtggtcttgtcgttgtcctcctttccgtacttgattgcctcgtaggtctggatcggagttcccgttacatatacctcaacagaaggcgagagctttccgaactccttcagggcgacctccttggcctttatcgagttctcgtactggaacttgctctgcttttcgaggtcgttaacccctttgagagccttgggtacgaagataaccagcatagtcctgttgtcgtcgctcttgagcatgttgatgtagagtttggccttgttgtagagggctgtgtagacgtccttctcgacgggtgcaacgtcttccctgtccatcccttctgggttgtctttgaatttgaacgctatctctgcgagtttagccgggtcaatcctcattccgagtttgctttcggtgtctttcatgaattcttcaacgagctcagccactttctccttcgtcagctcttcaatttcggtttcgctcattggatagttctcggcgaccgccaggagaacctctctgagggcgtctttcacctcttttggggcgtctacatcgtcgagcttctcgtcaactccttccctgtaaagctccagcgctatctcactggcactcttgcctgagtatatctcatcgacaaccctctcaacgtcaatcggcagattgccagcgagctttatgatgacctctttaacggcttccttaacgttctcaccctttgcaagctcatcggcatgctggatagcaacgctgactattgtctctggctcttcgttcgtccttcactgccttgcggtctctttgacgagtatctctttggctataggcccgacgttgccgtttgagtcgtagacctttgccagaacgtcattcggaagttcaacacccttctccctcaatatctcgcttaggagggaaacggttgcctctttcagggcgctggagttctgggagagtactccctcagccattgggtcgaaggttgtgactgttttagctaccggctcggccatcttcctctggtcttcagagagcttttcggccagcgcattggcgaggatgctctcctcaagttccttcgtcgggccactcacgaggagggtttttaggacgtagtcggcgttagggagcgatagcagaggacttccatccaggatggccttagcaacctcaactgtggcatcttcaacggcccccgctgtcgggtttcttcccagtcctactgcaacgttaagaacctttgccagcacctttgcggaaacctctccgaatccagggacggcgtaggttccgccggcccttgcaacgacctctggagtgccctgaagggcgttttcagctatctcaatgactgcagcttcagcgttctcaccactttccaatagagtgtagttgcttccgtgtgtcctgtcaaaggcaatgactccggaatagaaggcgtaggagtacgccttaacgaggctcttctcaagcgaataggtgagggtatttgaaattatcccgcctgtaacgttggctaggagttcatccgttattgcgctcggtccgtaggtgtgataagcggaatacgtcgcgttgaagaccgcatagacgaactcaacgggaacgccgagctgagcggcaacggcctgagccgtctgtgggtcgaggttgcaggtctgatatgcgttcgtcttggctgacagggcttcataaactcccatggccccaaggtaggccttagcataagactcgctgaggttgtaaagcttaatgttcagcatggctatggttgagttcagctccttcagctgtgtgctggctttggtcaaattctggtggagctgaacgtaagccatatcagtttcattgagcgctcccttgagctcgagagtttggttgtacaggatagtcaggttggtctcaagcttgagataggcatcggccagctctgggagggtctcgttaaggagcctcacttggtttgtcaagttttcaataccgaggaggagcatcctgtatgtgtcgctcccgtttacggcagaatcgtagagtattccgctcaagttagcggctgtctttgttatgttcagagttatattgtaagattcattctggagaatatcgagcgcatcgtagtacgaggtgaagttgtcgccgtagggcttggcctcaaccttaaacctctcgtaggcatccctcgtttttgggtcgttaacgtcgattccgtgtatgatcatgtaagtctggttctcactcgtggtgaagctcgggaactccttctccagtgtgtccatggtcttgaccgactcaacgtccttcggcaggaactggtcggtgctgtagtttgtgaggtcgctcagctttgctgcaaatggtgccgtgaggatcaccaccaggatccagagcacaacgagcgccttcgcgtgcttcacaatccagtcgttccaggccatttccaccaccatccatgacgcttatcaacatgaagttttcaaacatgttaaatttcgacatgtcgtcaggagaagcatttataagggttttggtcaaatatttgggcaacggtgataccaatggagagaaagaccgacgttgagaggaggataataaagagtctattcacggtgccgctgaaggacatcatcttggtcatcgtcggccttaagggagaagcccacggctatgaaatcctaaaggagctcgaaaagctcgcaataggcctctggaagcccagccacagcaacctctacacgatcctgaacaagatggttgaggaaggccttctagaaccgagggaggagtacaggggtagggtgaggcgcgttaagtacaggctcaccgataaaggatgggagtacctcaagacctccaacaacctcaccctcaggatactctacacggccgttgagtaccatgaagccctgaagaaaaagcttgaagagattggaaagactaggcagatgcgcagggaaacgatcatggagtacttagagctcctgaagaggatcagagacgtcctcgatgaggaaatatcaacgatagaaagggaacttgaggggacttccccatagcccttttttgagggggtacctctggagggacaagtcaaaatttattgcatgggaacaaaaatcgttttaattattttgaatcctcctttaaacatgagttcaaaaatccacctcatctacaaacgcattccaaacagagtgcttgagagagaagacgaagttctcgctgacattggggacgtagtcgttgcaaaatcggagttctcaggcatgctggcgcccctcttcgtaaacggcgttaaggtcgtagacaacggctataagatggtgtactttgcattcatcgggagaaactacgacatcctcaaagtttacgatgagaaaggatacttcaaggggctttacgttgatgttctggcttatacaaagcgttatggagacacgatagagatgctcgacctgttcttagatatcttcgtcttcccgagcggggaagcttttctcctcgacgaggatgagcttgagatggcgctgaactacaggctgatagacaagaaaactttcgattttgcatattcggtggcaaatgagatactcgaaaagcttaagcggggtgaattcccgcaggaaatagtctggaagtacgagtggagggattgatatgaagttcatcaaggagactaaagagggagtcctgataatgatttacgtccagccaaaggcaaagaagaacgcgattgaaggggtagacgggtggcgcggaaggctgaaggtcaggatagcggctccgccagttgagggcaaggccaacaaggaagtcgtgaagttcttctcgaaactcctcggagcggaagtcaacatagtcaggggagagacgagcagggagaaggatttgctggttaaggggttgagcgttgaggaagttaggaagaagctgggggtttagcctttcttgaccctcagctcccccttaaggcggaggtacttctctcttgatagcggaaagctcttcgacgacttgaggagggagttgatgagcttaacctgctctctgaaaacctcgtccgggttctgcttgagcctgaagacatagaggcggatgaactcgagcctctcttttagatcacgccttgaagggaatgctgacgcccattcttctggcgtatttgatactgacatgtcaccaccatctcatgttggcctcggtggtatttatccatttcttatttcttttgctgggtagttttgttgatatgaagaccttttttaaagaaagatagactcagcggtacttcagaaaggccatgtaaaagaaggccccgccagcaagggcaatcccgccggcgaaagcgtagagggaagtccctcccttgtacctgattttgactgtgtagcacctgctgtccggtagatacgagtactcaatcggtgccctcctcagaataacgttctggccgtgggcgatgaatacatccccgctcacggccgatacccgcaggaaaccgcccgagacgctgacgtagtagtccccaagcttttcgtgagatccctcgcagaattccccgcttaacgtctgcccgggataaataagggcaagaactgccagtgccagcccgagcaggagaaggtactcttcggcttccatttccatcaaaaataaattgggggcaggtttaaagacgtttctgaaatcacttcagaattccaaggctcttgttcgtcttccttatgctctcccacttgtccgccatctcgaacatggcccttatggcatccacgttctctggcacgacgtcgctctcctggtgaacggcctggatgtagaagagcctgttgcccttcacgcttatgctctccttccagactgctatctcgtagaggttgttccactcgcggtggagatcccttgcgaactctatgagctgggccgtgctctcaaagcccctctccttctcaaagaggagaactctggtggtgttctcaaagatatctatcacatcttccctcgttatcggcttcttgagttcaatcatgacgctgtggacgtgcatgagggtagtgggcacgacgaaggccatcgtctcgatgtttatcggaataaccgtctggacgtcaggcccgtggtgagatgggacggttacactcggagttattgcgttgactgggcctcttttcgagtcgtttgggtcagctgcgcggcgtatcatgacggcgtagacgtagtcgatgtactcctgaagggctgagagcgtcctcgtcaatccagtcgtgttgcaggagacgaccctgacgtagtcctttccgagggccttctcgtagttggcttgggccacgaatgatacctgagcaacctctgccttctcaccgccctggaagatcgccttaacgcctgccttctcgtagagggccttgttctttgcacccattccacccggtgtggcatcaacgattacgtcaacattctccagaaggtcgctgagcgttcctgcaacctcaaaaccggccttctcaaagcgcgggaggaactcctcgctcgcggcatagacaggaatgcccctttcccttgctagataggcctcgaagtcgggcttcgtcttggttacgccgatgagctccatgtcgtcctgcttggaaacggcgtaagcaaccctcttcccgattgtcccgtaaccgtttatcccgactttcaccttcatgctaccacccgacaattttatgactgtaaaatacttaaggcttgttttcaccggcggtgaaaagtggtgtaaccaggaacacatttttacaccggcaaagcaaataaagtcagaaaaatcattggaccgtcttaagcgttttgaaaggctaaaaaaagccaaatcaggtggcgttctcccctattagggccattatcttccggtagagggcctttatcatctccctcctgtcctccatcagaacgacatcgctcgaacctatcgcctcgaggttgaaggcgaacggactcggaagctcgttcctctcgaagacgaccttgatcttcccctcccgcacccagctcaggaacagttcggcgttctcaacgtccatcttgtcctccatgatctccctgtaaacctccttcaggagcgggaagtcagggtagtgctccttgaggactttgaggagcgaaaccgctatgacctgctgtctgccgaggcgcttgctcccccccacatacctcctcaagatcaggaagcccctgttcgccacgtgcctgaagcgcctcttcaaaagctccgtgttgtcgagagccctcttgagaatctccctcaggtcttccagctggaagagttccctgatttcagcctcgctcagcctggcttctttcggaactctaaggaggaagccgttgtcgttgagggctatgccgacgtttacccccttccgccttccgacggcgtaggcgaaggccctgctgagggcgtcgttggcccgtcttcctatcagcgtgtggaagaagtactcgtaagtgttctccttctcgacctcctcaacgagaaccgtctcgtcgtcggggactgttgaatacctctcctgctcgcggaagtaggctattatggccttggctgccctctcgtctattccgtacttcctcatgagaagggacttggcccgttttttgttcaacagctccttcacttccctcctgaagcgctgaacgtcgagggctaaatcaaagctcagcgggagcatctcggagaaccaggctgggatggtgggcttcgccccctcgcgcgggacgacgtatatcttgtttcccctgctcttgatgaactcgtaggttcttccagccaagacaaagatgtcccctggcatcagcctctcggcgaactcctcctcaacggttccaatcatctgcttgtccatcgtgtaaacccttatctttgcctcgtctggaatagtgccaacgttcatgtagtagatagccctcgtcatcttgccgcgccttccgaacttcccgtcctcgagccatatcttggcgtagacctttctgtcttcaagtccctcatagccacctgaaaggtacttcaggacgctcatgaagtcctcaaagggaagctcgtggaagggataggcccttctaaccaggcggtaggcctcttcgacctcccagaccttgtagagggccataccgactatgtgctggacgagaacgtcgagcgggtttttcgggattctgaccctgtctaatcttctattcctcgcgttgtgagctaaaacagtaacctcaacgaggtcgtccctgtcgagggcaaggataacgcccttgctcacatcgtggagcctgtggccggccctaccgattctctgcagggccctgttaacgctctttggtgagccgatgagaacgacgagatcaattgtaccgatgtcaatacctaactccaagcttgtcgagctgtttttcgagataaatccttcaacaatgtagttttcagtttcagagtttatgatgccgtaggcaacatcaatgtaggcgggctcaaccgaggttatcctgtcaaagaacacatccccttcggccagttccctcaaataagatagctcctcaagaacatcttcaactctcttctctttcgccactctttcgtagaattctacaaggagcctcaagtttctcctgcttatctccctctcccccagttcaacccttacggggttgtagaagcccattttgctcatacggtatgcacttattccaagcctctcacgtatgctcctcaagcgctttccaaggttgggtacgacatcggagttcgagtacccctcattgtacataccttcccatccttcataatctgacctccacgggcgaacagcatcgaagaacctcttcaggtattctccacctagaacggagactgtgtaagaggcccctttcttggggattacccttcccttaaacttttgaacttcgtcgtattctctggcccttattgaggagactattcccaactgaagcaggatgtcccgtatgccctcggcgaatctcttattgaacgtcgaaaatccagcggaataaacccttccacccttcacctcaagaaagccgtccccatcaaagtagccggccaggaactccctcttatgctcttcaggtagcgaatagataatactgggaaaagttccaagctttgacttccgttcagtgtttcctgttagattcttaaagatggctggaagaaggttgaaagaaatttccagggagtaagtactctcgttcagcatccttattcttccaaccactccaaattcttctttgcacagttctttgtacttctcaagcattttcctgtcagacgagaatagagttagcgtgccccccttccacgagccgtctgccatccagaagccaagtagtcttgccatacttggtgtgaactcaatgggaagcgagtattttcctttatctgaagttatcctctcaacatcgttttctgtcattctaaggtcaaggtcttttaaaacggcactcagccgctcccaccggaatggatagacaccgttaagctgttttactaagtaagattcgctccacctctttttcttagcataggtccgtattgagccgaattttgcctgtattgaaagctttaactccctcaaaaattcccccttgagcttaaggtatgcgttcgggggcagtaagtccaagatcgagacctttacgttcggactcggtagtctcctcacgaccccaacccagttcccttccttgagtttccaagcctcaacccatctcagctctccattttcatcaacggttaggaacttgtgctcctttgtcgcctttatctcgaatcccaaccgcgttcttatcttgactccctctctcctgtattctaccctgtggggctcttcgaacctgacaagctcagtttggaatctccaaatacctgcaatcatgtttgagttcaaacgccctatttcgacgggccccttcccagtcaggatttttgaatccccggagacgcatacaacagccttcagctctcccctcttcagcttctcctcaacatccaggcgaacctctctcgacagggaagagtgatgggcctctatcagaccctcaaactcgggaaagcgcttcttaaggttgaaggccaccctctcggcgccgctcctcgtgttggtgaagatgagcgtcgtcctgtgctcccttatgagttccgccaagcggttgtagagggcgtcgctgagcgttccggcatcggtgtaaatgaggtcttccacaacactttcaacttttatctcagtctgcttggcgaaggatacatccactatgaggcccggccttggagttccatcgtcgttgaagccgaaaacgaacttggcgacttcctcaagcgggtgaatagttgcgctcaagccgattctcacaaactcgttctcggccatctcctggagcctttcaatgctcagcgcgaggtgagaacccctcttgttctcggccagcgcgtgaacctcgtcaatgatgacgtacttaaccgtcttcagcctctcgctgaatttgggagcgtttaaggcaatggcgagactttctggggttgttattagaatgtgaggtggcttttttaccatcttgctcttctcatagctcgatgtgtcgctcgtccttatccctacccttatctcaggcagttcatagccgagctctttggccacttcctttatctccgccagcggaccctccaggttcctcttgatatcattgttcagggcgcggaggggtgagacgtagaggacgtagatcttatcctcaagcttgctttcctttccaaggagaatcagctcgtttattgcggagagaaatgccgagagagtctttccagaacccgttggggatgaaatgagaacgttctcacctttatggatttcaaggacggcgtagcgctggggcggggtgaatgttccaaacttccgcttaaaccactccctaaccggctcgctaaggatggaataaatctcctcgtccgtgtactccctctcggcccaccttatcccgctcatcgttctccatctcggacttagatttttaaactattcggttagtctaacaaactttttaagtgatgaatcaaaaccagacatggtgagaagatggacgtgagggagaagatagagaaagtcctcgccgagttcaacaggcttcacgggagcgaggcaaacgcgaggattctctcgattgaaggagacgaagtgataatagagttcgagggctccttctgcgccacctgtgggctttacgactattttgacgacataaaatgggaagccatggagttcggccttgagcttgaaccggttgaggttcttggggcagtagaagatgactttgaacacggccgctacgtcgtgaaatacaagctgggaagaaagccggtgcttagcttaagtaacgattaaaagaccttattttaactctcatacatgcacaccctcctcctaacggcgctggtcatcgttttcctctgggacggctacttcttcattaattacataattagccttttcaggaattatgtaactacagaccggactcctagggtctccataataattcccgcctacaacgaaggggaacggtgtagaagggcaatagaggccgctctcgcacaggactatccagatttcgaggtcatattcgtggacgacgggagcgaagataacacgtacgatgtggcttcatcaatcagagaccccagacttaaagttttcaggattgcccacggcgggaagtcaaaggccctgaactttggactgtccaaagcgaggggagaaataatagtcaccaccgacgcggacagcgcgcttgagaaaagcgccgtcaaagagcttgtcaggaggttttactcggaagacgttcttggagttggtggccaggtgagggttctcgggaactcgtttcttgagagagcgcaggacgttgagcacctgaggatagcgaccttcaggagggcaaaggagcttgaagacctgagcgtcgctcctggaccgatatcggcgttcagaaagggggctcttgagaggatcggcggcttcgtggaagacccggttgaagactacgcgacgacaaaggccataaagaaactcggaagggtcgtctacgcgccaaaagctcgggtgtggacggagatgcccaaggacatcagaacactctggcgccagaggaagaggtggttccttggtgacctcaggaaccttgggggtggcctcacgaaagaatgggggttcctgctgctgggtgactttatagcaatcctcgatattgtagttcctgttctcctgttggtttttggttactggtgggcttttgggctctggtgggcctttgagacacttacaatgctcatacccgttctcgtcgagggtgggggtattacaacctcattaatattccccgccgttctctggttctgggcggttttctacctgatattgcacctctacggatactccaaatgggtgcttggaaagctgtagcccaagctaccggtaattaacctgaagacacactgcagaatgctgattttcagagcttatcagaaagatttttaaatacaatgcactcctctgtgctacataaactatatagacacaatagactatagggatgcctatgatgctgatagcgacagcggtcttcatggcgtgggcaataggagcgaacgacagtgcaaaggccgttggaaccgccgtgggctctggaatactcggctttaagagggccgtactcctcattggagtcttcgtgtttctaggggcttttctcggcggttcgggtgtatccaacacggtgagcgggctagccaggggcatggaaccagtaaccattggactagtcctcttcagctccgctatcactgtaacattggccagcctctggggaaacccaatatccaccacacaggctataataggtgccctcattggggcttccctcgcggagggccttcccgtgaactggccagttatcggaaagatcgttctcacctgggttgtgtctcctgccctggctggagttctggccgtggggacgtacatcccgtacaagcacctcctcaacaggataaagcacattaaaatccttgagctgacgcagaagtggctcgccttcaccgcctcggcctacgcctccttcaacctaggagcaaacgagctagccaacgtgataggactggcagatggaggagctggggttaagggcctcctcgcagttgccctcggagttggagcgctgacgttcagctacgaggtcatgatgacggtgggaagggacctggcccctctcggcccgacttccgggttttcggcccagatgggcgcggccctggccgttaccctggccaaccttttcggaatcccggtcagctcaggtcaggccatcgtcggtgcaatatcgggcgtgagcctgtataagggcgagaggcccaacaaaaaggccctgaaaggcattctgcgcggctgggtcactgctccaacggcttccggtgttctcgcttttatcctcgttagcatgttctcctccatttgaacctttttaaaggccccttccaattcaaggtaggtgagaaaaatggtcgatttcaggtttgaggtcaaggcgcgcgacgcttccggcaggatcggaaagctcacagtcaacgggaaaaccgtagaaacccccgcaataatgcccgtcatcaatccaaaacagcttatcgtaacgccgaaggagctcaaggagatgggctttgggatgataatcacgaactcctatataatatacaagactccagagcttagggagaaggcgcttgaagtggggattcacaaacttctcgactacgacgggataatcgaggttgactcgggctcattccagctcatgcgctacggcggcgtcgaggtaaccaacagggagatcgtcgagtttcagcatgaaataggcgttgacatagggactttccttgacattccgacgccaccggacgcgccgagggagaaagccgaggaagacctgaggataacgctggagagggcgaaagaagccgaggaaatcaaggagatagcgatgaacgccgccgtgcagggctcaacgtaccctgatctcaggacatacgccgcgagagagctcagcaggatgaactttgagatacacccgattggcgcggttgttccgctgatggagagctaccgctacagggatctggtggatgtcgttatagcttcgaaggtgggcctcagaccagacaggccggttcatctcttcggcgcagggcatcctatgattttcgcgctggcggttgccatgggtatagacctctttgattcggccagctatgccctctacgccaaggacgaccgctacatgacacccgagggaacaaagaggcttgaagagcttgagtacttcccgtgctcctgtcccgtgtgctcccgctatacgccgcaggagctccgcgagatgccgaaagaggagaggacgaggcttctggctattcacaacctctgggtcataagggaggaactcaacagggttaagcaagctataaaagagggcgagctgtggcgcctcgtggatgagagggcccgctcccatcccaagctctacgcggcttacaagagacttctcgagtacagagaataccttgagaagaacgagccggtaacaaaggcgagcgccttcttcaaagtgagcgaggaggctctaaggtggccaatcgttgagcgcgccagggagagggcggagcgcgttagatcaaagtttcctgaaaccatcagccacccgatcttcggtgagatacctaagtacctctcactcagctatccgttcgcccagagtgaaggagaagaagacttcacagttgagaagcccgagaagggagaagccaggaagtacgttatggcggttgcagagtaccagttcggcgagggagccggcgaggctttcaaggacgcctttgtcgagctctcaaggaagaccgggatgccgaggcagataaaggccaagggcaagcacctcgctaccttcagagccgaggacggcctgctgacacttggaattgaaggggcgaagagactccacgaagtcctgccgttcccgaggatgcgtgttgtagttgacgaggatgcagaaccgttcgcaaggagggggaagaacgtcttcgcgaagttcgtggttgatgcagacctgaacataaggccctacgacgaggttcttgttgttaacaggaacgatgagctcctcgcgactgggcagaccctcctcaacggcgaggagctgaagatattccagcagggactggccgtgaaagttaggaggggagtcgagaagtagaaaaaattataaaccctctcctttttcctattccgggcgggcccgtggtctagatggttatgacgccacccttacaaggtggaggtccggggttcgaatccccgcgggcccaccagtacaaacttcgcctgcgcgaagtttgatcaaggttcgtggttccttctaaaattgctattctacaatgattttgtgatactcaggctaaaaaggcacgaattccaaaatttggcctactaagaaagagtttctctcaccttgacgcccttgtggcgtcgattaaaaagaaaaactcacgaaaaataaggccaataaaagcggaattcacaaccaataagccattttctagtgaaaaatcctttccaatagctcacagacaagaaccacaaactttgatgaaactttaccctgcaaagtttcctgtactctcaaacctccgttctccaaaaaccgggaaactacgtttccccaccttccttctttcctagttctccggggggctaacgccccccaacatcctcccacaagcgctggcagaatgttttcgactggtatgtcttgtccgctttgaaaaaagccaatgtcttcacaattctcgcttcatttttagattctcggcttaatttgcaatttttcaaagggtttgctcacggtataacgtccaagggcgttaaaaacaaaacccctatttcttcgctaatttaccggagaactccccattattaggtcaatctcgaactcgaagacattcaaacttttggtcaagctttttttcaaaaagccttgctgatctcaaaacaaagcactaaaatgaaaattatgaagagcaccgcgaattccactcatcccttgcacaagcgtcacggataaagcctgctcggcgtcctcgggaagagcgttgcccagcggacgtggtcgagcttgagaacccatgcgacgagcctctcaaggccgaggccgaagccgctgtgcggaacgctgccatatttcctgaggtcgaggtaccactcgtagtcctcaggcttcatgccctcttcaaggattctctgcacgagcttgtcgtagtcgtcctcacgctgggagccgccgattatctcgccgtacccctctggggcgagcatatcagcggcaagaaccttcctcggatcctctgggtcttccttcatgtagaaggccttgatgtgcttcggatagccgtagacgaagaacgggctctcgaactcctcagttaataccctctcctcgtcggcacccatgtcctcgccccactcgatgttcacgcccttgctctggagaatgtctatggcctcgtcgtagcttatcctcgggaagggtggaaccgcgttcttgagggtcttgatatcgtccttgcggtagagctcgatctccttcttcctcagctcaagcgtcctctgaaccatgtagctcacaagctcttcctcgaccttcatgatgtcccagaggtccatccacgcagcctcaagctcgaggtgccagaactcggtgaggtgtctcctcgtcctgctcttctcggccctgaagctcggtgtaagcgaccagaccttctcaaggccgaagattgccgcctcaaggtagagctgggccgactggctgaggtaggcgtacctgtcgaagtacttgagcttgaagagcgtcgctccgccctcaactgctccggtgacgaggatcggcgggaagacctcgtaccagccgtcctggaggagccattctcttgccgcctgcatgagcgtgcccttgaccttcattatcgcggcaacctttggagagcgcaggtggaggtgcctgacgtcgaggaggaactcgtcgctcgcatccttggttatcgggaagaagtcaacgttctggattatctggagcttctctccctgaacttcggcaccggtcggcgcgcggggatcggccttaaccgttccctcgatgataacgctcgattcaattccgactttcttggcctctctataagcttcctcgttcagatcctttgaaaagacgacctggacaattccgcttgagtcgcggaggactataaagactttctttccgacttccctctttctgtagacccatccagcgagcttaaccttcttcccttccatttcgggcgtgacatcggcacagtaaaccttatcgatcacctttaaccacctccagaggctttgaaagcgggtttataacactaactaatatctatgttaccaagaatagcgtcaattgaaccagagcgagagtgccacgggccgggactttatctctatcaaatgcggcatggggatagcttttctctcccaaatttaaatcctttggaaatttggatgtcaaaacggcaaaaggcttaattacttgactgtcaaacatacaaacggtgggagaatgatcgcgctcatcggagacgtcattgacgccgaaagaattcttcaaaaccatgctgttctggtagagggaaatactatcagcgccgtagtccccgccgagaaagtccgggaattcggccccgatgaggtctacggcggggacggcttcttcgtgatccccggcctgataaacgcacacacccacgtggcgatggcgaagtttagaggacttggagaggacatgccaacagaggaatggctggaaaagataatctggcctatggaacttgagtggacggcaggtgaaatcagagaatgggccaggattggtatcatggaggccctgatgaacggctctacaacgataaacgaccactatttcttcgccgacgaaatagctcgggaagccgagaagatgggggtaagggcttttatcggacagactgtaatggatctggtagattttccacacgccgatccagaggagggtttcaaattcttcaggcgctggcaggaaaagagcgaactcgtaacgcccaccctcgctccccacgcgaccaacacagtcagtctggagcttatgagggagatggccgaactgtcggaggaaaccaacgccagaattcacgtccacctagcccagagcaggaccgaagtgaaggaagttaaaaaacgctacagtctaaacccggtggagtatctaaagcaagctggggcgttaagcgaccgtctgatcggagtccacggcgtctatcttaccaacgaagaaattagaaccctcgcatcagcgggctcaacgctcgtccactgtccaacgagcaacgtgaagcttgaagggacgacgataaacctcccagaagttcttcgcgctggggtgaacgtggccataggcaacgactctccaaatcccgtcggcattatggatatgttcctcgagatgaggacttcgggtctctccgcaaacctcctcgaaagaaaagcccattccatcccagcaagaaaaatcttcgagatcgcaaccatcgggggcgcgcgggcgctggggattaaagccggtctcatcagggaaggctacctcgcggacctccttctgatagacgccagaaagccgtggttcaagccgatggagagcccttactctctgctcgtgtactcgaccaggggaagcgacgttgcactgacaatggtaaacggaaaaatagtctggaaaaagggaggaaagtaggctcaccctctcctcctcagcgcgagtggaaggatggcgagaccgacgagtagagcaggcccgcagatgccgccggacttctcggctgatgcggtgctcgtcggcgaaatctctgaggcgctcttgccctcgaccattatcgccctccactccttgagccacttgtcggtgttcttagcaagctcatcagcggggattgaaacgaccttagccttgcccacgtcgagggcgtagctgaagcactctggaagctcgacctcgctgttcactgggtacatccactggttgagcgggagcttctcctgggcctccttgcttatcaggaagttgacgaaggccttggcaagttcaaggtgctttgttccatttactatcccagcgccctctatctgcacgtaggcagtgttgctgaggaacacagctccaatgctggtgtcgttgtagttgcacgcgctgtatgccggatcggtggcgtagctgacgaagagaggagcctgccccttgtcccacatctcccagcctgcagaccagcccttgacaacgatgacgtcgttttctctcagggcttcccagtagtagggccacttgtcgccgtagaccgcaattgtccagagaaggaatgccattcccgtggagctcgtcagcgggttctcaactatgagcttgcccttccactcgggctttgtgagctcctcgaaagtcttgggcgggtttgggacttcgttcttcttgtacacaatcgctatcgccccgtagtcgtagggcgtcaggtggaactccgggtcaaagttcttaattatccagtcggggatgtatttggcgttttccggcttgtacgggatgagaatcccctcttttatggccttctgaaggtagctgttgtctatgccgatgacgacgtcagcctgcgggttgtccttctccattatcagcctgctgaggacttcgccagcgtctccaaagagcacgaggcggactttgacgttatacttctgctcaaagatggggattatctccttcatccacggctcgatgctgtcgtaggagtagacagtcagcgtctcctcggctgaaaccggcgaggaagacgcgaagagggacgccaggatcaccccgagcacgaacaactcacccatcttccccactttctcacccccagggattaacaagttgttatcttcaataactcgataatagaagcgtttaaaaaagtttgtgggcagatttgggaacttgcggcaaaaagaccattaacctacccttctttgttttcaggggtctttctcccttccatcttgatgacgtagtccgccgcgttctgaagggccacagaaaagcccggatcaacgccgataacaacggtctccttgccgcgcctctttgcctcaataattatcgggagaaagtcagcgtcccttgatgcgagggctatgacgtcaacgtcggagttgtagatcagctccatcgcctctatggcaacgcggacgtcggtgtctccagcaacgatgacaggttcaaggccctggtttacgacggcctcaataagtccctgtggggcgtactggttcaggatcacctttgcgaccctcacgtttcctatcctcttgagggcctcaaggatgtcctcaagctttatcccaaactccttcctgaggatgttcggcccgtctatgataagccctatcgtcttctttggagtctcttcctcttttttctcgctctccctctttagaatcttgaaaaaccgctccttcattcctactcaccgccgagaatgatcgtgtagtcagcggcgtgcttaagagccactgaaaagcccggttcaacgccgataacaacggtctcttttcctttctccttcgccttcaggatgacgggcaaaaactccgcgtttctcgtggcgagggctatgacatctatgtgggggttgtatatctccttcatggcctcgacggcgagttttacacctgtctcgccggagactatgatcggctcgaagccctgatttgagactgcctcgataagcccctggggcgcgtactggttgagaataaccttggcaacccttatatctccgatttcgctgagcgcctcggcaatgtcctcgagctttaccccgagctccttcctgaggatgttcggcccgtctatgagaagcgctatcctctttcccctcgagaccttccgcttcatctggccgatgatcctcattccgctcttcgtcatcgaaactatcttctcccatccactgggcatcgctgacaccgccgtaattttcaaaccaacgggagtagttaaaagaggttaaaaaaattgctaaaaccctcaggtgagaagcctcttgtagtagtaccagaggcccctgatgatgtccctgacctcgatcatcgtgaacatctctgtcctgtcgatgagctttgccgtttcctcccagctgtgggcctggaggacgcggtatatgaggagctttatctgtctctcgtcgaggtagggcttcatccagccgtcgaggaagtagagcttcactatcggctttacggcgtccaccacagtgtcataggtgagaaccttccctgtgaaggcatcgaggcgcttcttctgtatctcagtcaggtgaatcgggtagtccaccgcctcgccgaagggcgtttcgaagagccagcgcgctatctcgggctcaagctccctgtgggtgtcgccaagccactcggtaaacctgattctgaactcgtcgttggccttcttgatgagctccttcgccttcttgcttatcggcttgaggactatggcagtaaactcaccgctgacagggtttctggccgggctgaggtgcacaaccgcgaagccgttcctgacccagaagcggacgagctcttcgctggctccaaaccccgagcctatccagtcgaggcccttttcccttgcctccttctcgaggagttcgagggccttgcttcccagccccatgtccattgcatccgggtgagttgctatcctgactatcctgtaacccttcagcctggcgaactctttgaggtagtggtgcttgaccatcatgtccgggatgatgttcccgcgcggcttgtagcccttggccatcttgtctatcacgttcttcgggattccaccttcctttgctatctggacggccgtgactatcttgccgttcttcaggcggagaaccctcgcctcgtggtgaggggcatcagctaatagggccacgtcgctcggtctgttgcggtagtgagccaaaatgtagatgccaacgaagtgcctgaggtcttccctgtcgttttcgaaccagtcgtcgaggtccggctcctccagatagacctccttccgctttatcagctcgtagtcctcctcagtcagctcgacgggctctgcatcgagcaggagaacgtcgaagagccacttctctattggatcgccgtaggcgtaccttatcggttcctccatgtggagctccttgaaagagcgcttctccctggctttcttcaggaacttgactgagaagccccttccagcgccctcgtagccgtggatcgttgaggaatagacaacgcgcggcttgttgaggtacttgtgaagtatgggcacgtggattcccgctgcttcgtcgaggatgtagaggtcagcgttcttcttgtagccctccgctggagggtaatagcgcaggccaatcttcctcgcgtagagttcctttatgaggcccttctcttcgacgacgtagggcttgaagccgagcttttccagagccctcttggcgaacctgaagagggactggacgttctcaagctcgggcgcggtaacaactatcctcgtcctcttcttcagggcaacggcgagacctatcgctgctattcccacagagacgctcttacccctacccctatctgccgtgaggacgagcattccctccttatcgacaagctcctcgaaggccttgagaacctccacctgtcctctcgtgagagccatctcgtacagttcctttgggaagagagtctcctctggaatttcaaccccttttctggctcttattttcgcctgactcttgctcttcttgggcttcttcttcgcctttccgctctcggtgatgatgtatatcccgtcgtgctgggtgaacttccttatgagcctcctgttgaagcgcttcttgacgtcctctatagtgtacggcggcgtgacgaggctcttgtggaagcccgtccacatgtccttccacttctcgaacgggtgggcgaggatgaatatcagcccgccgccgcggacggtctcgatgatcctcccgaggtcgttgggcgagtagtcgtagctcatgtccaagataaggagatcgtaggttcttccgagtatctccctcgtgtgcttgaaagtaacagccgtaacgttcacctcggaaccggccagaacatcgaagtgcttcctgaaggcctcgtagcgcttccttccgaaggtctcctcgccgagggcatccgtggcgtagagaacctcgattttatcctcgctctcatctctaaggcgcttttcgatgagctcgccaactatatcggagagaaccctcgctgaagcaccagccaggataccggccagctcggccttcttcagcgtgtctccctctatgactatcattctcctgtggaacttctcaagggcctgggctaaagcagtctcggtgatcttgagaaccgaatccttaaccttctcgcctttagcgtactccctcacttccttatcaaagcggaccttgacggtcacggccgccacctcccgaaagaaaaggatgagggggatttaaaaaggtagctaagggcaggaaacgttgagggttttctggagggtgtctagttcttcctcactcaaagccgtgtggagatattggagcacttcgcatgaggtagtattcctctcgctttcccagatatggtttagagcagttctgtggaagtcctctaagttcggatagaggttgtaggacttctcacaaggattttttggtatctctgggatagcatcattatcagctggaccaaaatgtttgaaaacgacaattaaccctccaaaaactgccacaaaaacgataaccaagactgcgagagcaagggcggactttagagtgccgttcatttcgggaagctttgcgataagaaacatcccaagaagcatcgccccaaagaacgcggtgcttattagaagcgcagcaattgcggcgcggacgtaagagctttgtaaaaatgccataaaaacgtttctcgcccgaagtacccattttaggggaggtgatggcttaaaactgacctccgtgatgttggtttgcctgtattccttcacgaatttcagtttgaagtagtctatcttcagagaatagaacgcttcgtctataatttcttcgttccctgccttcaagacatctctcaaggaggcaacactaaagtttaggtcactctcagcccttgaaagaataatctcataatccggactgtgtgagccaagccttccgggaactatagcctccacttttccatcatctaggcggtatcctgttgcgttttttagaagtttagagggaggcaacatcgactcgacttcaaccctgtaaggagcaagcctggtgtcgcagggcaaggattccactctctcctcagcccgatggaacgctatccactgtaccgtggagattatgagcaacaccgcaaccaaaaccgagacaacttttagtataagacgcatggacggaacttgaaaattatctttattactctttcgcattgtccctaattaaaacaaacatcgaaacgctaagcttttatacgaaaaagcccgactttattcggtgattctaaatggtgaaaggtctgaccgagaaggacctcggaaagttcaagctcgtgggaaacatagacgccttggggagaaagctcgtttttcaggtgacggagataagcgtcgagaaagacgactacttctcaaggctctacctctacgacggcagaagggtcgagcccttcacctctgggaagaaggacgccaacccacgcttctcgccggatggcaagctcgttgccttcacatcgaagcgcgataaggagagcaaggaagccgagctctacgtcatccccaccgacggcggcgaggcgaggcttttagcgaagttcaagtacggaattaaaaacctccgcttcacagaggacggaaagggcatagctgtcgttactcctatagacgtcgagaagaagcccaaggacgacgtccacatcatcaaggagcttcccttctggttcaacggtgtcggctggatctatgggaagaggagcgtggtttacctcgttgacgtcgagagcgggaagaagaagcgtctcaccccgaagaacctcgatgtcggccagatccgcttccacaatggcaagctctacttcaccgcccaggaagaccgcgagaggaagccgatggttagcgacctctacgtccttgagggcaggaaagcaaagaggctaacgccgggcaagtggagcatctccgacttcatcccgctagacgacggaaccttcatcctcaaggccaacacgcgcgagcgcgggattccgacgaacacccacatctaccactacaacccggagacaggagaaatgagaaagctgacgaaagacctcgacagggcagcttataactccctcaacagcgacgttaggggtgcccagagggccgagcttgtctttagggacggctgggtctactacatagctaccgacggtccgagggcgaacctattcagggtcaacctcgacggcaagatcgagcgcgtcatcggtggagacaggagcgtcgagagctttgctataggggattacatagccttcacagcccaggacgcggttacgccgcttgagctctacgtcctccgcgacggaaaggagaagaaagtaaccgacttcaacggctggataaaggagtacagcctctcgaagccggagcacttcaaggtcaaagccagcgacggcgttgagattgacgcgtggattatgaagccggttaactttgagccgggcaagaagtatccggccgttttggagatacacggcgggccgaagacggcctacggctacgccttcatgcacgagttccacgttttgaccgctaaaggcttcgcggtgatattctccaacccgagagggagcgacggctacggcgaggagttcgccgacataaggggacactacggcgagcgcgattaccaggacataatggaagtcgttgatgaggcagtaaagaggtttgacttcatcgaccctgagaggataggggttaccggcggctcctacggcggcttcatgacgaactggatagtcgggcacacaaaccgcttcaaggccgctgtgacccagcgctccatctcaaactggacgagctttttcggcaccaccgacatcggatacttcttcgcgcccgaccagataggcggcgacccgtggagcaacaccgaaggctactgggagaagagcccgctaaagtacgcacccaacgttgagactccactcctcataatccacagcatggaggactaccgctgctggcttccggaggcattgcagttcttcacggctctgaagtacctcggtaaaaccgtcgagcttgccctcttcccgggcgagaaccacgacctcagcaggagcggaaagccaaagcacagggttaggagacttgagctgatagctgggtggatggagaggtggcttaataaatgatgcatgcatttttccattttctcctataaaacgctaaaacgttttaataactcacgtactcatagataaaagggtgataagagagtagatttaagagggacaataagacagagaggaagctatgccctttttctcctcatcatcaagagaggaatcactgcaagtgccattataatccctggaccacaaatactggagtttggtatctctgactttgcatagattggggtcttactggcagtatacatatctaaatgccactcagctttgttcccatcaactttgtgagcattagaatctatgatttttcctggcatctcgagatagtaatctattgtaactaagcttccatactctttgatatcctcctgatcctttgcagattcttcatgccaagtgttgtccttgaagattagatatccattctccttatagatttcaatacccttagcaaagtcggcgttatctttgggctttacgtgctctgcatgtattgttattgtaacattgtctcctgtaaaggactcttcacaggtgactttatctttaagatcagacgttatatttgctcgaatgtctccacaaaatgttcctgttgttgtgttttgaaccatgagagagtacaccgtccgtggcatttccagtaccagagtcatagactctatagtaccatccgaagagaccttcacatgttcttcaatgctaacgcatccacttattgtgactactcctatcaaaagtagtgctagaacaagttttttgaggtgtgtcatttagatcaccacgataaatatcgtatcttcttttttaatttttctccaagttgagcataaatcaaaacaaaaattcagatgcagaagaattgtaacaatagtcaccaagagtaagatcaagaaataggaaaagtcaaaagttcaatatctttcttcacagcgtgtaatccagcaccttcttggcctcttcgatgtgctccgggtagacgttctttatctccgggtggagggccttgataacccttccgatgagcacgaagagagttccggctatgatcggaagctcgttcacgacgtcctcctcaagcggcctgtcgccgggtatcttcttgaggacgtacttccttatcggctctatttcaacgccctcgtcttcaatgactgccctgaagaggttcatgctgttcctgaagcccttggttattgggatgtggcgcatctttatcgtgtcagcgttttcggccttcgcgttctcgtaggcgacctcgaataggtctgcgagcttcttctcgacgatgtccatcatctcctcagcgcggggcttgataaccgcgagctcgcaggtcctctcgaggattttctggagctgcgggtagggtattatcatctccgccattttcccacctccgtctgttttctccaatccagttttagtaaccttgagtatataaagctttcgcagagggcagcgattgacttttaaagaaccccctcaaagggagagtcatgaaagcagtaatcctggctttcccggaaaagccgtgggaaaactacacgattcccataaaggacgagccagttgtaaagctcaccgagatgaggtttagaatgagcaagcggattgacgaggttctgaccatagtccgaaaggacaagctcaggatttactctctccatgtctctaaccctgtgccggtcattgcaaggaataaaatggaagccctcctcaaggccatgcccgacgaacctttcttcctcgccgagggcaacatgccgctcatacagccattcctcgtgaactacctcgtcggcatctaccttgaagacgagcccgaggcggtcatacccgtatggaaggacggaaccgcagaagtcacacatgccgtctatgagccggatgcacttagcgcggccatagaggccgcgctcagcgaggggcacaaaacgcttagttccatcaccgagttccttgatttcgagccggtgtcagttgaagagctgataaagaagaacccgaaggtttctctcagctttttcagggtgaaaagctcgctcgataaggctttcgccgaggagaaccttggagagaggtaagataaagggaaactggctgtttagagctcaagccttctctccacgacctccgaaatctccaccgctataagggccttaatgaggtctggaatcacgaagggggcaacgccgagctcaaacgcctttccaaagttgcccccaaagtagaggcccaggcggagccagccgaggacgtagatcaaagctatggcaaccagggaagcgacgagctttgcctttccgccctttccctttgaaagccctgccataaatgctgctatcgggaaggcaaggaggtatcctcccgtcgggccgtagaggtgcgctatacctccagtaaagccagcgaagacaggaaggccaattgctccggctatgtcgtaggagaggacgctcaggaagccgagcctggggccgagaaggaggcccgtcaggaggacggcaaagacctgaaaggtcagcggaaccgggcctatgttcacgcttatctgggcgctcacagctatgagggcaatgaatatcccagcgtaagcaacttctcgtgcgttcattttagccaccgatgggaacttggttaatcttttaaaagatttaggttaacgaaaaccatgcggcttatgagagatagtgcagtgaagagaagaatactcgcggcaatcgaggatgggccagtttcaggcgagaagctcgcggaaggactagggatctccagggttgcagtctggaagcacataagagagcttaagaggctcggttacaaaatagaggcctctcacgctggatacttcctgagggaacggcccgacgtgccgtacccctgggaactgccagttaaggcgtactacctagaggaaacgagctcaacgatggacgtcgcctggaagctggctgaaagggggagagactttttcgtaatcgcgggctctcagaagtcgggcagggggaggaaggggagcaggtggctttcacccccgggtggactttggttcagccttgtggccagtccagaactgagcctttccgaggctgggaagatgtccaaggcggctagggaagtaatagccgagtatttgcaggggaaaggaattcctgcggaggtttctgaaaacggcgttttcgttcacggcaagaagatagctggagttctggtggaggttgcaggggagctagacgcaatccgcttcgccgttgttggcgtcggcatcaacgtgaagaacccggttccagaaggagctacatcaatggcgctcgaactcggcgacgtcagtctcctgggcacagccagggagcttttgccgaagcttctggacaacctgaaagctttttaacgctcccctcaattccattccgatgatcgaagcagaaaacgttcacttcgcctacaacgggaaggaagtcctaaggggcatagacttcgagatggggcaggagatagtggcactcgttggaccaaacggaagtggaaagacaacactcgcaaagcacttcaacggccttctcaagccttccaagggaagagttctcgtggacggcctcgacacaagggagcacaccgtcgccgagctcagcaggctcgttggctacgtcttccagaacccggagcacatgttcttcgaggagacggttttcaacgaggtcgccttcggtccaaggaatctcggtctgagcgaggaagaggttgaggagagggtgaagtgggcgctgaagtcagtggggcttgagggttttgaggacaggacgccctactctctcagcggcggcgaaaagcagagattggctatagcctgcgtccttgcgatgaagccaaaatacctaattctcgacgagccaacaactggccttgacgcgagggcagaggaggaggttgttgaggtgatacgctccctccacgagagtggccatgggatactactgataacccacgacatggacctcgtcgtgaggctggccgagagggtagtccttctccacggggggcggaagctcttcgacggcccggtcgaggagtttttcacggcctttgacgttgagaagtacggccttgagagacccgaggtagtcgagctgggagagaggcttggggttggttttgtgaggagcattgaggaaatccttgcgaaactggggggagaagtgtgatcgggcagttctacatcaggaaagacagcttcatgcactccctcgacccgagggtcaagataatcgggatgctcctcgggataatcacactcatgctcttcaaccagcccctcctccttctcgctctgtttatcggcctgctcatcatcggaaaagtgcttgcaggtgcggacttttcctaccagttcaggcttctgaagcctctcttcccgatagtcctgataaccctcgccctctggccggtgatttacaaaccgcgccttgaggggttcttcatcggaatcgcatattcggcgagacttctcggcttcgcgctcgttacgttcctcctcctcatgacgaccacgcagaaagagctcgtcctgggcttcgtcaggctcggtcttccctacgagcttggcctgaccctgaccatagccctccgctacatcccgaccctgtactggctggccagaaccataatggacgcccagaggagcaggggactggaacttgacaagggaaacctcttaaccaggatgcggaagatgacctcagtcctcatcccgcttatcgtcgcgtcgcttaagaccgcccacgagctgagcattgcccttgagagcagggcctttggagcgagcaagaagaggacttttctgagggaccttgaaatgaagcccagggactacgcggttctcgcgctccttctggtggggttttccctggccctctacgcccgctacgtcctcggcttcgggcacgtcaacctttaccaaggaggggcctgacgaggccgtcaattggtatggagtggtcgccgagggagcccacccactcggggggagcttttgagagggtcatgttgagccggtagtggccgcggtacgagttcgttctcaggattaagagcgcatcaaggacttcggggagtttgaacaggcgcgtgaactcaccgggatggtcaagctcgttgaaggccacgggagagtggtggagaacagctatcagacccttatcgtccacaaccttccttatcccaaggacggtctcggaaaatgggtttagtgcggggaagttcccgatgatgagaagagagccttcctcaacgagttccagcgccgagatgagttcatcgggggagtaaacgctgcctatgaggagcttcgacgggtcggctccgagcagtgagagagtctttggagaaaccaacctgccaggggcaacgacgtaggcctttttatcgtcgggacagccagcggcaaggtagtggacgaatagaaccgaggctagctcatctgtggaaatgacccccgatagggtcccctcggagaactcaatcgggaagtcctcgaagggttttaccccgctggtttcaatcgctggctggaaaaagcccggcatcaatcaaactgggtggaagttctatttataggttgcgcccaaaagtcctttaaagcaccagttcaacaaagtccggtggttagaatgagcgttgaaggggctgtaattgacttcttttataggtatttctgggaaccgatgttcacgaggagcggctacaacgcggttaacacctttgtatatgcgctcctcttcggtctgggcgttatttacacatacaaatggataatcaaaccgctgaagatacccgtggacgagaggctcttctgggccgttacaccgatggtcgtcttcggcgcaactgtgagggcgcttgtggacggcggagtcctgccccagcatccgctcatcctcactcccggaatcttcttcacggcgttctttctgatactgcctgcaatctacgccgattcaaagcttgggatgtatcccaagataactgttgcatggggaacgatactggcgctctgggcaaactacctcctcgtgacccacgccaaaaactgggagccctacgaacttacccttatccacaccgccgttagctttgccgcagtgtttatattctacaggtggaggcccttcgacaggctctacctctaccctgttctcgcccactactttgacgtggcctcaaccgttgttgcgatacacttctacggctaccgtgaagtccactggattgaaaaccacctcgtcaactggttcggggcctacatctactatccgtggataaccctgatcctcgttgtggtctattacgccctgaaggagctcgttacggatgaagaagaaaggcgcttctggtatctggccatctacatcctcggtcttgggccagcaataagggatcccgcccagatgatcctccagctctgagctggtgacgttctttctcttttctctcccttctctagttccagttagcaggaaaaagaaaaagagagaactcaacgggttttgccccagatctttgaaaggactgcgtagtgccagatcgtaaccgccagtgctccgatgaactctggtatcgcaacacccttgaaagttctcatggcccagatggcgagaatccacgccagaacgaatagaactaccgtgaagtacagcatctttctgtcccctgagagtcccatgccgatgccggctatcaagagcccaaagcccgccgtcaggaagaagccccagctgacgtagtagtggggcgaggttccctctgggaagatgcctatcagagctaagaagacaaagcccgctatgagcacccagatcccagccttctctacgctgtttctagccatgtcgaggacgccgagggcgtagtaaattgccagcaccgccgttataacgagcggcacgttgaggagccagttgtgggggaggccgagcttcccgaggtcgcttatcgcgttgtcggttaacctccaccacgagcggttcacatagatagccgtgagaattccagaataagcaacgagcggggctatcagcccggcccacaactgcgacctcttcatccccatcaccaaaaattattggggtccaaaaattaaaagcttgctcacttctcatagaatatctcgtagtgctggacgtacttctccttctcaagcaggaactcgtcgtcctccgggtagtacttggccagctctggattttctcccgcgaacttcttgatggactcccatgaatcccatatcgtcacgagcaggaagtgggtttctttctcctcgtcccgcctcgtgaagtagagcttcaaaagcccttcgacggagctgtagtccggaaccgccctctctatcaaaaagcgctcgtaggcgtctctcttctccctcggcacgcgcccgtgccacagcctcataatagccattccttaacacctcctgttatctagcacgctgccgtataaaaaggtgtctcactccgccagtgcccactgtgcactcctgaagaagcttacaaggcctactacggccccaaagagccagagaagggcgattatcacgaactttaactcggggatgaaaagctccagggtggagaatgcaactccagagataatccaaacagccgagagcacgaccagctttctcaacgatggggcggcagtctgctcaacatccagtcccctcgacttcttgagcgccctgtaaaggagatagaacgtgagggcgtagaggaaccagacaaaggcctgagctccaagcccgggtattgcttccctttttattcccaggcccagagcaatgtaatacgccaaaaggatggggacgagaaactttagttcccccagcgtgggaaggaggtcgtccaggttttctccttcatagcggtttctccaccaccgcacgaggaggagaatcaccgccagcgttgaggccagggatagaaatgaatgaactggcgagggagagtttgagctctccagggccccaagaaccatggcaaagagaaggggccgttttaagacgaattctggaagtagctttctccttgaagtcagcagttcggcagtcccaacggccatcatgaaggacatgaatggatgccagaagaacacaacaacgagaagctcaaggatgctgattccgcccacctgaatcggggactcccagtccgggttccagattatcttggtgatgtacgcctcgtagaggccgaagatgacgcccgccaaatatagggtctcgaagcgtggcctgccgaagcggtagactatggaagcaagaacgagcgcgtggaggccgtataggggaaggataacgaggatcccccagggggagaagaacggatagagagtagctcctatggccacctcaccgaagagcgcgttcgggaatacgagtggattccagacttctgcgaccgctgcaacgcttgcgttagagcctgcccggcccaggcgatatacatcacgccgaagagggagaacagccgggaggtgcacatagattacacgaagtgcgccgtcgtcttctcaagaaccctcggctgttcggtctgcgtgaaggagtgcacgttcacaaaggggagctacgagaggataaagcgggcctacgagaaggttgccgggagatagggaaaaaagttgcatagccctcttccccattccgcaaaggtttatataactgcataacatagcgtcatatctgaggggaagggagtatggtgaattcctcggtgataggtgccgtctcgctgatagcggtgagaacgttcggtgcttccatgtttctgtacgcctatcacatgagtaggaggaaattcgccctctttctcgcgctcacccatgtcgcgggaatcttcgaggtggtctttgaccttgctggcatgagcgttgagaacttcttcatcgcgcttgcctttgccctggcttctgcgggtctcttttatctgatatgggaagactcatcgcgtccttttatgaaaggactctacagggccgctttcatccttctactcatcctcggtgtggccgatagcatactcgaaaaagacctcccctgggatatatacttcctcggcggatttttgataatgatgcttggaatactcgggatggacgtgctctccaggaacttttgtctcgctctcgggcctgctttccataatctaccccctaccataccagtacggcctcacggcacataagctgctgccttcggttcagatagtcgcggtagtgcttggaataggctcgctttacttctactaccgggtaatcttcagcccgcgcttcctaagggactacgatgtgaagaacatcgagataccggagtttgaaggggtccaaataatttcgccagaggacttcaaaaatatcaaagcccagctggaaaacgtccccgttcttgcgtttctgagaactttaaagcccccagagagctggaaaccctttttcttcaccacagcgaacaatatggagattccaaacacaatccggccgaccgacctttataaaatggtcgagacagtccacagatatctcctggaggcagaaagaagcggtgtcaagggcattgtgcttgtggaggggttggaataccttagaatacacaacgaattcccgtcgatagcaaagatgatgagcacggtaagagattatattatctccaacaaaggggcgctcatagttgttattgacaaaaacgccctggatgagagggagtatatgttgttgaggagaattctggaatgagtcttagctcgaaatctccaaaaatagagatggatgcgaagaaagcgagctcagaataccgagttgagccttccaccatcaaccggaatcatggagccgtttatgtaacccccgaggtcgctggccaagaaggccacgaggtagcctatctcctctggttctcccagccttccgagaggtattggcttcgcgtactcctggagcgcctcctcaacggtcttgccttccctctgggccctgtccttggccagccgtatcatcctgtctgtctttatgatgccgggcattatgccgttgacggttatccccttcggcccgagctctttcgcgagcgttctcacgaggccagccatcgaaatcctcacgacattgctcagcgctatgttgggtatcggctcctttatggcgacgcttgtggagtagactatccttccgaagcccttccgctccatagccggaacgagtgccctcgtgagatagaccgcaggatagaggagaagcttaactgccccttcccagtcctccatgtccatctccatgaagtagccaggcttgggcccgcctgtggagaagaagaatatgtcgggttcgccgatatctttaagttccttcaccgttctctcaaggtcttccctcctggtgaggtctgcaacgatgtagctcacctcaacatcgctcgcggccctgatcttctcctttgccctcttcaggttctcctcgcttctggataggagtactacgtccgctccagcctttgccagaaccctcgcaacgccgaagcctatgcccttgcttgaggctgtcgtgaaggccagcttcccagagaggtctataccaagcatccacatcaccaagaatggtttgattccaaaggtaaaaaactataccctaatctccttcccaacgaatagaggctccgcaagcccaaagtgctccttgagataggcgtactcatctattcctgtgcagtggccagcgtagagagttcccacgccgagctccctgagcccttcaacggcatcgtccaagagatgctcaggtgctcccctcaggtgaaaaccgccgatcagggcctttatcggttttctagtcaggtctatcgcatgccgagcaatgttgaggattccgctgtgcccgcagcccgttataacggccacgctgtctccaagatcaagtatgagtgcgatgtcatctttaacagggtctttgacttcttttccgtcttcaacaaggtagccaacggccctgtcccatgtttttctctcaatctttccggaggagatgaagcccggaaggaactcgaagggcttctcgctcaggtggaagactgccccaaggctctcaagctccttcctcgtgaaggggatccctatctccctccgcctcggctttagggctatccttctggcgaagatccctgggtgggcgtaaacgtcgagcggttcgctccgagctttgagcagctcggctattccgcctgtatggtcgtagtggccgtgggttatgaagagggcatctatcgagtccagctcaaccccaagttcccgtatgttgttgaggagcaccctaccgtccgtgccagtatccacgagaaccctgtggccgttgtgctcaacgagggcagaaaagccgtggtagccgatcaggcccttcctccagccggcgtggttttcaaataggattgtgaccttcatactgctcaccaaacagtttcgttatccatcttgttctgagattaaaggagagataacttccaggaaatcaaccttctcaaagtcgctgtcaaaagttgctatcttctctattccataggacttgcaggtggctactatcatggcatcgttggtcagcaaaccatatttctccccgagctcggcagagagccttgagatttgccaatcaatttcaagaaccctcaaaaatccgctcttcacgagcttctcaattgagtccctgaccttttcataaacccacgtgtactcatccaagtgtttcttgaggtcgtagacacctttcagcccatctctgatagcgagagtgaacataaccttgtaagctgtttcggaaaatactattgggtttataacaagggcatggccctcctcgatgagggacttcacgagcttcttcgctttttcgtctcctagattcagcccaacgaggacagaagagtccacgaagacctcagagcgactcataataggcctccttaagccttttgtagtctatgttctcaaccttctcaatgatgagtgagtctagaagcttatcaagttcttcctcatctattatcttgataatgacttttgagtgctccttaagtttgggttttttcaggggtatcaggacgccgttctcgtaaacggcctcaataatctccatcattgttcaccgttgtttttttggtcgtgaagagatttaaagttttgtcagaaagaaaagtagaagtagttagtgaagggcctcaccagccccatccgcctcctctgccgcctcccattccaccgcctctaccacggcccattcctctacccatgccgcccataccgcgtcccatgcctggtcccattccgccctcgggaccgaagaccgcagtggtcagctctcccctgaggaatgcctcaacggcctccctgacggtcatggtggccggggccgagaccatctttatgcccgcggcctggagaactcccgaggagttggggccgaactggccagcaatgacaacgtcggcgccctggtctatgacgaactgcgccgccgtaacccccgctcccctcggctgtgagtagccggggttcggtaccacctgaacgttcactatctctccgttctcaacgtccacgatcgtgaacgtcggcgttcttccaaaggccgggttcaccctgtcgtcgagccctccggtaacggttgatacgattatcctcatgtccttcacctccatcggagttaggaaagcctaagttaaaagccttgtgcatatgctcattacacaagtctgttccaaaatgcttaaaaaacgtcccatcaacgttacccacggaggtgagcgaatgctcaaagttgagaaccttcacgtctcagttgaggacaaggagattctaaggggcgtagatcttgaagttaacccgggtgagtttcatgtaatcatggggccgaacggctcaggaaagtcaacgctggccctgacgatagcgggtcatcccaagtacagagttaccgatggaaaaatcctcttcgagggggaagacatcaccgaactcggtcccgacgagagggcgaagagggggattctgctcgcgtttcaggttccacccgaggtcgaaggagttaaggtcatagagttcctccagcaggtgctcgtggagctgaagggaatggaccccgctgaggcctacgatctcgtagttgaaaaggccaaggagctctggttcaaggaggaagaccttcaccgctacgtgaacgttggcttctccggtggtgagaggaagaggcttgagctacttcaggcacttctcatcgagccgaagcttctcattttggatgagccggacagtggcgttgatgtggattccctcagcataatcagcaggaagatagaggagctccaccagcgcgggacggcgatactcctcatcacacactacggcagaatcctcggccacctcgacagggagaagctcacggttcacgtcatgaaggacggcaggatcgtcaagaccggctccggcgagctcgttgaccagatagaccgcgaagggtttgccaggatattcgaggaggtgggagcatgactgaaactataacaatggccgatgcaaaggccatcatcgagaaccagattgaagagctcgcaaggaggaacaaagagccggagtggatgacaaagataaggtacaaggcgctggaagcctttgagagggcacctcacaaagaccctgtcataagcgaggagcagctccttcacttcatagccaaaccagaggtaaaaggccttcccgaccatatagagagcctcgacgacctcccgccagagatgaaggccctcctcgacaggctgggcataagcgaggtggagcagaagtacatagccgggcttgcggttcagacggacacgggcgtcatatacaaccagttcctgcaggactgggccaagaagggcctcatagtcctcccgacggaggaggccgttagaaaataccccgacatagtcaagcagcacttcctcaagctcttccgcgcagacgagagcaagcttactgcctatcatacggcagtatggaacggcggaatattcctctacgtgaaggaaggcttgaaggttcccttcccgctgcacctgttcttcctcatccaggagagtgcgctggcccaggcgccacacataatcatcatagccgagaggaacaccgagttccacctcatcgagggctgtaccgctccgatactcctcaagcactccctacatctcgacatgactgaggcctacttccacgagggggcgaaggcccagctcacagtcctccagaactggccggagtacgtccacacgaggcccatgacgagagcaaaggtagggaggggcgcgcgcttcatcaacacgacggtaaccctcggctctggaaagagcaacataggagatccacactactgggtcgaggagggcggccacgtcgagctgaacggcataatcctcggccagaaggacttttacgttgacctcggcggcaggatgttcctccaggggccgggagcgagcggaatcaacgctagcaaggcagtcataatggacgagagcaccgtcgtgacgaggggaatcatcgaggcggacgctccgaagacgaagggacacataagctgtgacgcactcctcatgagcgacaaggcggttatggagacctatccggggcttataagcagggttgacgatgccgaactcagccacgaggcggcgataggcaagataagggaagaggagctcttctaccttatgagccgcggactggacgaggagaaggcaacccagctcatagtcaaaggcttcctcgatccgatgctcaaggacatcccgatggagttcctcgttgagataaggaagataatcgagcttgctgtaagcgggggcatgtgagccccctttcggtgtcttttatgtaccgcgagaagtacgacaggatagcgggcttttacgagctacttgaaaggccgcttgataggttcttcaatccactcagggagagtgcggtttctctcgcggaaggcaaaacgctcgaaataggcgttggaactgggaagaccctcaggtactacccccaggacgtggagctctacgccattgacggctcagagaaaatgctcgagatggccaagaaaagggcgaaagaacttggaatggatgtaaagttcaaggttgccgaggcagagagccttccctttcctgatgacttcttcgacaccgttgtctcttccttcgtcttctgcaccgttccagagccggaaagggccatagaagaaataaaacgagtcctcaagcccgatggaatggcgattttccttgaacacaccaagagtgagagcgagctggtgaattacctcttcctcctgccgatgaagctcattctcaagcctctcctcgacgacgacccgctgagggacacccacaagctcgtgaggaagcacttcaaagtggagaaagaggaagcctactacagcggcgtggtcaggctcatagtggcaaagaacgataaggactaagcccgagcggagttcggatcccatgcggaaggtttatttttggggttttgaaatcaaagatggtgtgagagatggagttgggacttccagcggcctttatgctgatcctaacgctcaccctcccgctggctctcgccgagccggttcaaatgtggagatacaccgatcagtgcgcggcgttttcggtctctttcaactcgaaaggctacgttgggctagcctttggctatgacgctgagctgctctctcccgagggaaagctcctcctcaaagctccaacaaggggcatcgcatattcttcggccctttctgacaacaacgtcctcctgatagggacggaaggaagctgggttcaggcgttttcggagcccaaaaaactgctctgggaaaggaagctaagggaagctgttgtgagcgtctccatatcggccgatgggaaagtcgccgtcgcgggggatgccgctggctacgtttaccttttccaggacggggagctgaagtgggagaggaacattgggaaatacgtctggagcgttgtcctttcaggtgaaagagttctcgcaggtagcaatgctggaatacatgtattcaagctcgatggaacactcctgtggaagaaagcatttaatggagccgttaggaagattgtacctctcaaaaacggcatagcagttcttgtagttccgcaggacgagagctggagcgagttgatttttctctcggatagcggctcagtcatctggaaaaggcacttcaacggctacgtccgctcgatttcaaccgacggggagtacatagcggccgcaggaatgacggggaacgtgacgctccttgactctgccggaaagctcctctattcaacgcccctcctgagttatgccaacgacgttgcaacgtttaaaggctacactgtggtggcctacggaaagaacgtcgagcttatagcccccaacgggacggtcgagtggttcgagagcttcaacgggactgtttaccacgtcggcttctctcccacgggctacttcgtcgttgactacggctcccacgagatagacaactgctacagcgtcatagtggcctactcagttgctccaaccgcccagggccagtcggaaaccgcgggagagaaaagctcagtaaaacccggctacagccccctcatcgctggtggaatcctggtcgggatagccctcctcggggtgctgatatggctgcggaggaagcaataatagcgaaaaacctcgtgaagagatacggcgactttgaggccgttagggggataagcttcacggttaagcgcggggaggcctttgcacttctcggcccgaacggggccggaaagacaacgacagtgagaatgctcacgactctcaccaggataacctctggagaggcctacgtgaacggctacgacgtgaagaaggaaggcctaatggttaggcgctcgataggccttgtccccgacatatccaacctttacgaggaacttaccgtcgaggagaacctgaagttcaccgcaaacctctacgacgctccaaaggagaacgtggccagactcattaaggagttcaacctcccggcaaagaggaagttcggaaagctcagctcgggcttcaagaggagggtaacgatagcggcagcgctggttcacgaacccgagatactctttcttgatgagcctacaaacggcctcgacgtccactccgccaaggccctgagggcgctcataagggagctgaacaagaggggcatgactattttcctcacaacccacaatatggttgaagctgagacgataccgcagagagtcgctataatgaacaaaggaaagataatcgccgaggggacgcggacggagcttccgaagctcattgggaaggggacgaggatcaggcttcaggtcgagccgctctccaacaagctcctcgatgccctctcagcttatggcccgaccttcgatgagggagatatcgtgataacggttccagatgccgacgccttcatggcagagctgtgcaagctcagagaagagctcggctttaaagtcctgaaggtctcgacagaggcgccgagcatagaggaagtcttcatagagctgacgacagaggttccaaaaggcggagcgtgcggctgcggggggtgtcctctttgaaggttctcacgatagcgaggaaggaactcaaggagtacgtcctcaagccgggctcaataagctggggcgttgtgttcccgatcgtcttcacgttagcgttcatagtccgcttcggcgacatagaccacctcgccccgggtctcgtctcgatctcgatagtcttcggtacgacttcatttgtggcctcgtccataatcttcgagaggaggctcagaacgtttgaacgcctcctcgttgctcctgtgagctacatcgagataatccttgccaagctcttagtcggctccctcttcggcctctttgtggctctagtaagcctcgctctggtgtcacacttcatggtctatccagtctggaacgtgcctatggttgttggctacgccttcctcggcgggctggccttttctggattggccctctacatatcgctcgtcgtcgagaacccgataagcgccatgacctggctgaacctccttagactccccatgatgttcacgagcggtgccatagcttccctcctcctctttccacgctggtttttgatagcaggctacctgacaccgatgacttatctcgtggaggggctccgcttctcgatgttgaagtacacagaagtcgtccatcccgtttactccgcactgatcttgatattcctaacactgctgttcacatacctctcgatagagcggctcaaaaacctgtactgaacggcctgaaaaagaagcatggaaaagagagctaaggccagaaccagcggcctctcctcggacttatgaagccccagagcatgtagagcaccacgagggctataacataggtcgcagccactaggaagagcttgaagagcaggtagaggatcaggagcaggaagattaggtctattattccgtagagtccaaaacggccgaagaagcctccataatagggtggatacgggccgaatcttccacccctgcccataccccttccgtaaccgcgcggcattttgggcacctcaaaaagttaaagggaaaggcctcaccaccagccgtaataccggcggagggttctcctgctgggcattcctgtccacgggcagtagccgagcctcgctccccagcctcttcctcctctgccccaacctctgccgaagccgcgtcctctaccccatccgcggccccagcctctgccccaaccagggccgaaaccgtagccgtaggcaggataagccgggtaggctgggccgtacgctggcggcaccggtgctaccggagttgcaggggccgctggagcgacgggagcctgcggagcgggtgccgtgaactgggccgcttcaccgctcacgacgctctttatggcctcctccactggtgtccctggagcgacctggtagagcctgataccagcggcctgtatggcaccgagtgcgttcgggccgacctgaggagctattattgcctcaacgccctcgttgatgagggtctggactgccattggtccggcccctccgccggccattgcggcgctgttctgaatgaccttctcgctgacgatgttcccgttctcgtcaacgtccgctatgtaaaatgccggtgccctcgcgaagaccggggcgaccgtgtcttctctacctccaccgttagtcgggacagcgatcctcatgccaaccacctccattctttcgtctattattttgtgcatatgcacagcatttaaagttttcggtgagcctaatccttataaaacccctaccgaaggaatttcaggtgatgctcatggctgagaagagatgcctcaaagtcgcgttcggaatggaagatgatgaacacctcatagatgcacactacggtgattcagagttcttcgcgatctacgaaatctgcgaggatggaagcataaaactcctcgaaaagaggcacaacaaggctaaagacatagaggaagaacacgacgaggggcacggcgacccgaggaagttcaaggcagtcgtcagccagctcctcgacgttgacgttttagcagctttcaggatgggcccgaacttcctgagaatccgggacaagaccaacaaggtggcattcttcacgaggacgagggatctaaaccttgcactccagcgggtcgtggagaacttcgacgacctctgggagcaggtgcagaaaaagaagaccgaaaaaccgccgatagaggagtgaacatgaagttctggggcatctttccaaaggttgccctcctttcttccatctatgcggttctggcgttttacctagacgagaggcttggggttagctttctcgcgtttccagtccttgggttcctgatggtattcctcggcctctccctctggtttctctgctaccttcaggtctcaagggcttactcgaaggggaaactgctcacggagggctgctactcaagggtgaggcatccgatatactccatctggggctttctcgtgattccgggattctctctcctcttcggtggcttcatgctcttacttcctctcgtttactgggcgggcgtgctcgggttcataggcgaggaggagaaagccctcgaggagatgttcggcgatggatggagggaatacgcagaaagaacgcccaggttcgtaccgaggccttgaactccttccggttcacctctacgtcctggcccaccttaagaaagccggagtggattacgccaagatgatggtgaaaatgagcgagctacccctttctctcatcgaagatgcaataagagatctgatggaagctggactggtggagcgagactctggaagtgcgataaagagaagtaaggcgaggttcaagaaggccttcgaagtccacaagcaccacacctactaccgcttgtcaagggagggggagctcttcgtaaggagaatcgacgagaagtggctgaaggagtacttcaacgcgctcttttccgatggctggagggttgtaaaagagctctcaagaagcggaaagtttgatggcctaccaaaggagttccagagagaagaaatccgggaggaactgctggtctaccgctttataactcccttggggagaaccacgcggttctttaacctcctcgttgagttccttgaaatcagagctcgatgatactccctcacttccacgaacttctcagggtaggctttccgagtcgttgctatgacaacgtccgggttcgctttcctggccctttcaacgagccttctagtttcggtgactatcgcgcaggttatcgagagaaaggtctgggaaacccgccagaccttgaagagtgtttccaaatcaccttccgcgtggagtagcgttgaacccgctttaaattcgctcccgcttgggagaaaccgaacgtttaagctgagggagaagagaaaggaggatagcccctccgtgaaggctgctattccctccttcctggagactatctccattgtgccttttccctcgattctcaggaactcgctcgtctcgtcgaagtatggacagtcctcccgaggtagatttcaaacagtctccccgggttcattttatcaccctcagggcacttgccttgaacatggcgtagaacttctcgccgggctttatgccgagcagctctgcggcgttcggcgttacaacggcactgaggggaactccctctgaggataggctaagccagacgaggtggccgcgcttctccagtgactcgatgaggactggcacgacgttctgggcggagcattcccctggttccctcgctagtattatatcctctggcctaatggagagagtcacttttccttcggcatcgtcggcggtataaagaatgacgtttccaaccctgacggcggtgagttctccctccttcccaacgacctccccgcggagcaggttggttctcacgaagtcagcgatgaactcgtctgcgggccttgagaagacttcctcgggagtgccgaactgaactatccttccgtccctcatgacagccacgtgcttggccagggcaaagacgtcctcgaagtcgtgggtgacgtggaggaccgtcgttccgtactcgtctatcacattcctaacgagggagcggagcttttcgcgcgttttggagtcgagggcagaaaaaggttcgtccatgaggagaactcttggtctgacgacgagcgccctcgcgagggccgtcctctgttgctccccgccgctaagcgtccccggcttcctgtggagcaggtggtctatgtggagctcctccgctatgtgccttacttccctctcgatctcagcccttacgaggcccttcttcctgaggccgaaggctatgttctcgaaaaccgtcatgtgtgggaagagaacgtagtcctgatagacgatgctcattcctctcctctcaggcggctccctcgttatatccttgccctcaagtatgacccttccctttagaagcggataaaagcccgctatggcctcaagaaggacggactttccagcccccgttggccctattatagtcagatagtcgttctcttcaacggagagcgaaacgtccctgagatggaagtccccaaggtcaatactgaggttctcaacctctaacagaggcacttccaccaccctccagcctctcagtgaggagtatcgcgatgaacgacacgacgacgaggacgattccgctcgttattgccattccgatgttgccgtaggagatattcaggtagagcgtaactggcagtatctcagtgttcatgtagctcccgcccgcgaggatcagcaccgcgccgaaggcacccatggaacgcgcgaaggagatgactgtcgaggcgaggagtccgttcttcgccatcgggagcgttacctttctgaaggtctcgaactcggagtagccgaggctcctcgcgacgagctcgtagcgcgggcttatcccctcaaacgtcgtgtagatgaccctgacggcgtagggcagggccgtgaagaactgggcgaccactatgccgagcttggtgaagacgaccctcaccccgaggtcgctcagggcctcaccaacaggagttctgccgaagaggaggagcaaagctaaaccgaggacgagctccgggaaggccatcgggaggtctaagatggatttgacggcgctctttccagggaagttgaagcgtgagagtgcgtatcctatcggtacccccatgaggattacgagaacggtcgagagcgaggccgtgatcagggacagtttgagcgagtagagcatctcctccgatttcagggcctcaagcacatcgctgggcttcggcaggaggaagagtgtcgctatcgccgcgaaaaggaggaacgtgaagatgaaggccaccgaaatcgtcaagctcctgaagttcagccccgccatggcctgaacccccacttctcccagatctcggtgtggtttgctatgaacccgttgaaggctttagcaacctcaaggtggccgtccttctccgcgcagaccgttaccgccgtgggaatagtcttgatgatgttctgctccgaaggtatctcaacgacctcgatcttgccctttgactgcgcccaggtcgtcatgtcctcccagattattgccgcatccgcctgaccagtcgctatgtagatgagcagctggttcaccgtcggcgtgaaagtcacgacgttcggcttcacttcctcccacaggccattcttttcgaggactttccgggacaccttccctatggcggccgccttcgggtcgccgaggacaaccctgactcctggcttcgcgaggtcttcgagggagtgaatgcccttcgggttgccctttggaaccgctatgacagggatgtggtaggtgacgttcttcacggtgccgttgaggatgtagcccctctcggccgcctgctgggtgtagtaccacgcccctggaacgaagacgtcgcagccgcaggtcgtttgaagaattccgaagatctcgctgctcccgccgtagtggacctcaaccttggcgccggtctcgttctcgaacatccctatcagctcctccattggcttcatgaggccggccccggagcagacgacgaccgtttggcccgcaaagggctttttctccgaactcccgggggcgttttcagaaccgatgcatcctgcaacgaggaggataccagccaaaaccccgacgagtagtaggattttaacgcctctcatcgaaccaccgaagaagttttggatttggaatttaaacattttggataaacaaaaatgtttatagtaagtggaagtgtttaccaaggcctcagagttttggagttgaaaatagagaagatacaagaaaaagcttttaagccctaattcgtgcatatgcacggaaatcgaaaaaaggaacaaatctgtggccttgttcgtgatttcaaactcttttagttctttttcaaacccatccatttttggtttcaactgacctatgctacctattttggagcattttagttagattaggctaacctaattcttgggttttcaaacatccaagtatttctttacaaacagaaagttatttaagggaatgttaggttagcctactctgaagttgttagggatacctaagcacgatatacgcaattgtgcatgggggtggtagaatgaggctcagcgaagttgaacccggaagaaccgtaagggtcgtgggcattaggggcggcccaaaggcccgtcttctgactatgggcgtgactccaggagctgtagtaaaggtcgtgaagagggcaccgctcggcgacccgatagaggtcgaggttcgcggctacaagctctcacttcggaaggaagaggcggactacgtagaggtggagtgaatgatgcccctggcattcgtggaagagggcagaagggctgtcataaggggaatcgccgggggaaggggagtaatccacaggctggcggagctcggactgtcgcccggcactgaggtagtcgtggtcaggaaccaaatggccggtccgatgatggtaaccgttaggggaacacagctcgccctcggaagggggctggcgatgaagattcaggtggaggtgataggatgagtgaagtcgtgatcgccctgataggaaacccaaacgcgggtaaaactaccctcttcaacgcattaaccggccttagacagcacgtgggcaactggccgggcgttaccgtcgagaagaaggagggagagtttgaatacaaggagatgaagttcagggtcgttgatcttccgggtgtatacggcctaaccgcctattccattgatgagaagatagcgagggacttcatagtgaaggagaagcccagagtggtcgttgacatcgtcgatgcatccaaccttgagcgcaacctctacctcacgctccagctcctcgagattggagccaacgtcgtggtggccctgaacaagatggacctcgcggaagagaagggctacaaaatagacccgaagaagctggaggaggcccttggggttccagtagttccgatggtcgcctctgaaggaaagggaatcgaggagctcaaggcaaaaatagtcgaagccatcaagggaaagccgcgccccatcgagtacccgaactttgaagcctatatcgagcgcatcatgagggtcatcgaacgggacgacgagctggtaaggaattataacccgaggtggctcgccataaaactcctcgaaggcgatgacgaggccagggggatagtcgagaaaagcagattaagggacgatatcctgagggagcttataaacgtctcgggagagctccacaagaaatacggggacgttgagctcgcactggcggatgagcgctacggcctgatagaggagatagccaagcgggccatcgtgaagaaagaggataggataaccttcagcgacatgctggacgaggttctcacccacaaatacctcggagtcccaatcttcatcagccttatgtgggccgtcttcaagttcaccttcgacgtttcggcgcccttcagcgatattatagactggttcttcagctggctcggggatgaagtcggggcacacgttgcgaacgacgctctagcctctctcctcagggacggcatcataggcggcctcgggagcgtcctggtgttcctgccgccgatagcgttcctgttcttagcgttctcgtggctggaggacagcgggtacatggcgagggccgcctttgtcatggacagggtaatgcaccacttcggcctccatggaaagtccgtgatcccgatgataatgggctttggatgcaacgtcccggcaataatggcaacgagaacccttgaagacgagaaggacagaattctaacgatactcgtgaacccgctgatgtcttgtccagcgaggctgccgatatacgccgtcttcgccggagcgttcttcgccgggagggaaggaacggtaatcaccagcatgtacctcctcggcatagcgttcgccctcatcatagcctggctcttcaggaagctcatattcaagggcgagccctcctacttcgtgatggagctcccaccatacaacaggcccaactggggaaccatctttggcactgcctggacgaggacggagaagttcctcaggaaggctggaaccgttatcttcgcaggcgtcatcgtggtctggctgctctcagtgactggacccagtggatacctcggctcagaggcccttgagaacggagaactgctcgcaaagtcctgggtggcttcgcttgggcacgccctacagccgctcttcgcgccgatgggctgggactggaaggccgcggtggcgctgttcttcggcttcatagccaaggagatcgtggtcgggacacttggagtactctacggcgttggggataatgaacaggcgatctcacaggcaatggcggcgagcggagcgtttaaccctgcaacagcctacgcgttcatggcattctcgctgatatacgtgccgtgtcttgccactatagccgtcataaagcaggaagctggctggaagtgggcactctttgcggtggcctacgagctgatcttggcgtacatagtggccctgctcatagtcgcggtggggggtgtgttcctatgagcagaataaaccttggacaggtgaaatggctgactgggatcttcggcctcctctacctcatcggtgggataatcgaggtgctcgcctacttcggaaaggagatcaaggtcattggagttccaactggagacctcttcgctgccttcgccctcttcacgataagcgcggtctatctaacaggtctcaagagggccgttgagggcgaccttaggagcgtctcctacctctacgtgggtgcactgctgagcattggccttgcactcattgcggtgctcgtcatggggtcagatgcaatagaggcgtacctgcttcacaacgaagacttcgctggctggagcccacttgatgacgtgaccacttacctcgtccttggggtgctttcagtaatagcctacctgcctgttaaggatgtttcaaagaatccgattaaggtgagagcatagccttccacgccatggggcatcaccgctttctttttcttctttttaagaacgttctcagacctcgatgatactccccgtcatcactcccacgtacttctcgggataggttttcctcacgtaggcttttgcgaaatctccggagcagtgggcaggcgctatgaactctgccatctctgctaatctgtcaagtgttctcctagacggcccgtggtaacccccgatgactaggtgagccttctcatagcctgaaacatccaggagggccttcgtgagcctatcaacgcccggatgggaacagccgacgatgacgacgaggcccgatgatgtctccaccccaagggcctgctcgaagtcatccagaggccccgaagtccagatgcccttggcgatttctccagcagtgaagacctccatcacatcgaagccccatctaagggccatcgccctgttcccaggtggagcgtagagcctaagcccagggttcagctcccccacgtaaggaaggccaccgtagtggtcgtagtgccagtggctcaggaaagcaaagtcaaggtcgttgagggaaacaccaagagcctttgagttgtgggctaggacgagagggttcgtgtctgcgtcgaagataaagcggtttctaccctcaacgaggacgctccatccccagtcgtttagcaaaccctcagctggaacgttgtcgtttaagattatcagcctcatggttgggagttcaaaatagcttctaaatcttttttgctgtgggttagacttaaagccttcgtcccaggttttgatggggggataaaatgagcaaggccaaaagctatcctttggaagaaatatgctatcgcccgattggagttattcacagccccttcaaggagccaaaagacgtccccatacaggcctctgcggcgaggggaatcagaggaaccgttgatgtgtttcccgagtttgaggaaggactgaaggacattgagggattctcccacgtaattttgatctaccacttccacagggcgaggttcaagagtctcctagtaaggccatacatggacgagaactaccatggcgtgttcgccacgagggcacccgcgcgcccgaatcccatcggcatctcgatagtgagactcgttgaaaggcgcggaaacgtcctgatagttgaggatgttgatgtcctagatggaactcccctcctggatataaagccctacgtgccagaatttgactacagagagggagtgagaacaggctggcttgaagaaaacgttcacaagctcccagaggcaaaagatgatgggaggttcgcaaaataactacggaacctccaccacgtacttcctgttccccttctcaaagcccctgaaggagccgagcttgaggccgaggagcgccctttcaaggtctatcactttcatcgccgcgaggtgagtaatcccagttcctttaacgagctcctggtgtatctgggcagttgggccggtcaggattaccagttccgcctttttcgcccggtcgaggatcatctcaagcgttccgttaaccagtgctgagccgctgacaatgaccgcttcaacctcggggaggagaatgtattccagagcgtcgctgagcgtctccctgtcccagagctttggattccgctcgaaaacgagggtcttaactcctttctcgcggagtgccctgacaacgggtggcatgttgcctatcactgctacctcactgaagccttcaacaagctcaaccacgtcaacatctggaaggtctgagacgtcgaggtggtactgggagaccgcgtttaccgccgctatcccgagggttctctcgatgacgttcaggctgtcgatcctttcaatgaaggcctcgatggaaggctcacttatggagttggtgtacctctgaacctcctccgggagggtcattgcaacgcctagggattttccttcaggaccttcaattaagacccacgtgtagggcagggcaaagccgaaatctaaaagctcaagcccgtttgcaagattcaaagcctttttcttgatctccgaaagcagcattcaatcacccctcaagccttattcctcttaggtcttctatacccagtgagggcactttaaacttcccctcaaaaacaaccaacgggttcagcttctttatcttggcgaggctgtatggaagctccccgttgggtgtaatgaagatcaccctcctggcgattggcctaacgtcagctttatcgagcagttcgttcaggtgcaccgagccgtttccaagggcggcaaagctccttggggacagccagagttcgttgttcacctcgccgtagacccccaaggccttggagcggttcacgaagtccactaaccttattccaggaagccagttgcaccggcagccgtaggagagactcgccacgagccttatcggggttgacatcggcttcccgtccatgtagatggccagaagcattgagacgttatagggtatgctcaccacttccccgttttcatttattaccgtaacgaagtctccccttccaagtctctgaggtctaactcccctccactcgacggttcttccgaggttcaaatccggtattctcatcgtgtcgttcgatagttttgagagttcttcccacgtgtaggttctgttgtcattcagaacagctagtgtccagtttgaccagtttggaggatttcccaagggataggttgaaatttttgaataacttggtgttgaaacattgctgggcgtctgtttttcggaagccccgatgcacccgcatgccatgaggacgagcagaagggagaggacttttttcatccaaccacctccagggggtatatgaaaaagccgccgtcggccttaaaccgcttcactttcatcctgtataactccatcagattctcctcgttgagaacttcagccggttctccgctcgctattatccccccgtctttcaggaggaaaaccgtatcgcagaaggtcagggcctggttgggatcgtggagtgagaccagcactgttctctcctttgagagcttcctgataacgctgagaacgaggtgctggttcctgaagtcgaggaacgaagtgggctcgtcaaagaggaaaagctctccaccctgcgcgagcgttctggctatcattacgagccttttctggcctccactgagctcgccgaagggtctctccgcgaggttctcaagtccgagggtgcggagggccttcatcgccatctcttcgtccacctttcccggcccgctcagggggtcgatgtgggggttcctgcccatcagcacggtttgaaagaccgtgtacggaaacgtcagcgagaattcctggggggagtagcttacgagcctcgtacgctccctcaatctcaacctggaaagctcagtaccgttgagcgttatcctaccgttcccattgaggattccggctatgcacttaaggagggtgctttttccggcgccgtttggcccaaggagacagccaacgccctttttaagctcaaaggtaacgttcctgaggacttccctactgccgtatgaaaagcccagcccctcaacccttagcatagatccccctccgcaggattattatgagggtcggggcgcctatcagggcagtaacgactcccaggggaacctcaaaggtagttacgctcctcgcaacgtcgtcacaaactaggagaagagacgccccaacgagggcgcttgccgggacgagcgttctcgtgtcgtgtccaacactcagccgggctacgtgggggctcacgagtccaacccagcttatcatcccagccatcgccgtcgatgccgaaacaccgagggcggcgagggctatgaaaatccccctgtagagcctcacgttcactccgagccccctagcctcctcttcactaaggctgatgacgttcaggggccagcggaggagcgttatcccaactatgctcacaacgagtggcaccagcataatcctcacgtcatcccaccgcaagcctgcgaagcttcccaggagccagaaaactatcgcgggcagtttgtcgtacggatcggccagatacttcgccattcccacgagggcggagaagaaagccgagaccgctattccggccagaattaagccgaggattccgttcccaacgaggcgggaaagccgccacaccaccccaacggcaagcaggccgaggaggaaggccgatatctgtatgacgtaaggatccgcagagaggagtatcgccagaaccgccccgaaggccgagccgctcgtgaccccaaggaggttcggcccggccagggggttcctgaagacgttctggaaggttaaacctgcaagcgaaagggaagccccgacaaggagggaagtaaccaccctcgggagtctgacctggaggaggatggttttatcgagatcgctcatcgagagcggattgaagagcattctacccacgaagggcgatatcagaatgataaccatgaaaaaaagaaagatgcctttaagccccctcacggcatatcaccggttatctccaccttatttgggtctatcccgtaccacttctgatagaagtcgtcggctttggctctgacatcgaggtcgccgaagagctccgggtggagaaccttggcgagccagtagaggccgagaacccactttggagcggggtaatcccagctttcgccatcgttcggcatcgcgtagaccctgccctccttaacggcctttatgcccttccacgcggggtcgtttagtatttcttccttaaccttagccgatggtttcttgggggagtagctgacgacgattatcacatctgggttccacttcgcgacctgctcgacgttcactacgttccagccacctggaaggttcgaggaaacgctttccccacctgccatctctattaatctgttctggaagtactccttgcctggagctttgaacgccttatccttcatgctgtactgaacgagaagaaccctgggcctctctttaagctttgatgtcctgtttgtgacgaagtcaacagcggagcgataatacgaaattgccttctctgctttttcctcctttccaagaactttgcccactgtcaggagccccttgaggtatccatcgaccgtctcaaggttcagggctataactggaatgccaaggctctctatttcctcgtttatcttttcgctcccccagtaggcagtgaaaacgacgtccgggttcagggacttgacggtttcaacgttcgcattcctcgggtttccgacgaagaccatcctgttcttaacgccaggatccagaagcccgataaaagcgtcgtttattgccagcggagtgcttcccacgactttcttgccgtcctcaactccgagaaagtatatcatttgcgtgaccagtccgtagagtgagactatcctcgccggcgggctcttcaccttaacggttctgttggcaaaatctttcacttccccatagccagtgttctcgctttctcccggtgtttcggccttcacaacctctattttcacaacggccttgacccagcggttcccaggggttactatcgtctcgtccccgacgaggacgagcttgaggggatacaccttaccgtccaaggtgaattctatcggttccccgttgtactcgtaggcgaggatgggaatcacggagccgttgatcgggttccccttttcgtcgtaggtgtccaatccctttccaaatatgaagccgtagtcagcggttattgaatacccatcggcggcagttattacgtaacggtagttctttgataaccagccgaactttgagagcaaatccttcaaagaaacgcccttgtaagttccaatcctcttgatgctccccttctttgttttcaggccgccctttccaaccgtctgcgggaggctcttgaggtctgaaagggttagcgttttaacagagccatcgggcccaacgagggtaagcgggacaacgttggaggatgcagtagaggtggataactggcttgaggctgtcggagaagtggctgttgctccgcttgaggttgttgaggtgttcgatgttgttttcgtccctatgcacccgctggccatcaccccgaaaaggagaaggctgaggatgagaactgaaactgccctcttcattacagccaccggacaaagatgggaacctattttttaaatattttgagtaaacaaaagtgtttttgttaaataaaaacatttaaaacaaatcagatgtagtcccagacaccccttccccgatagttcctgacgatcgtcttagtcgtagtgagggtctcgatggaatagcctatgccctcccttccgatgccgctgtctttcatgcccccgaaggggtaataaccgatcccgtgccgtggaaactcgtttatgaagacggccccgacttcaagcctcctcgcgactttcctcgccctggaatcgtccccactgaaaactgcggcgtccaggccaaacctcgatgagttggcaagctcaacggcctcgtcctcgttcgaaaccttaaccaggattgtgagcggaccgaaaacatcctcctggaacgccctgagtccaggcagaacttccctgctggcctccaggagaacaggccatacgtacgctcctttcctcttgaaccccgttaggggcaccgctcccttctccagggcatccctgtaaacctcttctattttttcagcgctccgctcgtttatcagtggccccataatggcgtcctcgtcttcaagcgggttctcgggctctatttttgagagggcagccacgagttctctcttaagctgctcgtatatcccctcctcggcgatgattagccttatcgcatcgcacctctggccggagtagctcaccatacctttgacaagcttttccacggtttcttcgagcggagcgtcgtccagaaccaccgctgggtccttaccaccgagttccatgtggtagaactttatacctcccatggataggatgtgctcgccgacctcggtgctgcccgtaaacgtgaccgcccttattcttctgtcggccagtatggagtccatcagcgctcctgggacagttagaaggtgataggcgctttcaggaattcccgcaagctgaagaacccttgacaggagtaggggagcgaggggatcctgggaagatggcttcagaagcacggcgtttccggcaagtagggccggaacgatcttggcggtggagataaacagcgggtagttgtagggacttattgcgagcacaaccccgtagggctccctcttgactatcccctcgcttccaaggctttctgcgctccagtcgccgggaatgtagtcccctatcaacctgccgaactccatcgtcgtcttctcaagtctctcgattgtggcggtaacctcaccgcgggcgtttgaaagcggcttgccggcgtcgagcaccagggcggtgacgaaatcgtcgaatgagtccctaataagctccgccacctttaaaaaagcctccaacctcttttcacccggcgtgtcccttatctcatgcctcccagcggaatatgccgccgccaccgcccggttcgaaagggccatatcgctcaggcttaccctagctatcagcgagccgtctatcgggcttcttacctccgctgtcttcccggtaaacacccactccccgtttacgtacgttgcgaattcgggtataccctcgttctgccggaagattccttcgaatatttccccctcggggacgaagggctcaaccatatatatcaccatctgtgatatacaacggttgtttaaatagtttgcgctaacaaaagtgtttttgttaaacaaaaatgtttgcctttcttcaaagggtgaactttgaatagttcgtacggttgcctggtagagaataacggtgtacttgtccttacgacgtccttttctgagcgggtggtcacgttagcattgtggagaaggcaccgcggtatcacccaatcggcactcttggtctgtgcgccggatagggctgttgtattgagtaaatcgaagtaaatcgagtaatataaaaattgaatccgttcctacgcaaatattctctttccctcacttcaccgcctttatcacgacgaagctaccctcaccatagcccggctttaccggctcgacggacttaatctcattgagcctgtggaagagggtctgcactatctcgaactccctgaagccgacctttttgaggagttccaacagttcctcagtcgagaagaacctcgcctccttgtaaaagacgctttcgttcttgtgctcctcgtagaacctccctatcgggctgtttctatcaacgaagccgattatcaatgccccacccggcttcaggacgcggtaggcttccttcaaagctttctcagggtcgtcgacgaagcagatagtcgtgaccatcagaaggtagtccatgctgtcctcctcgaagggaagattttcagccgttccctcgatgacctcaattcctctcgtccttgctatctcggccatcgcttttgaaggttcgacgccgagctttatgccgagaggagccgcgaaccttccggttccgacgcctatctcagctccctttcctttcttgggtagaagtttcttaacggcctcaagctccgaaaggtaagcgtagcggtttctctcgaaccagttctcgtacctgtcgcggtgtttctcaaagggctctatctttggcatagaccatcccgccctttgttcgtgcttcccgtttattgcttttgttcttcacaagatttatacgcctttaggctaacctaactccggtggtggtatgatagcctttggacctgtcccctcgaggaggctcggcaggagcctcggcgtgaacaacatccccgacaaggtatgcacctacgcctgcgtttactgtcagatagggaaaactctcagaatggaaatcaagaggaggcccttctacgagcccgaactgatcttcagagaagtcaaggagaaagtcgaggaggcactcgcgaggagcgagaggatagactacatcaccttcgttccagatggagagcccacgctcgacataaacctcgggaaggaggcggagcttttgaaatcccttgaaatccccccggctatcctcactaactcctcgctcatctggagagaagatgtcagggaagaccttctgaagtttgacttcgtctcgctgaaagttgatgctgtcagtgagccgctctggaggagaattgacaggccccacaagagcctgagccttgagaagatccttgagggcatgctggagttcaggaaggagttcaagggaaagatagtcaccgagacgatgctgatagacgggatagactatggcaacgagttcgagaagatagcggaatttctgagggagctgaaaccggataaagcctacatagccgttccaacgagaccgccggcggaaccgtgggtgaaacctgcgaaggaagatgtcatcaaccacgcatatcaggtcttcagcgaaatccttggggacgagcgcgtggaatacctgatcggctacgaggggaacgccttcgcctttacgggtaacgttgaggaggatctgctgagcataacctcagtccatccaatgcgcgaggacgccgttgcggagtttctggagaaggcaaacgcagactggagcattgttgagaagctcctgaaagaggggaagttgatagagcttgagtacaacgggaagaggttctacatgaggaggctgaagagcagggagtaatgagcgtatgcacaaagcttataaccaattcggctaccctaatttccggaggtgagagcttgcagatagcggtgagcggtggaaaaggcggaaccggaaaatcaacggtcgcgacaaacctcgcggtggcgctcaggaagattggggtcaggctgactctggcggatcttgacgtcgaggcaccgaacgaccacatacttctgggagttgagcttgccaacgaagaacccgtgaaccagttcatgccgcgcttcgactactcgaagtgcaccaagtgcaggaagtgcgccgaggtgtgtgaggagcacgcgatagtgacgctgaaggacgggacgccctttctcatgccgaccctctgttccggctgcagggcctgtgagatagtctgtcctgtaccaggggccattcaagaggccttcagagttataggccacacgtacgttaccccaacaccctacggcttcacgctcgtcacggggaagctcagggagggagaggagaggtcaatgccgctcgtggttgcggcgaagaagagggccgaagaggtcagggaaggtctcctcatggtggacacggccgctggaactggaaacacggtctcaaaagcagtcgaaggctcaaagctcctcatagcggtaacagaacccactcccctcggcatacacgacacggagcttatcctacagctcgggaagctgatgaagatcccgacttgggttgtggtgaacaggtctgacctcggagacgttggtaaggtcagggagctggcggagaagtacggcgccgaaatcgtggctgagatcccctacagcgagaacatagtcaaaagttacgtcgagggaaaacccatagccctgacggactatcccgaggcagagatattcaaaggcctcgccgaaagggttgccgagttccttggaggtggtgcgtgatgcaggtggcgatagcgagcggtaagggcggcgttggaaagagcacgataacggcctcgctcctctaccttctgaaggacgattactcgtttgtggcagttgacgccgacgctgaggccccgaaccttggtttgctcctcggcgtgaccgagtgggaagaggagagggagcatataggtgccaagatagccaggataaacacagagagctgcgtaaggtgcggaatctgctacgagcgctgtccctacgggtgcatctacatcgatgacgaaggcaactacgtcgtgaacgagctcacctgcgagggctgcaacgtctgtggcctggtctgcccggtggccggaaccataacccttgaggaagtccgctcaggggtaatcaggaaggcgacaaccaagtacggcttcccgctcatctcggcccagctcgacgtcggaaggcccgagagcggaaagctcgtcacggaggagaaggagtgggccgcgaagctgatgaaggagctcaacctcgagcacatgatagttgattcggccgctggaataggctgtcaggtgatagcgagcctcggtggggcagacgttgccatactcatagcagagcctaccccggcttcgctcagcgacgttcagagggcctacaaggtcgtccagcacttcagggagccggcctacctcatcatcaacaaagccgacatcaaccccggcttcactggccttgaggagtgggctgagaaagaaggaataccgatactgggaagaataccctacgacagagccgttccagagagcatgagcatgctgaagcccgttgtcgaggccttcccagaggccaaggcttcaaaggccatagttgagattgccgaggttataaagagggaaatcctcggctgaatacttccgcttccctctttttacccggtagttcagaacttctcctcgcattcgcatgggttcttgccgcagtatggacagactccaggatatttcttcttcgcggcctcttcgagatctatcccaagcaggttggcgaggctggcgagccaggcgagaacgtctgcaaactcctcttccattgcttccttgtctctcttccttatcgcctcgctcagctcaccgacttcttcaacgaaccagaggaaagtcctctcaatgcctctcttcgagtccttgtgaaagtagatatcgcgtatcatcccctggaactcgcgtatctccatcttcaccacctggcggcatctcatcagcggccttaaaaaccaaacgggtgcaacatttcgacacaaatcgaagcggaaagatttttatacttcggagggcactattctatgcagtaaaccggggtgatgtgcatgcatgaacttgtagagttcgccgttgaaaaggccctcgaactgggggcggactacgccgaagcgcgttttgaagaaaagaatggtactgagctagtaatgaagaacggtaacgcggagggcctcgggattctcgcggacaggggcatagggataagggttctcgttgacggcggcatgggctttgcatcaaccaacgtcctgacgaaggagagcgttgcagaggccgtgaaaaaggccgtgaagctggcaaaagccgcctcgaaggtgaggaacgaacctatacgcttctccgaggaggacttccacgaggtctattacgaagtcaagatgaggaaggacttccgggacataccgccggaggagaagcttgaactcctcaagaaggtcgaggaggaggtaaagggaacgggtgtgaacgtgccgatgcgcttccttcgctactccgactggatgtggcacaagataatagcccacagcgacggtggtttcgttgagagctacatcccgagagtgtctctcacctacaacctcgtggtctttgagaacggccagatggagcaggcgcccttcgttcagagggctttctccggcggtcttgagctcttagagaaggacgaaccctggaagtgggccgttaaggacgtaatggcccttaagaggctcatttacgagggacagaagccgcccgaggggaaggttgacctcgtgataagccccgaggtggctggcatagcagtccacgagagcgttggacatccctacgaagcagataggattttcggaagggaagcggcgcaggcgggggagagcttcgttaaaccagacatgctcggggagagaatcggcagcgacgtcgttacagtcatagaagacccaactatcccgaacagctggggattctacctctacgacgacgagggcgttaaggcccgcccgaggtacctcataaggaacggaatcataaacgagttcctcaccaacagggagtacgcctacaagctcggccagcgctcaaacgcctcagccagggcgatcaactacaaccgcgagccgatagttaggatggcgaacacctacctggctccgggcgatcactccttcgaggagctgattgaagacatcaagctcggtgtttacatggtgagcttcaacgagtggaacatagacgacaggcgctaccagcagaggtacatcggaagggaggcctacctcatcgagaacggtgagataaagcacccggtcaggagacccatccttgagataacgacgagggcactgtggagcagcgttgacgccgtaggaaaggaagttgagttctacccgggaacctgcggcaagggcgagcccggacagggagttcccgtctggatgggcggagcgcacgcgagactgcgggatattccgttgaggaggccgtgaggtggtgaagatgttcgacgttaacgagttcatccttaagagggcgaaggagctcggcttcggcgacgtcgttgtcctgagctacgagaccaacaggagacaggttcgctttgccaacaatgagataaccgtcgcgaagaactggcacgagaggaagatcgagctcttcgtcgaaaaggagaagagggtagcgagcactaccataaccgacctgagcaatgagaacatagagaggattctgaaaacgctcctttcaaacataaggggcatgtctccaaaggaggactactacggcatagccgaggggcccttcgagtacaaggatattccagagacctttgacagggcgatagtcgagctcgatgaaccgaacgagtacgttgagagggcaataaacgcggcccttgaggaaggggcgaagagagttgctggagtcctctacacagaccacaacaagctctacctgaccacgagcaacggagtggaagctttcgacgagggaacggggatagaaataagcgtcagggccttcataggcgacctcgagagcggccacgggacgaactccgtgagggtgctcaagaagttcgaccccgagagcgccggaaggaaggcgggagagatagcaaggttggccagaaacccggagcaggggccggaagggaagttcgacgtcatattcgacccgctggccttcgccaacctgctcagctacatgagcttcatgacctccgcctatgccgccgaagctggcttttccttcctcgtcaacaagctcgggcagaaggtcgccgctgacggagtaaccatcaaggacatcgggaacctgcccaacggctacggcacgaggaagttcgacgacgagggtgttccaacgagggaaacgaccataatcgagaacggaaccttcaggacgttcctcctcaacacgagcctcgccaggaagtacgggactgaaacaaccgccaacgccggcctggtgatgccgcacgcctggaacatcgtcctcgaacctggagactactcaaaagaggagctcttcagcgaggtgaagaagggcatctacatcaccaacgtctggtacacgcgcttccagaactacgttgctggcgacttctcaacgatcccgagagacggcatctttctcgttgagaacggcgagctgaagccgataaggaacattcgcgtaagcgataacctccagaggatcctcgaaaacatcgtagccctcggaaaagagctctaccacatccactggtgggaggtaaacacgccagtatcgacgccctacgtgctcgtcaaggatgtgggcataacgagggcgacgaagtgaggcttttcatttttctttgtttttcggtaagacttaaaatcgcaagaacagcgtgtctcaagtgatgacccatgaagcggataaagttcaggtttctcaattcttcggatgtgttttcggactttaaatggtttatagaggcaattgagtgggcatacggggacacgcacttcatggtcggtgacgaaatcataaagctcgtggaattgaagttcaaagaagaagttaacccccaagatgtcataaatcgaatgaggaaccttccttatgtagaggacgtcaagctgatacccctaaaaaacggccattactacctgtacacacgtgcaaagctcccaagacaccctaacgcagaagaagccttcgacatacttgacctccagaaaagaggctttttaatatttgagaagggcacgatgactcgcgaggagagctttctctacgtcgtgtgtgaggagaacctggtccctgaagttatatcggccattaagagaacctacaatgcggaggtcgctagcatagaagattacacgccaaatgagagcatattctcaaagctcacagaaaaacaactaaagacccttctggtggcatacaaaagcggctactttgatagtcctaagcgcgtgacgcttagggacctctcccagatgctcggcctaagtccatcaaccgtgaaggagcaccttaggaagggtttgaagaaggttctggaaggggttattgagtaggcgggagcctatgaaaggggcttattctgggggcagttggagttagggagattgtttaggcaggttgtaatttgcctgtctagtcaacattttgatttcagaatctctctatagaattccaggggtttgaggattttaacctcgtgattcccgagttttacagccttttcttcatttcgaaggctcaggaggtcgtcatcccaggtaaggatgtaacctgctcccgcttcataagatatctccagccacttattgtcgtccggatccctgcagaggttaaagctagtggatggagagacaatttcggagcccctcaagaagtgggctaaagtctcttcccagcctggagaaatctttcctttttcggctaaaagtccaatttttagggtaagctcgtcgagagcatcctcactcgtgaagttgatgagccgctctccatccagggccttgattagaagtgccgataaaccctcgggctttatcagggccgccagcacgacgttcgtgtcgaggacgactttcatccctctgcacccgtaagcctcttggtctcctcatttatctccctgagagcctttaggacttcggacccctcttcctcgaactccccacgtttaagcttctcccatgcctcttccgcttctcttttaagatcttctagagtgagcttctttgcccttttccgcgctttttccatcattatctgtcccagtgccatcgtgacggcgaactttatgaagtcagagcggcttctgaactctttctccctcacgagctcatcaatcttttcgacaacatatccgggaagcctcacggagattgggtggtctgtcccagtctctcccattttcttcaccaactacaaatggaatacaaatgtatttaaaaattgcccttttggtcatcccacacatgtgcgggggtaactataactacttcaaagccctattttgaattggtgaaagcatgcctgtaattgaggttaagaatattagaaagtactacggcgatgttaggggtgtggaaaacttaagcttcgaggtcgaggagggcgaaatctacggctttctcggtccgaacggggctggaaagacgaccaccgtcaaaatcctcgtcaagataatcagggactatgaaggaacggccaaagttctcggaaaagacctgcgcgagtggggcaaggactactacaacagaatcggtgtctcattcgagtttccagcggtttactcccgcttgactgccctcgaaaacctcgagttcttcgcgagcttctacaagaagcacctcgacccgatggaagtcctcaaaatggtcgggctcgacaaggaggctgatcagctcgttgctggcttctcgaagggcatgaggaagaaactcgacatcgcgagggcccttctccccgaccccgacatactcttcctcgacgagccgcttgagggcctcgacccagcgagtgcgagaaagttcaaagacctattcctcgagatgagggaaagcgggaagacgatttttctcaccacccacaacatgtacgtggccgatgagctttgcgacagggttgccttcatcgtcgacggctccgtaaggctggttgataacccaggcgagctcaaggtcaagatggggaagaggctcgtgaaggtcgagtacgttgagaacgggagcgttaagaccgcggagttcccgcttgagggcatcggccagaacgaggagttcctgaatatcctgaggaaccacgagataaggcggatcaacacggaggagccgaccttggaggagatattcctcaaggtgacggggaggcggctcgtatgatgaagaacctgctgaagacaagcgtaatcgtcgggttcaggagcttcgtctacccgatatacatgctgataggtttggcctacggcctgatgctcttggcgtttccagagcagtacctcccgacgatggtgcctatattcttactattcgagccgggcttagtgggcttcatgttcgttggaacggagatattcgctgagaagaaagacggggcaataagcgccctggcagtgacgccgatagagtggaggagctacattctggcaaaaacgatcataatgagcgttctctcggtgattggtgccattctcataatggccgtgggaacgcgctccctcgacgggcttccctacgtcatcgcgggggtcttcctgtgctccgcggtttacacccttctcgggatagctatatctgcaaaataccgcgacctggacgactacttcatcccgataatggcagttctggtggtctcgctcctgcccttcgcccactaccacggctacctgacgcacccgctctggaaagtcctctaccttgtaccaagctacccggcgctctacttcttcaaggcgccgttcgtggaggtttcaagtgacaccttagcgctttcgggagtggctctgcttctctggtcggctgtggcctattacgcggctaaaatccagttttacaagtacgccgtggaggggttgagatgagctttgtgaggaagtttgggacaatttacagaaccgacctcaagctcctgaggagggacccgatgcttctgtacagcgttgccatgacgctcgtcctcctcctcatcgtccgctacttcaaagaccgcatcggggtctattattccctcctggccctcctgggcctgatattcataccaatgatattcggcatgttgccaggttttatgatggccgacgagaaggaggacaagacgatacaggcacttaaggtgattccaatatccagcgaggccttcctggcatacaggctgacctgggcctcgatagtaactgccctcctgactgccgctgcaccatacatcctcgacattgagattcctcaaaaaggtattctagctttgattgcactcttcctgctcgaagtctggatttacgggctgttaattacggtgttctcggaatcgaggatgcaggctttgacggtgagcaaagtcctcggctggctcctaatgcttccgccggtgataaagctcgtcgtcgtgtggcggaacctctcaacggactggagcaggttcacggcgttccttccaacttactggctctacaaagtcttcgagggaatacctaccaacgactacagcgactttccaatagccctcgccgtccatctggcatggctggtacccctggtgttgctgttcaggagaagggtgctttgagggtattatttccccatgaacttcaaactgactgcatgaacttgcgaaacttttatctctttcagaatagataataaaatacggagtgagcattcgtgatagaggttgtaaacttaattacacggctcgcaacgtggggactggccacgtataagtgggccaggaacaagaaatccgagatgctgttcctgagcatagccctgtggttcgacttcttgggggcaataagtcagaagcgcattcttgaggctcttggatgggttcccaaaatcgaagccctgcccgttgtaatgtcactcatggccgtcgtagaggggatgtttttcttattggcttcgctgtcgtttcttggtgtcctgaggaaattttttggacaactcattcttcttctagtctccacgagtggcataacttacgtcgtgctcgctaccctcgctggacttggggatttttacataatggcttatcccctagtgcttcttggtgtgtcgctcatattcctaggctatgtacttttcaaggagagcatctggaaggagagcactgcagttctctttcctgccggggcgattttattgggggttataaacgtaacctttccagtcacacacgaaatcaagacggtttccggctacctctacggtgccggtgcccttgccaggtttatgatgctcgttggaataacaacgtactctttcctcacgataaatccaccagaaatgccgataatcaaaattccgcggggagctttttacacgaccagcaaagataccgtagaacgccttattagaactatgcaggaaacaggaaacggtgttttaataaccagagaccctccaaaagatctcaggcctttgtttcaggtcttttgggtcacgaaggcagccaaaggtcaggtgtccgataacatcatagccgtttctccaacggatattggaatcctagttgatatagtgaagaaatacttagatagcggccactcgcttgttgtgctcgacggcttcgagtatctcgtcctagagaacggctttgagagcaccctgaagttcctcctctcgcttaaggacttcgctatatcccagggtggaactctcgtgctgttgttagaaccacgggcgttctcggagaagcagctgaaaataattcagagggagtttgaagagttcgagttctgagctctttttctcacttccacccacgtcgaatggtatgctgaagcgttcccgtattcctcggccgtctcgtccgtagtaaggaagtttgcattccacccgaggagcctaacccagaaggccttgtagaggaggacgacacccctcggcagatcctctgtgagcttcacggtggtctttatcctccccctgtcgttgaagacctcaacatcatcgccgtcctttattcccctcttctccgcgtcggccgggttcatgtagagattggggtcaatcatcccgtgggtgttgtggtactggctcgttatcgtcatgcggtaggtaggcgttaggagcttcagcggatacttgccttcccgctttctgtactcggggaacggagagagaccgcgctcgacggctcgctgggagtagaactctatctttccgctcggcgttttccatctgcgcggcttttcaggaactctaatgaaaccctttctcttcagctccccccagctcaggccgtttagttcgaggatttttcttatcacttcctcatcgctctcgtgtaggtgggggttttggatgccgagggccttcgcgagaagcctcgtaacctcactgttggactttccgtagagcctcgcaaccggctcgttcagggcaacgtagcggtggtagtagctgtcggctatgtcaagccgctcgaaaaacgtgttggcaggtaaaacaacatcggagtatagggctgtgtccgtgaggaagatgtcgtgggtaaccacaaaaacgtcgctttccttaagggccttcctgagcctcctctggtttggcaggctcgcgaggggattcgagttgtagatgtagaggaactttatctcgcccttctcgatatactcagccagcttcacctgggcaatccttttggcgggtttagtccttaggaaagcaccctcagcgtaggacttgtctatcgtcttcatgtcgtagatgaagccaaaggggtggccgacgagcgcgggaaggatggctatcgcccttacagcttcaccgcccgagagggagcgctggaagccgtagcccatgtggattactcccctcttctcggagaaaccgaaggcaaagtcctcaatctcctcacgtgagagccccgtctctttaactacataatcaagcgataacgtttttacataattcttgaattcttcaaagccgtagacgttctccctcacaaagtctctgtcatagagttcgttctcgattatcagcttcgcaacgcccagagcgaagaggacatcggtttcgggccttatttggaagaacctgtgggagcgcttggcggtttcggttctcaccacgtcaaccgtccaagtctcaaggccgtagcgctttgcaagcatgaagccgtggaggttcgtccagaatgggttgacgccccagtaaactattagcctctgcttcttcagctcttcagggtcaagacctatcgcggttccgtaaacgtccttcaaagcttcctgcccggcccggtcgcatatgccgtagtcgagcattgcagtgttgaggtagtgaaagagtctcagtggaaaggcgtagtttacaacgcccctgtcgccggcgtactggtagacgagaacgctctcgcttccatactcctctatcgtttccttgagcttgttagctacgaagtttattgcctcgtcccagcttgcttctctgaactccccgctccccctctcccctgtgcgtatcaggggagccttcagcctgtcgggcgagtggaaccacttcggcaggagagcgcccttaggacagaggaagccggccgttatcaggtgctcggggtttcccctcactgacagttttccatccttgaattcgctcaatatcgagcaggtatcgtagcagtctctcatgcagacgctgaacggcattatccaaacacccccagtgcaggcccaatcgttatccccatgctcagaaggccacccagtataagggccggaactgttcgctttttctcgatgccgaacagataagccgctagggcccctgtccacacacctgttccaggcaaggggactgcaacgaaaacagtgagacctatgaaaccccacttctcaacgtaggggtgggccttcttccttacccgctcgacgtaatagatgtagaggcgagcaagcttcctcaatggagttctctcaagccagagcataagcctgtctattaagggcaggacagcagggaggagaattgagagaagcagaactccaagggcagccgccaggagagttccccatagggggtatcccctcccaatgccgtagactatggcgtagcgtccctcaaaagtcggaatcagcgagagcaggaagacctcagcgaaccagttcaacgtcaaacacctccagtccaagcagtttaacggttttttgatatactggaagccatgaatctctggttaagtccacgaggagatatgcccaggaacccagcagaaggctgaacaggacatccccaagccagtggacgtggagcagaagcctcgtaagggcgattccaacggcgtaggcccaccagagcggggcatacctcggagagcgttcctgaagataggaagcgagaactgaggccctcgcggtatggccagaggggaaggcgaagtagtcaacgtttttgagtgccatgaggaaaggcaacgagacctcagcctcgtttggtctcggagtttgaaacgtcgactttaaaatggcaactataccaagggtaatgatgccggatagaactaacctaaccgtaggataacttaaatgcccggttttcctaacatctaacgcggcaaagaacaggactacaatcaggaaagccgccattcccgctgtttccgttaggagaacaattggaaagctgcttgtatgtggaagagtagaatctacgcgggtgtttatttcatccatgtatcccgcgacctgtagaaagaaaatcatcaagaggagtccgctgagtacgtagaatagcaattctctattttccataccagccaccaacctaaatcaagccctctgcgtagagctggtgataggccttcaggagcgccccctgaaccctcttcggtccgaaagtcctcacagcccttccaagcccctcgttgtaaatcctgcgcagtatgaagtcagtctccctgttgaggttcagcttttcctggttttcgaggtagaggcgcgctatctcctcaggttcgcggtagtttaaccccttaagccacttgagcgggattccgtcctcgaagcgcttaaccacctcaaagcctattatggtaacttcatcgtcaccgtgaagctctccgtatatttttgaaagctcacggaggagctctttaacgtccgaaaaaccgtccagtttggcgtcttcgttcgtgagctccctgactttcttcttttccactttggttatcctgaccttggcaacggcggtgtcgctcggcgttatgaccaggtagacctcgctccccggcttcgcctcgtagtcgccgtagcggatcgtggtgaccttatcgccccgcagtatgcgggatttataggccgagtcaatcagcatgaacttccgtatctgaacgggctttctcctcattgtttaaccccctgattatcttgagcagatcttcaagcctctcgattgtgaaatcggcgtactcgacgtactccatctccctgtctctgtatttaccgtacctgaaccatacagtcgtcatcccgacgtttttggcaccgtaaatgtccgagtagagacggtctccaaccataacggcttcttcaggctttacatcgagctttctgagggccttcaggaatatcttcgggtggggtttcttaaccccgaggtagtcggagatgaagacatcgtcgaagtactcatccagctcaagccggagtatcttctcccactgttttatcgggtctccatcggtcacgaccgccaccttatagccctcacgtttaagctcgagcagaaccctcctggcgttcttcacgctccttaggtaggcaaacttagtgttgtgataggctatcacgcctgcagctatccacttcgggttctggggaaggtcgagccttctaagcaggtagtcaaagtgcctgccgaagttgctcccgtactcgtttataagctcaaggagctcgttgtaagcggtatcaaaatcaacgggaagcccgtgcctcaccatgttctcaacggcgttccttctcgcgagctcggcgagttttgttgtatccacaagggtatcgtcaagatcaaagaggacagccttgatcataaccgctcccctcacgttctctacgggacacgggtatttaaccgtagtgattcctctctgccataatatccttgacccgcctcaggagctcgggcatgacctcgccggcctttcccctgatgaaaacatccgctattggggttatcccgctcctttcaacgttgacctcgatgaccttcccaccgcgctccttcacgatgtagggaacgtacgccgcgggataaacgacgccgctcgtccctaccacgagaacgacgtcggcacgctccgccagggagaaagcctcctcaagcgcttccctcggcagaggctcgccgaaccacacgacatcgggccttaagagggagccgcacttgggacatttgggcagctctttttcgcggacgaactcgaagaccctgccgctctctttgaggttctcccgataggagcatgaaacacacctgacgcggaagatgttgccgtgtagctcgactacctttctgctcccggcttccctgtgtaggtcgtcaacgttctgagttatcaccgctttgagaacgcccatattttcaagctctgcaagggccttatgggcggggtttggctccgccttcagaatctttctcattctccatttgtagaactcccagacgaggtgcggatccctcttaaaagcctcaggtgtggcgagttcttcagcccgatacgtcttccagaggccgttcctgccgcggaacgtgggaatgccgctttcagcgctgataccagctcccgtaaatgctatggcaaacctcgcccttgcaaggagcttggccgcgtgtcccagcatggtcgagtgttggattcgaccttttaaaaagttcctctcaagggagccgatgtattcatggccgtgtcgaattatattagaaagagatttcaccattccgagcgtggctttatataatgtatccatccgttcatcctggaggtgagaggttgccgatttcagacggtattgagagaaagaaggttcccacttcaagcgggcgctattattcaatgaggatagccgcacagcgcaggaagaaggtcatgctcattcagggcctcagaaggaaaaagggaacccacggacttagaacgagcccgataagggttgagaaagcccacataacgaagggagaagcgctggcaatactcgttggaacgcagataggggctggagtcctaggactgccctacgccgccagcaaggtcggcctcatacctgccctcggagtcctaattggagtcatgttcctgatgctctggacggctatgatcgtcctgaggttctccgccgagatgggcggggcgcagatgagcacagcggcccagaggatcctcggaagggccggcggctggctcatgtacctcagcatatccctaatgagcttcggtgcggtgcttgcctacatagtgggtatggggaacgtaatttcgagcctgtttggagtgagcgatacggtgggagcggcggtattctgggttctggcctcaatagtcgtctacaaaggccttgaggcgagcggaaagaccgaactggccatgagcttcgtcatgctcttcctcttcatagcggtcacggcaatgatactgccccatgcagagcttgagaagggtctctacgttgacctctcgggcctttggagcattactggtgttgcaatcttcgccctcggctgccacacggtcattcccgacgtttacaagggacttggaagctacgaggagaccaaaaaggtagtggtgtgggccttcataatcccgacggtcatctacgcgatattcatggcaaccttcctgctcgtcttcggaagggatacaccacagatggcgacccaggggctggaactcctctacggaaagctggggtggctcattggaaacctgataccgctccttgccataacgaccagctacatcggcatcgcgctggcccagcagagcaacaacgaggagtttgttaagctcaagagacccgttgcgtgggctctgactgtaatacccccggccatcgtctacttcgcaggtgtcaggaacttcgccgatgttcttgccctcgcgggggacacgggtgacatgatagccttcatagtgctcccaatcctcatgtggctggcatacaggataaaacacagaaagtgagcgcttcgtttttattccctttttcaaactgttaaacggtggtggacatgaggcctaaggttttcataacccgtgccattcccgagaacggcatcgagatgctgaaggagcactttgaggttgaggtatggcccgaagagcgcgagatacccagggaggttctactcaagaaggtcagggacgtcgatgctctagtaacaatgctgagcgagaggattgacagtgaggtcttcgacgccgctccgaggctgaggatagtggcaaattacgcagtcggctacgacaacatagacgtcgaagaggccacgaggaggggcatctacgtcaccaacacgcccgacgtcctgaccgacgccactgctgactttgcctggacgctccttctagcaacggccaggaggctgatagaggccgaccacttcacccgctccggagagtggaagaggagaggaatcgcctggcatccgcgctggttcctcggctacgacgtttacgggaagacgatcggaatagtcggcttcggaaggataggacaggcagttgccaggcgcgcaagggggtttggcatgagaatcctatactactccaggagcaggaagccagaggctgaaaaggagcttggggctgaattcaggtcgcttgaggacctgttgagggagagcgacttcgttgtcctggcggtgccgctgactaaggaaacccagtacatgataaacgaggaaaggctgaggctcatgaagaagactgccatactggtgaacatagcacgaggcaaggtcgtggatacaaaagccctcatgaaggccctgaaagagggctggattgcaggggccggtctcgacgtctacgaggaagagccgtactacaacgaggagctgttcagcctgaagaacgtcgttctagcgccgcacatagggagcgcgacctacggggcgagggagggcatggcagagctggtcgcgaggaacctcatagcgttcaagaacggtgaagtacctccgaccctcgtgaataaggaagtcgtgaaggttagaaaacccggcttctgaaccctttgcccctttcttacattgaccatccgaccggccaggtcagttttataaggactgatgctcaccttcttcggtatggcgctgaagctcaacccggaagccagggcagtttacagggatataacctctcaaatcaagtccaggttagtcctcaaagagagctccgactaccttgagaacttttctccaactaacgaccgcggggagatattgaagaggcaggaatacctgagagaggccctcaggagagttaaaccggggcttaaggagttaataaagagggtcaggttcatacgattcacccgagactacctgcacgacagggttctcatcgttgacgaatccgaagtggaaacggccataaagctcggcctctgcgatgtgacgacgaacccggaagaggctgaaggctacccgctcgtcctgagtacgatcggctacggcatcgacgtcgagctactgccatcgcaggtcgctccagagctctacgttctcccgctctgggagaacagggagacgctcaaagcccttgaggagatagggaagctgaccggcgagggcagcgttgccggcgagattctcgaacacctgtcacccttcggggaggtcgttgagaaggaaaagcttctggggtctctggatgagctcatagccgagaaggagagggagctgaacgagagaatagaggagaagcttgagaagttcagcctcactctcaccggcagagacctcgtgaagttcctgaacgagctgagggagggcaactacgaggccattttctcccacttccgtgaaattgaaggggaaatcctcgacatgataaacgaggccgagagcgagctttcaaaggttctgggccttcacgtggagcttttctcgcgcgaggagctttatccagtgagaatcccgccagaggtcgttgagggcctgagaaccgagcttgagcgggagctgaaggttgaagtttacatgaaggcgagggagatagctgagaaggtcagaccgctccttccaaagctcagagaggagctttcaaaaatcagggagctcgactttcttcaggcggtgaaggcattcacggagggcttcacttttccagagatagccgaaagcgggatagccttcctgaacgggcggcacctcttcatagagaacccgcagccggttagctacgtcgtcggggaaaagccagagtggttcgacgtccccggtgcggagaacgtgaggggagagaacgtcgttatcctaacaggagccaacagcggtggaaagacgagcctgctcgagctgataacccaggtttccattctcgcccacatgggctttcctgttcctgccgagagggcccgcgttggagtcctcgacgagctgttcttcttcaggcggaagaggagcgtctacggcgccggtgccttcgagactgccctcaggtcgtttgtgaggtctctccgtgggaaaggaaacaaacttatcctcatagacgagtttgaagcaatcaccgagcctggagctgctgtcaagataatcggcgagctgttgaaggttgcccacgagaagggcttccacgtggttatagtctcccacctgggcgaagacctcaagaaagaactgcccttcgcgagggttgacgggatcgaggccaagggccttgacgaaaacctgaacctcatagtggacagacagcctgtctttggaaggctcggaaggagcacgcccgagctgatcgtcgagaggctcgcgagaaaggccagaggggcggaaaaagagatatacgagagggttctgaggaagttcagggagagctgagattaattgtgatagcgtcttagtagctcccgttttagtctttgttcacgtttttgctgtttgtgcttttgagcgtttaggtagaggtaatggcggaaaaaagcaagatatataatagagaacagagaaaatacaaaaaattcatgggccagtttttgttctgaacttgtatttgtataaaggttatttaaagccttgccaaccaatatgctcaatataccaacaactccaccagagacagcaatgagaaggagttcagaaaaagtggatttaattttagtgagcttccagacaaaaactaatcccaaaagaacaaacaccattaagagcactgttaaaataaggtttacaattttgccccattctgagtctactaatccaaacccaaatatcactaaactaagaaagaatcccgatacaaaccctatacgttgtgttttgagtgtaagattgggaagcttgataggtctgctgagactctcaaaggaagcataccaaagtatagttaatactgccaattcaatcccaatcaaagaaaataccaatatcctgatgttaagattatttgtgcctagagaactactagttgagagctcatttggggaaaatccaggggttttttcattatcggggattataactattccagagatcaacgtgattgttaataagagaatcatcaacacaaaacttacatccctagcagtctcaagtattgcagaatcactgatcaagaaccacgcaataatcagaaatatcatggtgaggatcatatacattgacaagaggttatacacaaataaagatttttggaaattttcgtcaattatcacttgaacgaacagtaatataattgaagttataagagtaaccaacaaacccatatcattagaaggctcttttttccacctatttattgtctgtctaattctttcttgaacccatctcatagtaatcaaacaattaaacccacaaacactcttaaaaccttttgcagtctaaatgtaaattatgaacaccacaaaagaaagagttctctttgcctcggtgtgtgtagggacagcttccgtactattactactttatcttgcacctgcatcgattaaggagcaactggtaatgaactatcaagaattctcattttcaaatccccacgactggatcaggctttataccctccactttgtccacatggagttttggcatctagctggcaacctgctcacgtttatcttgctattccccattttgtacttcctctcagaagttggaaggagtacagatgcttttaaacgcttcacagtcttcctgtttcttgttatcccaccgataattggtattcttgatctactggtcatgaggcggtacaacctaagatacggtatggggttttctgggatagactcagctctgcttggcgcacttccgtatttttcttcccttgcgcttcaagaaaggtttagactcaaagtttcccctacaatgttctcatatgcatttacattgctcttaggtggcctgatagcccttatatattccatcatttggccagcagttctcctgattatcggaggaggactatttctcatttatttgatttcccaagctcttagggactcaaatgtccaagatccccatcagaaaaaagctgtctggaactttgttttggcaataattataataatggtcggggggattattggactattcccttcggttattgtctggaggtctgggcttgtaaatatctttgtccattatgtaggccttgcgagtactttatacggcttcccaatattggaagagattcttaaaaacaagagaaaacgcagaactactaactaagccagctcctctccctgtacctgcccctgctctctatctccctcatcttctcctcgacttctttcctcgcttcttcgccgagaacttcagcatagccttcaaggacggcctcgaagcccctctcgaaccaggtgtagtgggtgctctccatcgccctcctgaggaggtgcaggtcaacgccccttgcttcaagcgtcgagtcgaagtcggccaagccaaagtctatcaggtagaccttgccgtccctgaatatcatgttcgaggtcgttaaatccccgtggactatcccagccttgtgtagctttccaatctgtctcccgacctcgcggcacagctcaagcctctcttccatcgggacgctctcaaggagctccttgagcctctgtccctctatgtactccatcacgagcttcatgtccctcaggtcaacctcataaacgtggggacagttgacgccgaactcctttgccctgtggagaattctcgcttcccttacggttctctccttcctcagcttcacgtctatctccttgatcctgtacctctttggaatcctgtgctttacgatgaccctctctttgagcagaggaacaccaaagacctcctcaaagtccgcctcgtatatcttcgcctcggccccctgggctattagcttcaccctatcaccccgcaatcccaatgccctcatcaacttctcgtattccctgacgaaaactcttatctcggcaacgttttcaattttaacgatgagcgtgccagttccatctccaaccacaaggacggccttatcaacgttgccctcgttaagaagcctgcgcgcgtactccagccgttctttgggagactctatcatgtcgtccagaaaagaggcgagattctccacctcaacctcatttacgccgtagctttcaattactcccaaaacctgcctcacttcctcaggagagagctcatagacccgtggcttcacggttttcacccactgttaatgggccttcaacgttttagttctttcctctgctttttggaatttatttgtcatttgttcaattttagacgatttttatgaactttttgacccaaaagcttttatagagcactaacgaagcgtttctgcaaaaagcaattcgataggaggaatgttaaatggcacagcttagtggacagccggttgttattctgcctgagggaacccagaggtacgttggaagagacgcccagaggctcaacattctcgctgccaggatcatagccgagactgttagaaccacccttggtccaaagggaatggacaagatgctcgtagacagccttggcgacatagtcgtcacgaacgatggcgctacgatactcgacaagatcgacctccagcacccggctgctaagatgatggttgaggttgctaagactcaggacaaggaggccggtgatggtactaccactgccgtcgtcatcgctggagaactcctcaggaaggctgaggagcttctcgaccagaacattcacccgagcataatcatcaagggttacgccctcgccgccgagaaggcccaagaaatacttgacgagatagccataagggttgacccggacgacgaggagacccttctcaagatagccgccacctcaatcacaggaaagaacgccgagagccacaaggagctcctcgcaaagctcgccgttgaggccgtcaagcaggtcgccgagaagaaggacggaaagtacgtcgttgacctcgacaacatcaagttcgagaagaaggccggtgaaggtgtcgaggagagcgagctcgtccgcggtgtcgtcatcgacaaggaagttgtccacccgaggatgcccaagagggtcgagaacgccaagattgccctcatcaatgaggcccttgaggtcaagaagaccgagaccgatgcgaagatcaacataaccagcccggaccagctcatgagcttccttgagcaggaggagaagatgctcaaggacatggttgaccacattgcccagaccggtgcaaacgtcgtcttcgttcagaagggtattgacgacctcgcccagcactacctcgccaagtacggcataatggccgttagaagggtcaagaagagcgacatggagaagctcgccaaggccaccggcgccaagatcgtcaccaacgttaaggatctcaccccagaagaccttggctacgctgaggtcgttgaggagaggaagctcgcgggcgagaacatgatcttcgttgagggctgcaagaacccgaaggccgtcaccatcctcatccgcggtggaaccgagcacgtcattgacgaggtcgagagggccctcgaggatgcagttaaggtagtcaaggacgtcatggaggacggcgccgttcttccagctggcggtgctcctgagatcgagctcgccatcaggctcgacgagtacgccaagcaggtcggcggcaaggaagctctcgccatagagaacttcgccgatgccctcaagataatcccgaagaccctcgctgaaaacgctggccttgacaccgtcgagatgctcgtcaaagtcatcagcgagcacaagaacaggggccttggcatcggtattgacgtattcgagggcaagccggctgacatgctcgagaagggcatcatcgagccgctccgcgtcaagaagcaggccatcaagagcgccagcgaagcagctataatgatcctcaggatcgacgacgtcatagctgcaaaggccaccaagcccgaaggcggccagggcggcggaatgcccggcggaatgggcggaatggacatgggcatgtgatgcccctttcacttctcttttccttccagcaggaattataaacccaaagaaagaacttctgcatagaggctggcaattggtaccagaccaaagcttttaatacccgattgttattttagtctgggggtgagagagcatgggactcgtgatgtggctgagaaccggagtgctcatggcgatcctaactggcctgctaatggggataggctacctcttcggcgggccgaatgtggcgttcataatgttcctgttctcaatgttcttcaacttcataacatactggtacagcgacaggatagtgctgagctggtacaacgcgaggatagttgatgagtacgaagctccagagctgtacgcgatagtgagggatctcgcccagagggccggccttccaacgcccagtgtggcgataatcccgagcgagactcccaacgccttcgcgactggaagggatcccaagcacgccgtagtggccgtaacccagggactcctcaggatactcaacagggacgagcttgagggagtcatagggcacgagctgacccacataaagaacagggacatactaatagggacggtcgctgccgcaatggcaggtgcaataatgcagctcgcctactgggccaggtggatagccatattcggaggatttaaccgggacagggacgatggcggagacatcattggggctatactcgtggctatcctggccccaatagcggcaatgctcatccaggctgcgataagcaggtcaagggagttcttagcggatgagggtggagcaaggataagcggcaagccgcacgccctcgccagcgcgctgatgaagatagagcaggcagttaactaccgcccgatgagggaaggcaacccagcaacggcccacatgttcatcgtgaacccgttcaggggcatgagcatagcgaacctcttctcaacccacccgccgaccgaggcgagaatagagaggctcaggaagatagcggaggagatggggatttacttctgattttgttcttttaccctttcgaattacttgctaccggttagggcataaattgattaaagaccatctttgcctttctcctgctctttgaataactcacgatacttctcgcaactcctgaacagctcttcatgtctacctctgcatagtattctaccatcatcgagaacccatatctcttccatgtccctgaccgttgatagccggtgtgatatgatgataagggtcatctccatttttctcaatctttggaggatccttgcctccctctcagaatccatgcccgaagtggcttcatccagtatcatgatcctgggatttctagctagagctctcgctaaggctatcctctgtctctggcctaacgatagatttttaccgccctcttcaataggtaaatcgggatttagttcctcaagttcaacggtttttagaatctccacaatttcgctgtctgtgagattttttccgagggcaatgttttccctaaccgttccctcaaagagatacggctgtgacggaacatagataagttccctgccaagaagggactcgggtggacactttccgatcttaactttgcccttggtgggcctaattattcccgagattatcaaggctagcgttgtttttccaactcccgaaggacccactatgccgaggtttttgccaaaggcaattctctcggagatttcctttagaacctgacttccttcgcgggatagggatacaccctgcaattcaatatcccaatcttctggagtacacgttgatctttcaaggaatggttcgatttcaatgaactcccatattctttcaattatgggaacggctctgtgataactgctccagaagaatgcaaatcgctcaactgggtaatagactctgccgaggtatgtaaacgtggcgatcaccgacgaaagggtggccattccattcttaacaaaaactataccacttaggaggacaagaagtggtaggatcgttgatagatatgactgaaggccatagctggctgtgctgtaaaaagcaactctttttgatgcattgacccaacggtcaagcctttctgagacccttttgataagatagtcgaacgcatcaagggtctttatatcaagcctaccgtctattccctctttaaatgcggtaacgctctctgagtatctctttctttcttctgaagaggccagcttaagtccatgaatgaacgccctgagggagagaccgtagaccggaagtgttaggagggtaacggcacctagatatgggtttagtctaaagataaccgtcactccaatgattagagaaaatgcctctataatgatggcagggattagagacattcccattctaccgacgatttccgtgtccgattgaattcgggagagggcatcacccgggttgatgttctctgagagcagagttgagatgaacagttttcttttaagccatgcggcagctttcgtttctgcgaagttgctaacaaagcccgagtataagtagacgatcgttgatgcggtgtacaggaggagtataattccaatattcttcaggatgtcatcggtattcatcttgccgaggttttcaatgaggctttgaatgtaaaaaggcacggctgcagataggagagttgatactgcccccaaagttatgaggaggaacacgtatttcttgtgagccagtccaatctggagaactctgcggagtgctttactcaattatagtgccccctagtgtatgtatgactgatctcatgtttctagtgaccatgttatacatgatatgttctagtactttttgataagcatttggatatcttaaatagtaagtaccactaacttccattagatgggctttacaaaagctacagacactaaatatccattgttcgttattatttgtatgaagattagacatcgcaaaattatccactgcgtttttgaattgtctctgtaatgtatccttaaactccctgtccattatatgtcctagatagaaacgtttgtctagatacacttggtggcaggggtatacactaccatcgtgaaatacagtgattctagttgggaattcagggcatatgcattttttaacatgatagactgggtctaaaagctcacgaagtaccatgcagattcccatttctcgtatttgaattccattttcccattttgtaaagaggtaatttacaagttctgtcatcatgttttcaacttcttgttcggttggttcgtatacttgtcgatgtccatccactgtgggcagaacatatcctactatgaaagtcttcgaataattgctaaggtaatccaaaatctctgatatggtatatttgccgatataattacgggcgtatgtgatctctaaggctaaaggaacttctagatcattcaataagttcacggcttttatgatatcatcatgtgttcccttacctgtggagtatactctgtttaagtcatttatctcccttggtccatcaatacttattgtgacctcaaaatcatgttgttttagaaaatagcctatctctttacctatcaatgttccattcgtgattattccatatttaaagttatacccctgtttctctgcatacttaacaagcttggatattaattcaaaattgattagaggttctcctccgtagaattgtatatttgttactcctaaatcgtttgcaatatcaagagcccgttttcctatgctttctttcataactccaggagtgttatatgtaccggaatgagcatagcaatatttgcatttcatattgcaaagttgagataccattaataccatcatattgggggatccatctaatggaaattgctgtttgggggcattttcacgtttctcatttaggaaatcaagtatgtctttaaggatgtatttttcagatatagacagcggaatacttctttggaacttttctattatatttttttcttgcctatttagtattaggacagttttactcattggatcgaatgcaacatattcattttcgttaatctgttttgatagtatgtgaactttcatagacattataacacctccatgtgtgatgagtacgccgtgttgattaattaaaaaataaaaataaagttctaaggcttcagtttgtgttgactttgttacagcagcagtagttgcccgagcccccagcactcggagccacaggcggaattattgccttcaaatctagactcttcatgttcaccaccttgcaggttcatcatgcttcacaggcccatgcctcagcaattacaattatccatcttaaattaaaatatttttgagaaccttatgttattaacctcaggttttaaacctaaaaatatgattcattttatctgatagaaaacaaaatctgaactaagatgtgattagtgatcttaaggtttcccctttagatgttccatttaatctcctaagaaagaaattataaagaagaattcactctaaaacctctttaaggtgtcttaggtttctctacatctctacgaaaaccaaatttaaatttctttagagcacctacaatttctcaagcctttccaagtacctttgccttctcacgggctcgcctcctcagtctgactttttccctcacgctttcaaacctgttctcccgtattcggtgctccatgtcattccagagctttctgaacctgtaaaagtactctgaaagctcgagctcgtctccatagattacccggtggttcttgattacatcgatctgaatgtagaggggcagctcctcgaaaaccttgacgtcgtactttccgccgagcctttccagaaccttctcgtacgtccctggcttcggtttcacaaggcacacatcaacatcgctctgcccggttgcctctcccttgacgtgggagccgtagagaagaatccccatgcagaggtctttgaactccctgaagtccctgcggagctcctccatactgaccactttcccccacctctgaaagttggaactgatcaaaataagcctttcgtcaaatgtccaccgccctcgtcatcgccccgtctataacgaccgtagagccgagcatgtactcagcttcctcgctcagcaggaaggccaccagcgagccgagctcttcccacctgcccgttctgtggagcggtgtcctcgagaggacttccctctcccaggtctcctcaaagggttctcccctttcctcggccagttttctcaggttttccctcgcaccgggggtgtcgaagcttcccaaaagcaccgagtaggccctgatgccgtacttcccgtaggttctcgaaacgctcttcgccagctggattagtccagctctcgtcacgtccgccagaaccagcggaggcattggctccttcaccgagaccgagttaagataaacgagcgttcccttcatcttcttttccagccaggtctggactaggagcgtcgtgaggtagcctggcgcgacggaatggagtgcggccgcctcaagccagtccatataggtggcctcgtggaggaagcagggctcgcacctcacgttgccggcattccagattagggcatcaattccgtcgagaagttcccaggaagtttttacaaggttctccagctcccgctggtcgtataggtttgccttaacagtttggacttctccgaactccgccagctctttttcggccatcttgagatgttcggaattcctggagctgatgacgacccttgcgtttctcttcaggagttcgcgcgcgacgttgaagccgataccccttgatgatgcagtgacgatgacccgcattcccctcaggtctatctccacgctcatggaaatcacttggcggaagtagttaataaccttgtccgtctatccgacgaattaggtttcccgaatttggaaagttttcgtcatttgtacaaacttttcatgaaaaatgccttaaagttgaaaactttttgttaaaaaccaaaggttctaaaaaaatattgggggtgattgagtgaggttctacatctgcagggaaaagggagaaccaaagcctttcaggatagcgatcatcggcgcaggaccggcgggattgtcggcggctggttatctggcctgtagaggctacgaagtccacgtttacgagaagatgcccgaaggaggaggaatggtggcctttggaatcccagagaccagaataccaataaggacggttagaggaggggttagagatcttgagaggcttggagtgaacttccacttcaggacgaaggtggtctacgattctcccagggagctgggcgacgagtgggcggaacacttcgtctcgcttgagagacttttaggggagtttgacgcgattctgatagcaaccggtgcctggaggccgaggaaattgaaagtgccaggtgctgaccttcccggcgtttacgacgccctcagcctgctccaccacataaagatggcgaggataggctactactcctgggaggggatacccgacctcaagggcaagcacattgtggttataggagcaggctacacggcggttgacgttgccatcgagggcaggcttctcggagcggagaagataacgatggtctacaggagggggctggagcacagctacgcgaagaccgagatcagaaaactcattgaagagggcgttgagttcatagagttcgcaactcccgtgaggataatcggagacgaaagggttcagggagtcgagttcgcaaagactagaatcgaagagggaagcgtcataaccactgacgagcgctttatactcgatgccgacatcgttgcctacgccattggccagctaccgaccagcccgataagggaggtggtctgcgccaacgaggaaattctaaaggaagcaggcatcttcttcgcgggcgatgttgtggctccgaggaacattgggacagctatgagggaaggaaaggagagggcaaaagagattgaagagtggcttctaaagaaagcccccaagaaggtcttcccagtccccgttgctgccaggcttatcagcgaagtcgcgaacgggaagtgctgacgaaagctttaaacactctctccccaaccccattccatgaccgagccgaaagatatcgtcctcaaagagagcgaagaggtagagggaatcccaatagaggggccgtggctggacgacgtttcaagccttgaggaagttctcgactactatgaacggataggcttccaggcgacccacctcggaaaggccatcgaaatctggaaaaaggtagagaagaggcgcgccgaagggaaagaggttagggttttcctcggctacacttcaaacataatctcttccggcctgcgcgagctggtcgcgtggctcgtgaaggagggtaagattgacgtcattgtaacgaccgccgggggaatcgaagaggactttataaaggctctgaagcccttcatcctcggagactggcacgtgaacgacgccctgatgcgtgagaagggaatcaacaggataggtaacatcttcgtgcccaacgaccgctacatcgagttcgagaagtacatgatacccttcttcgagcgcgttcttgagatagagaaggagcgcggaaagccgctgactgccagcgagttcatctacgagctcggaagatacatggatgaaaagcttggaaaagagaaggagcgctcggtaatttactgggcctacaagaggaacgtgccgatcttctgcccggcaataacagacggctcgataggggatatgctctactttttcaaggaggagcgaggagatagagaactcatcatagacatcgccaacgacatcgtgaagctcaacaatctggcggttacagcaaaggagaccgcctcgataatcctcggcggctcacttccaaagcacgccataataaacgcaaacctcttcaggggagggactgactatgcgatctacatcacaacggccgtcccctgggacggttcgctgagcggcgcgcctccgagtgaaggggtcagctggggcaagataagggcaaaggctgattacgtcgagatatgggcggatgcaacgctagtcttccccctgctggtgtggaaggtgatgaaagccccctgagaactccttcttctttaccatctgcccaacaaccacagctcagaaaaggttttttaacgtccctgctaactttcgaccatgagagtagcgatcatgacaggcgacgtgagggtctactacctcgccaccaaggtgttaaaggagtatgggataccctttctgagccttagggttggcgagaagattccctacgatgttgaggtcgtgctcacgggtgagaaagataaggttgagttccctgttaaggttatcgtgagggatgaaaacttcatagacgaccttctcgccaggctggaggggagaaagcgcttccagaacgtcttcatagccatagacccgggggacaggccgggaatgagcgtcgtcgccgacggaagggttatagaggtccacaggcttaaaagccccaaagacgtcgaacccgtagtgggactgcttgagaaatacccgaccgccaagctgaaggtcggcaatggggccaaaaggcagaggacaatgatgctgaaagccctcggggaagtactcgggtatgactacccaataatcattgtgaacgagtccagaacaacgcctaaggtcggcggggttgaaagctcctcagtggttgatatcgttgcatccataaacatcggactcagggaaggcagggagaccaccataggcgacgttctggaggtaaaagaacccacgaaaaaggagatagagcatataaaaagaaggagccgcgagctgagcggaaacattacgatttcctccaggctggccagggaggttgcgctcgggaacctcacgcttgaggaggcgatagaaattcacaggagggggcgttcaagatgatattcggtaaagaagatgaaaaggttgacgagattaagctccgcgtcgcggaggccctgaaaagggacgttggaaggggaatagtcaggtttgacagaaagtaccagagaaagctcggcgttgagccaggtgacatagttgcgctcaagggagagagggttacggcggcgatagttgcaaacgcccacccagacgacaggggacttgacataatcaggatggacggctacatcaggagaaacgcgggagtgagcataggggactacgtcacggtctccagggcggaagtccaggaggccaagaaggtcgttctggcccctgcccagaagggagtcttcatccagattcctggggagattgtaaagcagaacctcctcggaaggcccgtcgtcaagggcgacctcgtagtggccggtggacagaacgaggcggtttactcgccctttgatgagctgctcagagggttcttcgaggctatgccgatcggcttcggtgagctgaagttcgttgtggtaaacacagttccaaaaggcatcgtccagataacctacaacaccgaggtcgaggtgctcccgcaggccgtcgaagtcaaggaggagagcatccctgaggtcacctacgaagacataggcggcctcagcgacgccattcaaaaaatccgtgagatggtcgagctcccgctcaagcacccggagctcttcgagaggcttgggattgaaccgccgaagggagttctcctctacgggccgccaggaacgggtaagactctcctggcgaaggccgtcgccaacgaggcaaacgcccacttcatagccatcaacggcccagagataatgagcaagttctacggcgagagcgaggagaggctgagggagatattcaaagaagccgaggagaacgccccgagcataatcttcattgatgagatagacgcgatagcccccaagagagaagaggtcgttggggaggtcgagaagagggttgtcagccagctgcttaccctgatggacggtctcaagagccgtgggaaggtcatagtcattgccgctaccaacagacctgatgcactcgacccggccctgaggaggcctggaaggttcgacagagagattgaggtcggcgttcccgacaagcagggcaggaaggagatactccagatccacaccagaggaatgcccctcgaaccggactacgacaaagaggccgtccttagggtgctccgcgagataagggaaaagggcaactttgatgctgaaagagtagacaaaatcattgccgaagttgagaacgcaaagaacgagagcgaagtcaaggaggccctcaaaaaggacgccgaaatatactccgaggtcaggaacaggctgatagacaaaatgctcgacgagctggctgaagttacgcacggcttcgtcggtgctgatttagctgcccttgcaagagaagcggccatggtcgttctcaggaggctcatcaaagagggcaagataagccccgaacaggagagaatcccaccagaggttctccaggagctccgcgttagaagagacgacttttacgaggccctcaagatggttgagccaagtgccctcagggaggtactcatcgaagtcccgaacgtccgctgggaggacatcgggggccttgaagatgtcaagcaggagctcagagaagcagtagaatggccgctcaagtaccccaaggcctttgagaggctcggcattgagccgccgaagggaatactcctctacggcccgccaggaacgggtaagactctcctcgccaaggcagtagccaacgagagccaggccaacttcatagcgataagggggccagaggttctctcaaagtgggtcggtgagaccgagaagaggattagggaaatcttcaggaaggctcgccaggctgctccgacggtggtgttcatagacgagatcgatgcaatagcaccggccaggggatccgagggggacagggtcactgacaggctgatcaaccagctgctcaccgagatggacggtattcaggagaacagcggcgtggtcgtcattggtgccaccaacaggccggacattatcgatccagcactcctcaggccaggaaggttcgacaggctgatactcgttccagctccagacgagaaggccagactcgaaatattcaaagtccacaccagaagagtaccgcttgcaggtgatgttgaccttagggagctcgccaagaagaccgaaggctacacgggtgcggacatagccgcgctcgtcagggaggcggccctaatagcgatgcgcaggataatgagagagctcccgcgtgaggtagttgaaagcgagtccgaggagttccttgagaggctgaaggtgtcgaagaaggacttcgagatggccatgaagaaggtcaaaccgagcgtcacgccgtacatgatggagtactacaggagctttgaggagaacagaaagaagcaggcagggaaggaaagaggaggccccgactactataccttctgacaccccactttatttttggaaaaggttttatacaccgatgcccaataacggtgggaacaactccagaggtggctgataatggtaaagataatggcatcaaaacttagggacgttgagctgataaccgacacgggaataaggcttggatgggtctacgacctgagcttcgatgaggagacaggggaaatactcgtcatcgttgcagagcccgacgaggatctcgacgtcagcgagtttgtcacggaccaggaaggactccttctgatcccaatcagtgcagtgaagagcattggtgaagtcataataatagactccagcaaactggccgttaagtcaaagctcaagcaccttccaagcgtgactgcaactgcacgggagaagaggcttggcggcggccttcaaagaaagggttaaaggccctcaaacagcctatttgccaggaaccttggaaggccctcttcgattatttttcttgccgcttcttccacatcgtattccaccctgtggaactccacgttctctgggggttcttcgcttgtgtctatgatggcgtagcttgcccgccagtccccgtccctcggctggcctacggagcctgggttaattattcttcgtccttctatgactttgagcatcggaatgtgagtgtgacccaccagaaggtcgtcctgcctgatgtaggtaagaacagccctgaactcgctctctggaagccatgggaagaggtactcatccagaggtgccctcggggagccgtgaatgagtagataagtcctgccagcatcgtcggtaaaaagctgcctcactggaagtcttctgaggaactctatgttctcgctcttcataacccactggtgccatctaaccgcttccctcgcgtagggattgaacccccagtccgccccaaatgccaccgcgttgtcgtggttgccccggacgcagagaaaagtcctcttccccatctgctttctgacgaactcaacgacctcgtttggactcgccccatagccgacgagatcccccatacagagtatcgtatcagcgtgctttacctctttccacaccgcctgaagggcctcccagttggagtggatgtctgagattagggcgatgagcatggtatcaccgttttaagtgatgctattggaatttatatgttatctcgagaccatggaagtggagctattacaactagagtggtgcattgatgaggccgtaaacgaacatccagagcgggattatgctgaacacaagctcttcccgtcgaatgtttcccgtatggttcataggtttcgtttcctccgtgtatagccatagttgtatgaattttgaagcctctgaaatctttggggatctgggaacatgaccataccacaatgtctgaaacattaataagcatttgagcctatatgttattaggtgagttcattgaagagactatgtgctctggcaattggtgcgttggttttggttgccctcttcaccacgtactcgtggcacaaagctgaggaagacctgaaactctccagaacggttcgtgaggagagctggggtagggtgtacttgacagtagccgaggatatctttgagtttggttacatggatagagcctttgaggatctccttgagaaaaatgcttcggaagatgagatagtcgaatacgcgggtgcttattaccttatggctaggcatgttgagagggttttcatcttcttaagctatgagttatacgaggggtatttcaagtattacaagattggaagggccttcgggaaccttgaaagattctttattgacatacgctccaagaggggagtcaataggaccgagactatccggacgaatattgaaacctttagggagatttctcgcatagcaagaaagattgggaaatacggtgatccgcgagatatcccggaggaacttgctgatgagttactgaacacaaccaaaaatctaaaactcgtctacgagtgatacgtgtggtgtctcaagaccaaaaaatgaatgggaaggagatcactccttcttctgcttcttcttccacctgctccagcggtagagcgctgcgagggcctttattgccctctccggctctgggtaggccggtattccttcctcgttgagcctgtcgatggcttccttggcctctataccgccgacgatggcaaccacgagcggcttcttcctgccgctctcgttgtactcgcggatgactatgtcagccagatccctcgggtcgaggacggcggtctggcagtagagaaccgctatgctgtgcatgttcgggttggcgagggcgtcccttatagcaccttcgtagctctcggcaccggccatacctgtgaggtcaaccgggttcttgtaggagccgaacggcggcatgtggttggcgaagaccttgaggtcctcgaggttgtcgtagaggtgcagaccggcttcctctgccgcgtcggtagccataacgcctattccaccgccgttggtgaggatgacgaggttctctccctcgggctcgggcaggttgctgagggttctcgcgtagtcgaaggcctcgccgatggtgtaggctcttatgactccgctctgcttgaaggcggcgtcaaagaccttatcgctaccggcgagtgaaccagtgtgggaagcggctgctttagcaccgcgctcgctccttcctgccttgatgacgactattggcttgaccatgctgacgtccttggccacttccatgaagcgccttccgtccttaacgccctccatgtagatgaggattgcccttgtgttctcatcctccttgaagtactcgaggaggtcagcgtcgtcgatgtcgctcttgtttccaacgctaactacagcggagagaccgactttctcaaggattgtccagcccataagggctattccaagggcaccgctctggctgatgagggcaagcgggcctgggagaacgtcggtcggaccgaaggttgcgttgagcttctcgggggtgtaaacgacaccgaagatgttcgggccgagaattctcatgccgtacttgtgggcagtttcgacgagctgctgctcaaccttcttgccctcctcaccgagctcaccgaagcccgaacttatgatcgggagaactttaacgcccttctggccgcactcctcaacgacctgcggaacgaacttggcagggacaacgatgacggccatatcaacctcgtcgggaacatcgagaatgctcttgtagaccgggaacttccttccgctgatctcaatttcgccgcccttaacgttgacggcgtatatctttccttcgtatccgtaatcgacgaggttcttcataattgcgtatcctatcttcccaggctttccagaagcgcctataactgctacgctcttgggcctgaacagtgcctctatcttggggtcagccatttttatcacctctgatgacattcacagttttacgtctgtaaaagcagttaaaacgtttctcttctcgttttgacgataggaaaatcggcgactgttcaaaacccagccaaacaacaccctccattagagccccagaacacaatagtcacatccatggcaattcacgttatccaaaaaccttaaatataacattcacctcgccccgttaagggaaatccaatgaagaagtttcctgcaaggctcgcttcttgggaagacattgaaaggtgggcgaaggaaggcgcctggaagattctggaagaaggctggaagccagatgtggtggttggtctcgccaggggcggctgggtcgcggcgagactctactgcgactacctgggaatcaaagaccttgtaagcctcaaggtggagcactggggagtaaccgctactccggacggcaaggccaagctcaagtacggcacgaactacgacctcagcgggaaaaaggttctcatcgtcgacgacatcagcgatactggtgagagcctgacgctggccaaaaactacgtcgagagcaagagccctgcggaagtcaggactgcaacactcctgacgatcagaggctcccgcttcaagcccgagtactacggagaggagatagactgggcctggatagtcttcccgtggaacttcgtcgaggatatgataaacctcgtgagcaacattcttgaggaaaaggaagcggtaagcaccgacgagataatcgagctcttcaaggagctccacggtctcgaagtcccgaagggcaagctcgaagaggccctcaggatggctgaaatgaggaaggtttttaagttcagggaagggaagtggctcaaagcctgagggagtggtagcttggacagggagaagaaggttgaggagatcaagaaccacagcgtctactcccgcgagatatacgaaatgcacagcgagagcatcgacgaggtaatagagaactacgaggagctcaaggagacctacctcaacgaccactcccgcgctaggatcgtgaggatagtcttcaacgaggacaacgaccttcccctggcgatagagttccacaggaaggacgacagcttcaagggattcacgatagccatcggcaagccgcacatcaagagcaacggaaacggaaaaaaagagaaggaatgaacttttccacttctttaccttctccttctgatgagaagcggtattattgctaggccaacgagagccgctggtccgcacatgtttttgtccgtcgcggtagttcttgaagtctctaccgggctcgttgtttgacttttagatggcgaggtcgtgggagttgttgtggttgaggaatcgacggacgtagtggttgtttcgggcactgtggtagtgtcagtcctgacggttgttgtggtcgttgtggtcgtctgcgggcttaatagaagggttgcgttgaacgactcgctgagcctctccgcgaggggtttgttgtagaacccgacctcaatggccccgggcgtccatatctcgtagctgctcaggtagtaggtggggtttttgaacaacttagtcatgttttcgtccgttcccgcgatccagaccacgtaatagtacgtgttgtatgggtttacggacgccatcaaaagggccgctttgtcgaccgtctggaacccaccagccgcgacggaggtattgccgtagactgccctgagggggctttcctcgtcaaggaggaggaaactggtgacgttgttctcgcggattactctccatccctcgccggccctctcaagccgaatcgggaagtagtcgtcgaagatgtcaacgatcctgttggtcgagggggttccgattagtacaaggtgggaacttaaatccgaaggggtaacgttcacgtcggctttgactacaacgtcgtctattccgccgtttcttctgtagaatttcctcaggatttctgcaacctcatcggcgaagcttttgatgtttctactttcagttgggcttaggttggccgttccatagattacaacgactctgttaccaaaccatcctttatcgagggcccttacgggggtaaccggcacctcaaggttgtataccttggtgacgttttcgggggacgcgaacttctcaagggactccagcgcgcggggaacgcagagggagatgtttttgagctccccgcttttaacgtcgagagcacagctctgaatctcgttgtaaagccattcgacccagaactctccccacgccttctgcatctgcatcgcaaggagggtgtagttgtggttgacgtggcttatggcgtaatctgcccaagcatccgcaaagccctcgtagatcatagtaaggccgacatagtgaccgtcgtaggtggtgaggtaaggcatatcgtccctcgcggcgtctatcacgtaagagtaggtatacaggtccagggtgttcagtacaggaatagtgacgtcgtgtcccagctcgtggtagatgaagttcagatagagcagttcgtcgaggccggtgctgtttatgaggtccctgttgagggggagtcccatcatggtgtcgcgggcggttttgtagctccacaccgtcctctgagggtccctcctcacgagcggaaggaatcccgcagccccccatgccgtcctgttgttttccgtggttgtcaggctgtggccatggatggcaaccagatacgggtggaagaagacgtacgtgacgttggagacaccggcgtgctcctccataaactcgtcgggcggaatgagtgaaagagctcctccgtagagccttaggtcttccatgtagtaatcctgatgagtcctgtaaaactccatgaagtcggtttcgttggcaaactctctcagggccggcaggaattcgttcttaaaccagttgaaatactcgcggtaatactctggtacaccctcttcagaataatactcttctaaatattcgggtatcttaagctccgggggctctgaacagcgtacgagcagcatctcaattcgggctaagtacgtgtccttccatgtaaatctattagaacgtgagaggtagtccctaaggagaatcacagccgttgagttcctgtatttcccgaaatgggcttccacttcgtctatatagtcccccctgtctataacaaaggtgtcgttgccgaaggccaggtagtagactattccaagaagttcctcgttcgggtgtatctggacctttacgttctcgcttatgtacacagtgccgttctcaacgggcgcggcaagggttgcattaattcccagtattgccagaattattattgcggcaaatactttcttcatgttatcaccgagtataaattgaaaaactgaagtttttatgttttttgtggaaggcttttaaaggggggggcgctatggtggattagggtgatctaacatgcgcagggcactgttaattgtagccgttgtaatcgctctaagcgggctcttctttcccccagcaacggccagcggagagaagccactggtagtggccacgatagggccgcttggctcgatagtcagggaggccttccctggggttgacgtagtggtcctaataccccccggcgtcgacccccacgactaccagatgacagcggagcaggttgaactcgtccagagggccagtgtgatagtgaccaccggtggccaccttccggtcgagaagcggatggtggaactcaaggagaacggcgagattgccggaaagatactcctcgtggacgactacaaaaaatacggcttcagatacctcaaggagcactggtacaacgagaaggacaacccacacggcgtctggctcgacccatacaacgccatcgcgatagcggaggcaacagaggaagcgctgattcaaagcgaccctgcaagggaaaacgagtacaggctccagtttgaggcgtttaaagcaagagtcctggggatagttgaggcgtacagggccctcatcaactcaaacgccaccgcagtcattcagatgccgcccgaccagtacgcccttgagtggcttggaattaaggctgttgaggccctgaagcctgaggaggaagtcccggccaagggcgttgacacgctcgttgagaaagccaaggaagcggacattctcgtgtacggcctcgacagtccggatcaaatgaagaaggccatgatggagctggccgagaagagcgagaaaccgcttgcaggaataacggtcttctggagctcgggcaactacacggagtggctggtgaagaatacagctgccatcatagaggcactcaaaggtgaaagcctcagagaaacaccccaggaaaccagaaaagaaacgggaacaaacaccgaacggtacatcctgctttcgctgctcacggggatagtgctcggaactgcccttggggtaataatgaaaaagtagaggacatcactccctcttgtacggttttccgtccgccttcggcggttttgcctttcctattattcccgcgaccaccaggagagtaaccacgtaggggagtgtcgctatgaactgccacggtatcgttccagcaagccagggattgttctggatgtagaatgacaggttgtcaaagaaaccgaacaggaacgccccaccaagggctaccagcgggttccagttgctgaacaccatgttcgccagtcctatgaatccccttccggctgctatgctcttggtaaccgtcccgagccagtccacgctgaggtaggctccccccactcccgctaaggcggaggctattaaaaccgctgtgaacctgtacagctcaacgtttattcccagggcgtcggcggcttcgggattctctccaacggagcggatcctcaacccaaagggggtcttaaacagaacccaccaggagacgatggctattgctatggttatcaccaccattgggctcagtgagttgccgaatgcgtccctccagagcggctcgaccttgactgtgtcgggaacttgatgctgtcctgccgttccccaataggccattattccgaaggccacgctaccgtagcctaagaggttcaggccgattccaggaatgacatggtcacccttaaggtagaccgtcaggaaaccatgtagtgcaccgaggaggagtccaaccagcgctcctcccaggagtccaacccatccattgccggcccactcggctatcatcgttccaaagaaggccgagaacatcaggattccctcgtatccgatgttgaccacgccagccctctcgcttatcgtcgcccctatgctgaccagtgctattggaaccattgctgagagggaaccaaggacgaggcttattatcatcgtctcgttcatgccctctccctccggaaccacctggttgtcaggtcgtagagaccaggaaccgccacggcaatgatgattattccctcaatgaccttgatcatctcgagtggaacgtgggcatgctgctgcattgcggtcgctccggcgctcaatgcaccgaagaggattccagagaatattatcccaagtggatgattcctgcccacgagggccacgcctattccatcaaagccgtagttctggatgttggccaatccctgggttatagcgtagctcggaggtgttcccatcacaatcccggcccctgccagacccgcggtcatacccccgagcaggaaagaccatatcgtagccttctttggactgattccgccgtattcggcggccctcgggttctgtccgcttaccctgagttcgtagcccagcttcatgtgccacattatcacatacacaatgatagcggtgaatacggctattatgaaggcgagggaaaggctcgtgccctccattaagagcgggagcctagcgctcgggggaatcgagagggtactgttcggatccctcggattgtagtagacgcttacagccagccagctgacgagatagagggctatccagttgagcattattgtcgatatgacctcgtggaccccccgataaaccttgaggatcgcggcagggaggagccagagcgcgccgactatcagacccgccaggagcccaatgagtgggttgggaatgtactgcgttgttattatcgcagcgattgccccaaagtaaacggatccctctgcaccgatgttgaaaagacccgttcttgcgcccagcgcgaacgttatggccgtgagcattatcggggcggactttgccagggtttcggctatgccgtcgagagaaccgagggagccaactataagccagtagtacgcagaactggcgctgtatccgcttagccagaggactatggcccctatcactgcccctatcaggattgccaggatactctctgccaggggcttccagtaccctttgacgttcatgctttcacacctcccatcataaggccgatctgctcctcggtaacttcctcgggcttaacaacccccataaattgcccctcgtacatgattgccatcctgtcgctcagctggagaacctcgtcgagatcagccgagacgaggagaaccgccttgttctcgtttctgagcttcacgaggtagttcctgatgtactcggttgaagccacatcaacgcctcttgtaggctgtgccgcgattataaactctggctttttgctgacttctctggcaacgatgagtttctgctggtttccaccgcttaagctcttcgctggtgcattcacaccaggggcacttatctcaaactcctctataagctcactagcgtgtttcttgaccctgccccagtctataagcccaaagccacgtgagaactcctttctccagtgcattccgagaatcgagttctccattacgctcatctcgattacgagccccatgtgggttctatcctccggtatgtgtgcaaaacccatgtcgtagagatccctgggacttttgccggttatgtcgactccattgaggtatatcctacccttttcgactctcctaaggccagatatggcctctatcagttcgctctgaccgttgccttcaacacccgctattccaaatatctcccccgctctgacctcaaaggaaactccccttacggcttcctctccgcgatcgcccttgacccacaggttctcaactttaagaaccgtgtttccaggctcctttggaggcttttgtattctaaggactacgtccctgccgaccatcattctcgctagaagctgaggagttgcctcgctcgtcttaacagtcccgatcaccttgccctttcttataactgtgacgcggtccgttatctccatgacctcattgagcttgtggctgatgaagattatagtcttgccctgggcctttagcttccttagaacagcgaagagctccttgacctctattggcgttagaacagccgtgggctcgtcgaggatcagtatgtccacgtttcggtagagcatcttcagtatctcgaccctctgctgaacgccgacggggaggttctccactgggacatcgagggggacctgaaagttcagctcgtccatgagggccttgatctctccacgcgctttttctaggtctatcttggagaataagccgtgaccctccatacctaggataatgttctctagggccgtaaaaacatcaacgagcgtgaaatgctggtgaaccatgccgataccgttcgctatggcgtcggcggggcttttaaaccgaacctctttccccctgagaaagattttaccatttgttggtttgagcattccaaagaggatcttcataagagtcgtttttccagcaccgttctcaccgaggagaccaagtatctcgccctcataaacctgaacggtaaccccgtgaagggctttagtgccgtcgggataaaccttgacgatgtccctcatctcaagtatcggcgttttttcttccatgctatcacccccaccaaggaaagagaaaaagaaaagggttcacttcttgtggttctcgtagtagtcaagtccccagtaagcaccgaagcggtagcctccctcgaacttgtagaggaccggaatctccatgccgaggactattccgatggtatctttgccgtcgttgagggctatgagcgaagccagagcccccgcaagggcagatccctcgttctccttaaacagaaccatctggacgttgtgtggcatttctggatcgtagccgtctataatgacgaacctctggttcgggtactcctgagcgacctgctttacggcgttggtcatcatgaagccgactgcgatgattatgtcgtactcaccgctcttggcaaggctcctgaggttggggaggtagtcgttctcgctgttgctctggagctcagtaatctgaagtccgaagtcctttgcggcccttgaggcgcccaggtaggccatgtcgttaaagctcaggtcacccctgccaccaacatcataaacgatcgctatcttcttggtgttctccctctggttgagggtctcgttgaagtaggtctgtgccttgggctcgttctttgcccattccttggcgaggttctccatagccgcccagtcctcggcgttcctgagctgctctatctggtccttacttgtggccttggggacaactatctccccgtttattatcttgttctgaagctcatcaacggcctgccatatccagtcgggaacttggtttctcgtctcctcaaggaactggaagagctcatcttcgctgttgaagccaagttcctggagcttcttcttcttggtgtcttcggggagggcattgaacatggcctttacatcgtctattgtggagagcttaacgccaccctccttgagaccgagctcaacgacgccaccctcgaacttgttttcttctgcctgtttgacggcgttgtaaacaccgacatcaacgcgcttcatcatgcttgctattattgcaccgggtttgatccaatcctgggctgaatcaacaccaatagcgaacgggggacccatcttcttgttgttagccttgagataatcgttaatggcttcaaaaacgcccagacccgttcctccagcaacctggtagatcacccaggccccctgctggagctgtgcttgagtcgcttgcttacccttggccgcgtctccaaaggaccccgtgtacgtgtacagaatctttatcttctcggatccgcctccgccaccgccgatacagccgctggccactacgctgaatcccacaagccctatcaacaacagggcaaagacagctttcttcatgggaacacccctgaaaggtttgtcattatggtgtgggtctagggggaaatatatagtttgtggtctgttaaggtattctgaaagattcttgacgattttccaataacttgaagcgtttttagaatatattttatgtgctagaaaacctttttaactatgttcaaggagtaactcccgattggaatgaagctgagtgatctcgtttatcttaaatcggggagaatcctgatgacgggaagccctcggagaatagcgaggatattcatcaatgagtgggctagagagggatacaaaattctggcggaaggacttccgttcgttgttgatggagatgtcttcatcggcgacccccttgagaatccaggctttgatgcgtatctaatattaaacccgctctctcgctcgaaagaagaacggaaaaagctttacggttggctggaagaaaatcgggacaagctcattcttctctatgagcccaaatacgtcggggactcaataacccgctatcagatacggaacttcatagactacctcctcgcctaccgcagggagacccttggggcagaggttataaagctgtaccgcattgaaaatggcagagtggttgagtccagggagttcatccggagaagaggcccgtgatgagtggcttcgggtccgagcggtgaggacaccagctatcgctgaggccttctttaactgtttctcttaaccaaaaactttaaatgtttttgtgattaattgtgagtatatggtagtgaaagagaagctttacacggttaagcaggcgagcgaaatcctcggagttcatccaaaaacaatccaaaaatgggataaggaagggaaaatcaaaaccattagaacacccggcgggcgaaggagaataccagaaagcgaaataaaaagacttctcggcataagcgaagaaaaaggcctaatcattggctatgcgagagtctcaagccacacacaaaaagacgacttggaaagacaggttgaagctatcaagcaatacgcaaaagaacgaggctggcaagtccaaatactcaaagacatcggttcaggattgaacgagaagaggaaaaattatcgcaagctcctcgaactcgtcgcaaaaggagaagtctcaaaagtcatcatcacacatccagataggctcacccgctttggcttcaaaactctcgaattcttcttcaaggaaaacggttcagagataatcgtaatcaacgagaaagaaaaacccccacgagaagaactcattgaagacttgataaccataatctcgcacttcgctggaaagctctacggaatgcgttctcacaaatacaaaaagctcaagaagggcatgaaaaaactaatcgaggaggtcgagaatgactaaacttgttctcacatacagaatgtcgcacaactggaacgttaattcgttcctaaaagaataccaaagacttctccagagggcaattgatgaaatatcggagaacacgacttggagagagaagaaagtcacgcacaggtattccgttggaagcaggaattatcactactatgagacgacccgcctaatcccgtattttccacagtcgaatgagtttaagcgagaattaaggaacaaactcctcaaggactggcctttcgccaagcactacattgattctgctataaagaccgcttattcaatcctcaaaagctggagagggaactacctcaaagggaagagaaaaagagcgaagccagtcgttaagagaaagttcgtgagggtgaaaacaactctaatgaaggttgaaggctcaaggatacgaatcacagttaagcctcgtgaggaatacctcgagctggacttctcaaaggagtggttctatgaaagggttaaggactggaaggtcggtgaactaataatcagggagaacgacgttctactaacgttctcaaaagaagtcgagttctctggaagaatcaaaatcggtattgatagtaacttaacgagcctcgatatttttcaccctgaaaaaggctggattagagtggacttgagcgagctacacaggattgccgagacttatgacaggattattgacgggctgaagagcgttcagcggaaagctccaaagaggattggagttctccttaaaaaatactggacgaggagaaggaacaggattgaggattatttgaacaagcttgcagtccagctttcaagagagttccctgatgcagtttttgtcttcgaggatttaaacaagttcaaaatgctccagaacggttcgaggaagttcaacaggaagctctcccgtgctacttggaagaaaatcgttggaaagctttcctatcgtgttcctgtcgagtttgttaatcctgcttacacttcgtccacctgcccggtgtgtgggagttggttggagtcccgaaacgggcgggtggtttgtcataactgtggttttgaggctgacaggcagtttgttggttcgttcaacgttttcgtgcggggacttggggtcgccctgagcggggctgagcttgatgatttgctccccaatgaacccagaggggaactgaacgtgatgaagcccaagtccgtcgtgagggttgatttaaatggagggaggttcactcacgttcctccctaaaactcacgacggacagaccccgatagtcatatataatgatatacaccctttccaaccggtggtgaagatgttcggaaagctaagggagaagctcaaaaagttcacaaagcaggttgaggagaaaatagaagaggaagaaaaggccgttgaggctccaatggctggggaagaaatacagaaggctgttcaggagtccacagagacagagggagaaaaacccggattccttggaagactcctccaggtggagataaaggagaaggacatcgaagatgccctcgacgagcttgaaattgaactccttgaggccgatgttgcccttgagaccgtcgaagccctccgcgagaagataaaggaaaagctcgttggaagaaaggtcaggataggcaccaacaagggcaagattatagaggaagccctgaaagaggctattctcgaaatcttgactcccgaaaagaaaatcgacttgctccagatgataaaatcgaaagaggataagcccttcgtcatagccttcgtcggcttcaacggctctggaaaaacaaccaccatagcgaagctcgcccactggctcaagaagaacgggttcagcgttgtaatagctgccagcgacaccttcagggcgggtgctatagaacagcttgaagagcacgcgaagagggttggcgtcaaggtcataaagcacgactacggcgcagaccctgccgcggttgcctacgacgccatccagcacgcaaaggcgaggggaattgatgtcgtcctgatagatacggctggaagaaacgaactgaacaggaacctcatggacgagatgaagaagatagcaagggtcaccaagcccgatctggtgatattcgttggggactcgctcggaggcaacgccgttgtcgaacaggccaagcagttcaacgaggccgtgaggatagacggagttatactcaccaagctcgatgcagacgcgaggggaggggcagccttgagcataagccatgcaatcggcgcgcccatactcttcgtcggcgttggacagggctacgaagacctcagaccctttgatgagaagtggttcgtggagaggattttcggggaggactgatttttagtcttttagcccctgaaaattattccgctcttttctatcatccaacttctcagattttgctgtaaggctcaggagaagagaaaaaaacaaatgcacttactcagccgagcatcgagtcgaggaacagcatcacgtagaaccccaggaagaagccgagagtgaccagcgtctcgttctcctccctcttgtatatctcgggtatcatttccttcactgtaacgtagagcatcgccccgccggccattccaagtccgtagggcaatagcgagtggaagacagtgaagaggaacgcaccgaggatgaccatcaccatctctgccacgccgctaagtgcacccatcactatgggcatgaggcgctttttctggagggtcgccagcgggagagaaacgacggttccctccggaaaatcctggattccaatggctatcgccgttatgaggcccctctcgaggtcgtagacaagcgaagtcccaactgccatcccctcagggaggttgtggatgatgacggctaaaacgatgagccacacaaccctgaggcgctccttgaactctctcggcccctcgtagcccttgacgaggtgttcgtggggaatgaatcggtctataaggtaaatgagtataaccccaagcaggattccaacgcccgctggtgtgaaagtacccgttgattctatggccgggagtatcaggcttgtaaaacttgccactatcatgactccagcggcgaaagagaggctcacatccacgccccagcccggcattctgttggcgaagatggcaagaagggcgccgagggtggtcattaaggcaacgaacaggcccgcgtagaaggccaccattatcaggctgccgcctgagatgctcagcagccacgatgagaggttcgctatgaatccttccagcattattaggctcacctaaaaacattgggctttggaattaaaaagcttttgggccggtcgcgctatcacggaaaaatgttatattcaatgccgccgagaatttttggatattgactctttaaggggggcaaaaacatgcggaaaatcaggctggggatagttggttgcgggattgcagcaaagaccctccacattccggccttaaaggagctttccgacatttttgaggtggctgcagtcacgagcaggacaaaggagcacgccgtggagtgcgccgagctcgttggcggagcggaagtttttgagagctatgaagagcttctccggtcgggagaggttgacgcggttgacctggcgcttcccgttgaactgaaccttccgttcataaagaaggcagtcgaaaacggggttcacgttatatgcgaaaaaccgatttcgaccgatgtaaagaccggaaaagagatagtaaaaatcgccaacggctcggatgtcgttgtttacatcgccgagaacttcaggcacgttcccgctttctggaaggcaaaggagctgattgatgcggggaaaataggggagcccgtcttcacgagctggcacgtgtgggtcggcatggacgagggcaacccctacgtgcacaccgggtggaggaagagtccgaagcatgttgggggctttctctcggacggaggggtgcaccatgtagccgctatgaggctcatcttcggtgatgtcgcatggatttccgctgccgtgcgcgacctctccccgctccttggggggctcgacttcatgtcgtctctcctcgagttcgagagcggagttgttggaacctacacagctgggtactcgattaaaggtaaggacaggttcgagatagtggggaccgatggaaggatgctcgtggagtgggacagaatactcctcaacggggaggaaattggcgtcaacccggagaacagctacaagcttgagtttgaagacttctacagggtggtgatgggagaaagggaaaacgtcctcggaagtccccttgaggctctgaaggatctcgccgtcatagaagcggccgtcaaatccaacgggcacaggatagaccttaaatccctgctggattggtctggatgagtagagggactttatatcccgctggaaagttaaaatataaatggctcaaggcccgacgtgcatcatctggccgtacatctcccagtcaaggaggagctcgtactcggccttcaggttgtagtagtggccccactccatatcgctgaggtagcgcatgagcctcttcttctcctcggtgtcaaccatctcctcaagcttcgcatagaactgcgccgctatctcctcggccttcatggcccagcggatgagatctatgatgtcctgcacgccgttaagcttcctcgcgacgggctggagctccggtcctatgtgctccttgggaaagacaacctccttcccagggaacatattggcgtagatctttctcaaaagctcctcgtgcttcttctcctctccggcgagccactctatcttttccttaagctcctggatgtcaatcctctcggcaaggctctcgtagaacttcctcgcgcctatttcggccttgatggccatcccaagaagctcctcaagggagaagtccttcatcttttcgaggggaagcccctcttccagctcaggcggaaccatatttatcaccccatccatcaacaagcagtagttcaatctcattatagacttcaaccctcttaaacccttcctttttgagtgatctgagaacaaccaaaactaaatctcctaataaaaagaaagaaaaggtttcaccccttcaaaaacgcctcgacgatgttcctcgtctcgttgagggcttcaagcgggattcccttcggaaggccgccgatttcaccattgacgtccttcaaaacgccctctcctgcaccgaggaacatgccctcgctcactattccgcggaagtttgctggcggtagcagcgcaacggcaacgcggttgccttccttaacggtgaggtcgtttgtaacgactgttatcgccctgtcgccgatgttgacgttcgtaaccagcaagcggtcagcgttcgggtgctttgcgacgctcatgacttctccgaccttgatgtccaccgctatgacggggtcgtttatcttccctaaggccagtctcctgtcaaggccaaggatcgtattcaggaagaagcgaactttcgcaacggcttcctctaccttctcgcgctcgctcttgtccgctaagctgagaaacttgtggtgccagtcctccccgccaagagcttcgattatcccgagggccttttccttcagggccttcatctgaggtgtatcgactagctcttttggatcaatgtagctgtagcgcatggcctgtatctcaggaatcatctccttcgccagctggattgtcctcttcttgtcccacttccccttgaacttcgctccctctatcgtcttcaggaacagctccacgctcttctccgcgaccagtaagcggtaatccttgctcgtgtcccacatcttcaccaccttccagtgcctttaaaacgcggttcttaacactttcgtcgggaattccctccgctatcgagcgggcctttgagagctctcccatccgcctgtaggcgatggccacttctcctaaaagctcagaggctaggtgggagtcatcaatgatgcccgcgaggacaagcggctcttcgacgaggccgatgcggagcattctctttgctattttgaaaagctcctcgtcggagggtctgaactttccaacgagtatgaggttcatggcgtcttcaaagactctccttccgaggtccggcctctcgtggaggaagagccagtagctgagcttcagcatttccgaggccctctccctgaggtctaagaatcggattaagtctactgccttttcaacgtctcccttctccacgagggaatcaacaacggtttttcccctgcggagaacctcttctataagctctattttctcggaaagctcttttgcctggaggttgaagaatagggactcatatacttcctttgccaggcgatagtagtcgagggcgatgggggcgtttatctcatcggcggttttttcaatcagcctggcgacgctgagaagggatgacaggactgctgaagacaggcccctcgcagactggagggtctcaacggcctcccagaagagcagataagcgtctctatacctgtctgagatggcaaggtttctggcaatgcccgccagaagctctcctctaatcctgggggaggagaactccctggcgagggaaaccgccagtatcatgtacctctcccctgcgctctcgcgtccgagctgatagaaggctctccccactatggaataggcgagcgctttttccctcttgtcctcgatgccctcaagggcttggagcatctcggagagaacctcctctctcgggaactcatcaaagattctcaggagtgcaagaagacgctcaaagctatcctcaattttaagtgcagaattaaaggcgcttttgaaatcttttcgtgagaggtacctctttaccgcttccacagaaaccaccaagaagaaaatatgcatagagcctaaaagcctaacccttcggctatgggttggactcctggctcaatcgtgtactgccttctccaacatgaaaacgaaaaatttgaaaggagatattaatcaactttgaaacacagaacaggaaccgtggatatgtccgtgctctctcccctccagacgtggtgccttgtttgcacatccgagtctaaagaaaggtcaaagtcgaacgctttcatgttgtcgtattcaaaacccacgtcgataaagagcccgacgagactggccttctcggcggcggtttcgcttatcttccccacggcctcgagaatatcgatgaactttagaacatccactgcaaaatcgctcgtgttgaggtcccatatatggaacgcatagtaccctatatcccctgtggactcatgaactccttcatctatccacctatcaattggcggaacttgggcatccgatggttttgacgtcccccctgttattgtgctggggtaaaagtccttaacgtagacgtactcttcgtaccacacccagcctgcactgtaaaccctccatctctcgtaacggtatttgacgttcatccagatgtagtagggactaccctggggaaaattggcgtaatgagaaccagtttcgtctttttgaacgatgttgtacgaagccagccgggtccagtctttgtccacaaacgcgttgatgctgaacccaactttcttgttgatggagtaggtgtacgagatgtaccccttagttgaactgtccgggattacctgggccactacggttggtgctgtccactcgtaggagtccaccagcgtgcggctgtaatagtagaggggctgcacgtcgtttgtctgctcggaggacgtcttcacggcgttctttaatggcctaaacttgggaactacacctcttgattggggcagttccttccaatcgaagctgacgctttcgatggagacgttgccgtcttttgtgactatcgtgagaagaatcagcggctgtgacagccttttgtttttcctgtactcgtcttcccaggcctttctgaggtcgccgaggttcaggataatctgtctattgttcttgatgtcgtattcggcaatctgtctgaacccttcgggataaagggctgaaacgaagacgcgcgcttctccagcattctggatgttcacacttgccaggttcctgaaatacggcagctgtatatcactcgccgttacgaaaaatccagaaaaaaatcaaacccaccagaagcattgcagggattactcttttcatggtaccaccgaccaaaatattcatggaattctatattaagttttcggtgtgtcacagcgtctagtggtaatcatcctctcgaaatgtgcgtgtagttccaaagatttagaactcagaggtcggctaagacctcttctgcgacatcttcctgtcccagttctcgagcattgaatcgagcgccagaaggctgttgagcctgaggcgtacccttttgttgtcccaatctattgagcctttgaagtcgttcaacagctcgaacaccttttcggtttccgaagctggaaggtttcttccgtagaactcctcaccgcagtgagggcatttgaaaacgaagtcgttgaaggtctccatgaacttatccctgtctttgaaaacgtcctcaccaacacccttttcgagcatctggtttatcagctcggcccagtcgagggcctttccacagagaggacacctggccactcaacccacctccctcaaaaacttctcaatctccttaagtatcagcttgattgcatcatcaaggttcttcttgccatttgccccagcggctcctgcgtgccccccacccgagccgtcaatgattggccctactttttccattatcttcccgaggtggagacccttcctgacgaggctttccctggcccttgcggaaatcctgacgccgttcttctcgctcccaacgatggctatatccgccccaagctggaggaagaccttgcaggcaagggattcgtaggccgagacctttgagacggctattatgtacttcctgaacttccttatctccatcctctggcaggccttcagcacggccatcctcttcgcctggtcaatgttctcgtcgttcaccggggcaaccagctggaaaatctctcccatctgaaccggaaaagcctcaagcatctcggatacggacttgaacgttttcgagttcgcgaacctgaagttggcagtatcggtcactatcccggcaaggagggctttaacggagggaccatcggcaaacccaaggtacttaaagagctcccacacgatctcagccgtggatgttcgcgttgaatcaacgacagaaatatctgctgttatcgggttcttcttctcgacgtggtggtctattaggattgtaaacttatcctttggaatatcaatcggctcaagctgttcgagggaagatgtgtcgaatatcacaacgacgtcttcatcaacggaagggtttttctcaaccgggacgggagaaagcgtgagaagcctcttcgcgtaggaggaaacgctctgggcaacgccaattctaaccctttcaactcccctcgcctttagaaaacgggcaaacgctattgcagagccgagggaatcgggatcggcgttatggtggcagagaaggagaaatgacttgtccccagctgtctcaaggaagcgtctaagctttatcttgcccttcatttgcgatctccctcagctttttctcaacggccgcgtaggccttctcaaccgcctcgtcaatcagcctctccacgtcaactttcacgaaaaccggaacctcaaggtacacctcaagctcaaggtcgagggtttcgcccctgtttattctcgtcgttacctctatgtccttcacgtcgctcctgttgagggcatcaaagacgtgctttatcacgactctctgtgcgagctcacctacctcgattatctgctcctcggtaagctccggcaggcctatgtggactactctccttccctcgctttccatggtcatcaccgctgacggaaataatctgtaagaaagaagaggatcagccggcagtcggcggcctcagggccgactgtatctgagcggtaagctccttgagcttctcgttgagcttcttctcctgcctctcaagggcgttcaggcgaacctcaagggtctctatcttctccttcagctccgcaacggccttatccttggtggtcttgacgatgagtgtgccgacggtcttgtaaacgacggcatcatcgggaaggctctctatctcatcgagggccttcttggcctcggtgagctcaagctgtaccttctgcttctgctgaacgacgagctggagctgctgctggtagctctcaagctggcccaacatcgcctgaacctgcggcggaatgttctgcataccaacacctccgtaatcgtaatccctatgagaataagggaggggctttaaatagtttcggtggggaaactcagacttcaatggagtccatagcgacctttatccaccgcaggtaggagttgagagtcccccgcagggcggagttgtcttccgcgatgaacttgagccttatcttccttccgtcgagaacgaactcacctttcgtcctcctgtatggaacggtatcgtgctctatcctgacgctctcgtaaaccaccctggcaacttcctcattggggaactccagttcaattacagcctctattgggctcttcatcatgactcccctcacatgacacccatgttgtacttcataagcttgttgacgagctttcttccgtctctggtcaggtcaactaccttccttatcatgaccagcttgaggagccccttgtctattagacggtcatagatgtcctctatctctttctcacttattccaaacatctcgtggagggtgaggggatccattccagagtagagggccatgaggacctgctgctccatttcatcgagtccaccgagttccttgagctccctctcaagctcctcttggaactctgccttgatcgttgggaactcttcagaggcctttattaaaagctcaacgtaatccttcctgtatgtgagaaggtacctcagaatgtaaaggcggaccttcttgtcctcaacaaagaggtatgaaacgacgctctctttctcatagaagtgctttattttccaggcctcgacctttttgttgtccatctctatctcttctatgtctaggtcttccatatcggaaaagaggggcacgggcttcccttcggaagtcaggactatgatgttcctctcgcgcctgttcttcctaactgatctcacggttacaatacggagtgtaccatcctcccacttggcgtccatgttgagcgcaccgccgcgcatcctcgcgagaaggagcttaactttaaccccgttgatcagaacctcaaacactctgtgaatgaaagtcttaaaggccttctcatcataaatcagaaggttactcccgatggtcagaacgagggtcttctccccggagccaggaacgtagaacttcatcccaaaatgcgggagctggggatcgagcttaagctcatccggtattttaataccgatgtctattaatgaagaaaatggaaacacgtcctcaccaactacctggcccattctaaggtacctcagagtaatcctgtcgttttccaagtaggccatcgcgtccctccactttattgaggtcgatcccttccaagttgactgtatggtagccttgaccctaacctgggcgattgtcatagctctcatcctctttcagtttcatatagcactcaactcctcaagacgggcctcaagttttttaactttctcctgaagtttccgtacctcgttgctcagtcttatctccagtggagtaaccgccgggtctccgccgcgcttttcgatcaggtcgtcgaggatgctgacggcgctgtttatgtactcagtcatctttatcaacgcttcttcgtgcttcaggacaatagtacccttgtccttggtctttatagccagcggaagctttgtctttgagacgtatgtgatcataagctcaagctgttctttgtccttcttggccggaaacttcatgagccagagcctcttgaactcctcaagctcgttgagcactttgacgagaaaagcgttgtagtcgtcctccgtgacgtatccgagggcataacccctcgcaaagtccagcagagtgagtatgcgcttcttcttttccttcgcctcgtcgagtatcttccccatcctctcgtttatgatgctcctaagctgttcaagtagttcttcctcatttttggtgaccttggtcttctgtggggttttgagtttaagttcgctctcgtttgccccctccgtcacctcgggagccgtttgaactggtgccacacttctggactccgcaatggtgctctcaagaacctggtagatttccctggtgtaagactgcatcatccggcttaccaggaacgccgagataccaactgcaacgacgatgcctattaggagcaccaccagtgttatcacgtccaagataccaccccctaaaacacggcctcgataaccttaccgtttgagactttcctcatcctaaccttcccagtgctgacgtccaggtatatggttcttccaccctttccaccagtgtcttcagcgaccagccttataccgcgttttttgagctccctctttgcaacttcaacgttcttcttccctaccattaggttctcgttgctgacgttggtgaacatgtgcgcccccccgaagagctttgcctcaagccttctcggcgatgcacccagcttcatcatatcctttatcaggagctccagcccggtgtccacgtactttgctgggtttcctctgccaccgtagcgggcgctctcagggaggagcgcgtgaagcaggccgcctaccctgttcagacggtcgtatagggtgatgcccacgcaggaacctagcccgtacgtgcttattatcccggtcttcttagccactgcgtagtccccgatgccgaccttgacctccactcttgtcaccaccgttcaaacaataaaaggatgaagggagatctcagagcctaaagttgctcgtctgcctacggagctcgtcaacgatcttcttgagttcgtcggctgccctcttaagctcctcaatggctgccgtctgttcttcgacggcggagctgacttcttctgccgaagcagttgtctcctcagccgaagcagccaaattctccaaggctttcagagccttatcaacctcttcctgcgtcctaagaatctgctccttcacgtgacccaacctagcaccagtatcactaatcaactcggcaatgttcgtcaagtactccgtggtttctctaagagtctccgacgactcactaacaacactcacacccctctgcgtggcgttaacagcatctttgatctcatcagtcatcctgccaataatctccttaatattatccgcagccttcttgctctcctcggccaaattcctgatctcttgcgcgacaactgcaaagcccctaccagcctctcccgctcttgctgcttcaatagccgcgttcaaggctaagagattagtctgctcggcgataccagtaataacattcgtaatctcctcaatactcctgctcatctcattaaccctgttgactgcggcctctatgttacccatcatctcctgaatgctctgaatctgctgtgccgaaacctcacccttctgcctgccttcgtcagcaatgtgaacaacctcgttgacagcaccctcgaactcctccatggccctaacgctctcctcactcatatcagcaacaagccgcatgccctcagtaatctcgttaatgttctcctgctgcctctgcgcctcaatactaacctgctgtaccgcctcattcacctgattaatcgcctcagtaacatcattcgcaacctgggcaagcatgtttgcgtgcttctcaagcttctcggtgaggccgacgatgttgccgagaagctccctcatcttggtgctcatgtcctttacgtcctctatgatctccctcagctcaccttttgcctcgacgctgaggccgttgctcagatcaccttcggcaagacgctcaagcttctccgctattccctgcagtgttccaaccatgtccttggatacggactcgaacgctttgatgagcattccaatctcatcttcctcaagatactgtattcccctgagcttctccttgacctcgctgagcttaccttcagcgagagcctgggccgcggcaccgagcgcgacgagcggcatgagagaggtgctgataagtctgtaggcagccagaactatcaccgttgatatcgcgaggagaaggactatcatcatgtacgttgttttctgagtattgtcctgcacagttctgatgacggccatgacaccctcagtaacttctgcggttgggaccttagtgaagacgtaccagcccgtactgggtatcttgtaaccggcagcggtggccttaaccccctgccactcgtacgtcacaaccccactgtcctttccgctcctgactatgtctgctattggcttgagactctcctgctcaaagacgttgagcttcatgacgtactgctcgtttgggtgagctattatgaggccatcctcgttgacgacgtaggcgtagccggtttctcccaccttaacgctctttatctcgttaacgagagtgtctatgaacacgtcgaggcctatgacgcctatcagctcgccgttgcggtagatgggcactgcgtaggttaccacccatttaccacttgaagcgtcctggtaggggtcgctccacactcctttgcctgctttaactgcctcctggtaccagggcctcacacgcgggtcgtatccttcgggaagctcctgctctgggtagatgaacatgttgccgtatttgtcaccgaagtacacggagcttatcctgctgtcggcggccgccaccgtctcgaagtgctccatgagaatctcgttgaggggctctacatagtccccttcgccaaacttgtagccctcactctcaagttcctggattccgattaccgctaacttttcggtagtggttccgagggcctcaacctcatcaaagaaggcctggaactcctttgctaaggcctccgacttggcgcttacggtctgttctgcccactgctgcatcaggggcgttagctgggtctcgatctcgtttgccatgttattttcgctatagagcaacatcccgctcgtcagcactgccacgataacaaaacccaaaacaacgatggatatgatcttcttcttgaactccatatcactcaccaccttcctccttcacctgggcctccaacctcttcacgagcttttcaaaggactcctcgtcaggcaccaaatagaaaaagctctcaaatccgatgttctcctcgtaaaagcgcgttttgaagagcatgatcttgtcgacgttccttaaatccggtctgttaagttctttctcgatgtcgtagagggaatttattggctttggtggactcagcgatactggttccccaaccagcttagcgagaatatcggtgtagactgatatcagaatgttgcccacctcggttatggctgacttgcccatctcgtccagttctttcattccggacggatccattcccatcagggccgcggaaaggtttattgcactcttcgtcgggaactggagaaccgttagaccgccaagtccctcggttatatcaaacgccaccacgaagctgtttgagatgccgttctgggtgagtctcttcaggaactccaccctggagagcacctcaacctcaggaggctccatctctattggtccgccaaccatctcggagagcgatgttagggcgtgggacatcgcgatgttagaggcctctcggaatatgtccttgtaccactcgctaatcttcataacattccccccgtgagcttttcaaggaccttaaccatgtcttcgggcttcggaagaatgaagaagtgctcgttaaactcaataccttcaacctttatcaccgttccaaggagcatcgtgtagtcgcagtactgtcctatgtcggccagggcgaagtcgagtatcgcggggaggaagtcaatggcgatctctgggggagtctgttctatcgtgaggccaaggaactcgctgagggcatttgcataggccgagatcaggatgttgcccatctccattatcgcggactggaccatctcgtctatctcggtagtagttccgggctcctgcatcatcatgaggtcgaagagcctagtcgcgtcgtcgaagtccattatgaagaacgcgtgcccgctgaactcgtttccgagtccgacgtaaacagcgaccttaacgtcttctccaaccttctctggaaggttcttcagcgacgttatctcaagctggggcacttcgatcgtgactggatgccccagcatctcgctcaaagcgtccgctgccctggatgctcctatgttgaacgtctcaaggagagcgctcttggtgaattcgtccatattctttatgtactcctcatagtccaccgccgatacctcccagcaggctgtttatgtcaataatcagaatcacgctaccatcaccaagtatggtagctccagcaaatcccttaacactagataatgccttcccgagggacttgatgactatgtccttcttgtggaggagctcgtccacctttatggcaagcttctgggcgccgaggtcaactataatggccgggaactcctcggactccgaatcgggaagaccgaagagctcgtggagcgagactattgggattatctcccccctcaggactatgacctccctgccacctatggacttcaggtcactcctcttgacctctatagtctcgaggatgttgtttatcggcacggcatagatttcgtccatgaccttgatgaggagggcctgtatgatggccatgcttatcgggagcttgagtatgaaggtcgttcccttgccgacttcggtcttgacgcttatactgccgttaagggcctttatgacatcctgaacgacgtccataccaacgccccttccagaaacgtccgtaactttctcagccgtgctgaaccctggtaggaagatcaggtttattgcctcctcgtcgctgagctccgctgcctgctcaggtgagattaaccccttctcaatggcctttctctttaccttctctgggtcaatgcccctgccgtcgtccctcactatgattacaacatggctcctctcacgccttgctatcagctcaagtctgcccttgcgcggttttccaagcttctctctctctcctctggcggctctatcccgtggtctatggcgtttcttaagaggtgcacaagaacgtcgccgagcttgtccaggatagtcctgtcaacctctatctcggtaccctccatgatgaactcgacttccttgccctcctttctggccaaactcctgaccatgcgcgggaacttgttgaagacctcagcaactggagtgaggcgcatctgcattatctcgtcctggagctccgccatcagtcttgaagtcgttgagagggtctcgatgagctccctgtcgcccaggcgctcggctatctgctcaagtcttcccttgttgatgaccagctcaccgacgaggttcatcagcttgtctaggtgagaaacgtctactttgatcagcttcgacatcttgatcttttccctgggggcgggaggctgctttttaacttctggttttggctgcacctcgggttttttggcttctgcctgtgttccctgagcctcagagggtttctccggtggtttcgagccgggttcaacgacttcaacacccgccacatctggatgctttagaacggcttcctttatctcgtccaagttagcatcgggagcgagcgttacctcaaagtagtggccgtctataaggtccccgttctgtatgtcaagcctagatggattggttgagaggactttggccctcttctctatctcctggagaactaaaaagctcctaattcctttcagaggagcgtccttctctaggagtatcctcaaagttatgcctccaccctcggaaggctgctcctcggctgtcttagtcccctcttcggtcttgacgggctttggtgttccctcctctaggagcgtcactataacgtcctttatctcgggatgtctgccaacgagcttctttatctcctcaggagaagcctttgtggctaccttaaactccagttcatcaacgtcggcggagccgtcctctatgatcgatctctctggctttgtctcgagaacttcacctatctcctccagatcgcggaggatcagaaaagccctgacacctctcagctgtgcatctggatagaagatagcttttacgtggtaaacgtttccagaaacttccgttggagtcgcttcctggctctgagggggaccctcttcagtagaaggtacctttggtttttcttcctcggccttctttgcccctttctccctggtgtaccccttcagcagggcgttggccttttcaaagagctcatcaacatcaacgtctccctcttttcccgtctcttcaatgttgtttatcatttcttcgattgcctcgatgaactcaaggacgaggtcaacgacatccggcgtcgcctcaacaaggccgttccttatggcgtcgaagaggttctccattttgtgggcggcctcgctgagcttcatgaaccccattgtggcggccgttcccttgagggtgtgggcgtctctgaatatctggtctatgctagctcgttttgcctcctcgtctccgttttttacagcctcttcaagccggaggactgcgttgctgatgctgtcgatcctatcccgggcatctgaaaggaattcctcaaggtattgggacatgtcttccataaatcctcacctcggtatcttcctgagggccatcactatggtgtcggcgattttatcaagcggcacaatgtagtccaccatgccggtctcagccgcggccttgggcattccgtagattatcgacgtctccttgtcctgggctatcgtgatgccgcctttcctcttgattgcaactattccctccgcaccgtcccttcccattccagtcataacgacgccgactgttcttcgcccaaagacctccgcaacgctcttcatcatcggatcggctgctggtcttacgccgtgaatttttgggcccttgtagagctttatcgtgggctttccgttcctcagggttacctccatgtgataatcaccaggagcaacgtaggcccagtccttgttcaccacctcaccatcttcggcctctttgacgttcagttttgaaattctgtcgagcctagcagcgaaggatctggtaaaacctgggggcatgtgctgaacgagaagtatcgcggcgtcgagctcgccgggaagcttttcaaacaccttaagaagggactgggggccacctgtggaagccgctatcgcaaccgcccttctggcgggttctccaaccttctttgcctttttcagctgctccgacaatactctcctgcgccggagctggagaaaccttctgggcacttttgccgcttctttcactttggcgataatctcgtccctaagttcacgcatgtttatcgagatcgatgatgacggcttgggaatgaagtctatggcaccatattcgagcgcctttatcgttgcctcggcaccctcctgcgtgagggcgctcaccatgattaccggtgtgggatacttgctcattatgaacttgagagcatcgagaccgttcatcctaggcatttcgatatcgagggttatcacatccggtttctcggttttgaccttctcaatggcctcgattccatcacgagcctcacagcagacctcgatgtcgggatcagattccaagatatccctaagtatccgcctcataaacgccgaatcatctaccaccatcacccgtatctttttgctgagcggcatagtaccaccctaaatgaaagttaagaggagagaaccctgttcacttcctctatcaccttcggagcctggaacggtttaacgatgtagcccttggctccactcttgagggcttccatgacctttgcctcctgaccgacggcggtgatcatgatgatcttggcgttcggatctatcttcatgatctctttgaccgcggtaattccgtccatttcgggcatgactatgtccatagtcaccagatcaggcttcagctgtttgtatttctcaaccgcctcctttccgttgcttgcctccccaaccacctggtggccggcctgagtcagtatcttcttaaccagcatccgcataaacgcggcatcgtcaacaacaagcacgcgtgccattcacttcacctccacgtttttccttttcacatagatacgagcgaccaggtcatagagtttaaacagccgggcggcactgcccagaatcgtttcggttttaccgagtacgagataaccgtgatcctcaagcgaattgtacagctttttgaagacttcctcttgggcctccttggtcatgtatatgagaacgtttctaatgaatatcatgtcaaagcccgtagggtatctgtctgagaggaggttgaaatgtctgaactcaacgtatctccgtatctgaggagaaatgcggtagtgatctcccatagggaggaagtatttctttatcagcggctttggaacgcttttctcgacgatctctttgggataagcacccctgatggcagtgtttaatgcttccctgtcaatgtcggtggcaagtattttgagcctgtatcttttgagatcatcccccaggaattcgctgaagagcatggctattgagtatggctcctggccggttgagcatgccgcactccatattcttatcgtggtatcgtagtgcttgcgcttgtattcaattaattctgggagaaccttcctttcaagggtcttccagactactggatctctgaagaactcggtaacgtttattgcaacggttagaaggaggtcgtcaagctcctgcttgtttttctttattatcctgtagtactccatgaagtccgttatgccgagcttcctcattctggcgcgtattctccgaagtaggtatgagtccttgtaggcgttactgtcggcattcagataccgaaacagttcctgctttattagctgatatccccgatctttaatttcgttcacgcaaaccaccgcttttgcagttctgattttgctctaggtgggccccaatttaaaacaaatgtatttcgcgttgaatcctattcatagtttatggcacttccattaaaaaattattatgtgtatgtgtttatgtaggtgcatatgcatgctcttaccaagaggatactgggaaaaatttcaaacaattagtacgaaataaaggtcgaaaaccttttatatcgtaaagttgaataagttagtagcacttcgggctgatcagtgctgttagttgggcatgtacgggaaagaacactgattggataacatccaaaaatggtggtggggatgaaagccacaacgttgggtctcatcactattccgccaatacttacgggggcgctcgcatactcaggccaaacggcactgggtctcattgggggaatcggggcaggagcattggtagcatggtacgttgattcaagagccagcgcttctggcaagtatatgcggctgaaagagattctcaggagaatgagcaggggagaagacgtccgcatacctccagaactggccgacgttagggattatctcctcaagcttaagccccgggctggggaagacacgacgattctaatacaggatctaaacagagtccttcagggcgatctaagtgctccagttccatcgacttccggcctcctaaaggtgtactcggacgttaagacgaaatggaaggaacttatgagcgaaatacagaaaacccttcatgagctccaagacgcaatgaaagagatacaggatggcacatattcactagaggaactagagaacatatacgaaacgctaacggaccttataaaccgcctcgaagatcagagtgtcaaaatggccgaactcaacgaccacatacaggctctctccgcggcaatagaagagataagcacgcagagtcagcaggttgccgagttcaccgttgagtctgctaacgcggctgagaaaggcaaggagatatcagacgaggcagccctcaaagttgagaagataaacaacgtcagtaaggaaatggagaaggccgttgccatactgtctgactactcggagaagataggccagatagtcgacgtcataacggacatagcagagcagacaaatctgctggcccttaacgctgcgattgaagctgccagagcaggggagcagggaaggggattcgcggtcgttgcagacagcgtccgtgagctggccgagcagtcaaggaactcggccaaacagataggagacctgatcaaggagatgcaggaaagcgttggcaaggtcgtgaactcgatacacgagaataccgaagcaacccaggaagttgccgaatcgatacaggagttaatcgctgccttcgacgacatagcgaggagggctaacgagatagcatcgatgatgaacgagatatccaacggaatcgatcagcaggccagctcagtacagggcctcgtcagcacagtcgattatatatccgcccagaactctgaggttgttgagcagtcccagagagtcgtggaggaattaagtacagtgatggacaatgtcagatccctaaagagcggtctcggaagcctcatctcaaaaataggtaaccttataggcacgctgtccaatattaaggtgtaaaggtgattgaaatgtccgagatccaggtcgttgccttcagggtcgggaacgaggaattctgcctcgagatatccaaggttcgggaaataaaggaaatgatgcccataacaagagtccccaacgctcccgactacgtcgagggcgttatcaacctccgcggccagataaccacggtcgtgaacctcaagaagaaactaggctactacgacgatgaagatctaagcaacaagaagatcatcatagcagaggtcaagggagaaatagtaggcataatcgtggatgcagtttcggacgttgtcacgctcacggaggatcagatcgagccgacgccaaagactctcgcatcgagaatggacacccggttcataaagggcatagcgaagataaacaacggcgaaagattgctgataatggttgacctggacaagctcctcggggaggaatggtgatcacacacccaagtctctcaggagatcctctatttcccttctctcgtctttttctgctgatgcctctggaagtttttcccccagtcttgccatgagcatttcgacctgcttttcgagctttctcaactcttcgaactgatagcggagcttctcatagaattccttctcaactggagttactgggacgggctcgtttatcatgctggctatctcgtctattccgcccgctagcgcataaacaagcttgtggatctctatgaagctcctctcgggattcagctctttaccacttttctcatccttcatgggaaggtctaggcgctttacttcaattatgatgtccctgaacttggagtaaatgttctcatcagggaccgaaactataaccagcttgcgcaggtttttgaggaggccaagcaggttctccttgagggccagaaactcgtctctgccctttccggtcagaacgtagaccttggctatgtctcgcagtgagagaagcgccctctttgcctcaaggaggcccgcgcttatcttctcggggttcatcgtgactgctgttttcagcatgtccaggaactcctcaacttcctcctcctttctccgttctatcagctcttcaagccgctcgatctcctcctcaacctcggctaaaagctccctcttgagctcctccttaatctcctcccttgaactcaggaaagattctgaaacttcactaacttccctctcaacttcatccagtcgcttcttgagagaacccaactcgtattcaagctggacgttggtcttttccagacttttgagcttctccttaaagagggactccagctttgatacacgctccgagaggcgggatatcctatcgtaatcaacttcagaaggggcctgcggggtcgttgattttctctcaagttcgtttattttctcaagtaactgtttcttaagggactcaaaattctcgccgagagagtctgcttcctttttaagttcgaagagcctgttcttgaccttttcacttgtatcgtgggaatagtaaactgcaaaggccgatgcaccaattgcgattccagcggctatgatgctagtgtagtccattttagcgcgcccccggcgaaataagtacactcacaaactatttaagtgttgctcgaatctccgcctacccactcgaagagagcttggaaagtatgaggccgatgctcgcggacacgaatatgcccaaaacgctggcgagcgaggccagagcatacatgtgctcactaagcacgccgtaggaatagccaacctcaccaacgagcaggccgaggacgccgaagctagaaatgcccgcagccctcgtcagggaaacctttaagtccttctcccagaccaagacggttgtgaggagtatcctcacgaggtagatcactaggaagaagtacacaacctcaagcgaaaactcggtctcgaagtttattcccctccatgcgaagaatatgggggcaaagatgccgtaggtcacgcccgatattattgtgtgcactctctcatactgcttggtgccaagaaggtcgctgtggagcatgagtccaaccagaaaggctcctatgctgaagtgtagcccgagctcctcgctgatcagggccagggaagttgccaaaatcatcaccatgccaaaaacggcctcgtcgctctggagcctccggagggcccggattattctgagcctctgttttatcccgatcacgtagttcaggccgagaacaatcgtcaggaagaccgcatccttaagcagttcaaggaagagctcaaagtagctgaggtggtggagctcgaagtttatgaggatgtagaggattacaagggtacccacctcgcttataactgcgtaggagagggctatgtggaggaactcctggccgaagaacctagtaaggcgtatgactattggcgccgaagcgacggctagaatagacgctacgataaagttgtccgttcctatcctgtaacccgtgaatggtagggtgagaaagaacatgacgacgagcgtgatcacatagatggggaggcttttcttcccgccgatgcggacttcttcaggagtcagctccagcccagcgtacatcatgagaaagaacacgccgaactcggccattagggtgaggtcttctctgggaagatcatggaggaagacaccgagcatcaaacccgccgtaatctcgccgagaaagccgggatagcctattctctcaaagacctcggcgaaaatccttgcaactgcgattattatgaagacgtagcctatgacgtcgaatgccacgacgcatccccaaaagctttagcttcctccctttaaatattttgagatgccaaacttttttaggagacaaagtgagggacaaatatgaggcactacgagcttgtaaaagtcaaggaagatggaaaaattgagattccccttgagcttgcctatgaactcggactcgttaggggagcatacttccttgttgagattgacactgaccttaaggaggcccatcttgagaggatagcccttccgggaaagaagctcgttgaggtcgagcttgtagtggaggacaggcccggagttctggccaagatcagcgggctctttggaaagcacgggataaacatcctcttcaacgagagcgaggagctgtccgagctgggcctcgcggcgatagtcgcgatagtggacgtcagcgggagcaggatttcacttgaggagcttaaaagggccctcatgggtctgaaggaagtcaaggagctaaccctgagagaggtggagtaacaggagaaggaagatggcgaaaatgacggcgccaacgtttatctctttcggcgttatctccgtccttgggagctttactccaagcaggccgctctttttgagcaacatgaagagcgccacccctcccaggagcagataggcatccattgcctttggggagcctccgagtgaaatacctgcgaagaatgcggtgagcgccatcataaacgacggaagcactgtaaagccgtgctgtcctcccttccccttcatcaggtagtaattgagctttgtgaacgatgttagagttcccagaccagctgcgtaaaacagttccctgccatagggtagtcccttaagaagggcagccttcgccggagagccgacaaagggccatattccgcctatcgcaaggctgagcataaggactgaggtcatcaggagggggtcgcccctgtaggaaagcttatcaagctccctcgttccggctttgtccaccatggccccggcggagaggaagaggccacccttgaagagcatgtgggcgaaggcgtaatagacagcgcctaatgggttaagcgtggctatcccgaggaggacgtagcccatctggctgacggtatggtaagcgaggagcctcttgatgtccttttgcatgagggctaaggccactccaaagagcatggaggcgaaggccgtgccgagtagaaccgtcctgagaaccccgctaaacggaaagtgaagcgagaggagcaccatgccgtaagcaggggccttgacaactgccccagagaggagcgccgaaactggagagggagcgttggcatgggcatcggggagccagaggtggagcgggaagattccggccttgaggaggagcgaagtgaacgcaactgcgacggcagcctccacttcgggggagagaggagacttggaaatcagttcaagattcaggtagcccgttttgaggtagataatccctatggagaacacgaagaagtatgaggcaaggagcgagagcatgaggtacttgtaagccgccttgagtgcgtcttttcttccagagaagcccactagggcaaaagccgagaccgatgctatttccatgaaaatgtagaagttgaagagatccctgcttatgaaagctccgaggaggccggcgtgaactaggaggagcagtacaaggggctttacgtcttttttgaagtagtcaatggagtacaaggcaacggcggagaagaggattaactcacccagtactaacagggagttgtaggtatcgagcgcgacctctattccacccatcctcggccagccacccacaacctcgcttctttcccctacgagaaggtagaccaaccatggaaacagcgcacctgccaggaaaaagtacctcgcgtacttctccgttcttaagggtattgtgagcgcagtgaggaacgcgaagagaagcggaagggctaccagaaccgctatcaagtccactccctccctatgcgcagtatcatcgccagggccagcgcggttatggcaacgtcaactacgagcgtcgttagcatcagcgtggcaggaagcggatcgaccgagttagacggcattatcggaaagtccccaccctcaacgtagccagcgcctatgaagaaaagtaccaggccaagggagatcacgttgattgagagcacctgctttatcgggttatcctttgatatcaggccgtagaggccgatgagcatcacgattattccagctgtctcggtgttaatcacggtcaacccacctcgacaggatgtagaatacgaggacgaaggaagtccccaccttgagggccacgcctatgttgaaggtcattacggtgcctccggggatgtagggccggaggaagttaaagaagaaggctccaaaggcaaggccggctattgctgtccccactataaagagggccgctgaagactccacaagctggacagtcctgagggggaagtgctttctcgtcctcctgtagccgtaggcggtcatgagcaggataacgctcacggcaaatataacccccgcctggaagcctcctccgggactctcgtagccgtagatggtgaggtaggccccataggtaaccaggaacggggcaacgagctttgtagtcgtcctcacaacgaggctcatcttcacttccgcttccccccaaggagcaggtagaagccggtggttgccgcaaacaggagcgtcgcctcacccaggctgtcatagcccctccagtcagcgaggatagccgtcacgaggtttggtattcccacctcgcgccagttagctaagtagtaagcgtagctcccccaggggactttggtatagtcaagcctgaggagctccagcaggagggctgaaccgaggagggctccgacgaggcgcttcactcccccacctcctttatcgtgtagaggaagagccccgtgactatcgccccaaccacgacggcagagagggcaacatcgggggccttgagctggattaaaactattacaaaggccaggctgaggaggccgtagcgtagcaccgcggctgaaagtttctcggcttcgaccaccgagacagagaggagtattatcgccgcaaggagaacttcatggattgtcccaagcatacatgtccaccaccgctttcggctttattccgctcttgtaagcggccctcgctatcgcgtggctgaccatcgggtttatcatggctatcgtgaacgctatcaccagaaacttcagctttcccgtgaggggaaagtccgatgcgagggccagggccagaagtatgtttatcgcccctcccgtatcgcacttcgcagtcgcgtgtagcctcgtgtaaacatcgggaaagcggagcaaaccgagggccccgaagaacattatgaacagtccgaagaggaggaataggagctctatcacgccctcacctccaggtacttcgctatgataagtcctcctacggcgttcaccatgaggagcactatgctcacgtcgagcaggtagggggcatcgtagaggatcgagagcatcgctattatcaccaccgcctttgtggtcgcagtgttcagggcaaccgccctatcagcgagcgtcgggccgaagataactctgtaactgaccaaggtagctgtaaacacgaggaaagccaccgcgtagggcagaactaccagaaaattttcttgagccattcctcaagctccccctttatcttcattccggccttctccccgtcgagcgtctcaacatcaatccagtggacgtagaggtaggcctcgccgagctttttggtgacgtcgagcgttagagtgccgggtgtgagcgttatggagttcgcaaggacggttaaaccagtgtccgagtgaagatcagccttcactttcactattccagggtttatatccatgaggatgacgttcttgacgaccctcaggttgctctcaagcagtcgaaaggccatgatgaagaggtactgcggaacgaggaataggaatatgtaggccgccttcgagaggaggtgtcccgtccgccttatatcgtcggtaagaaagtccctagttataatcgctatcagaagcgtcacgagtgccccggtaattacgtgcgatggcgagaacttcccgcttataatgatccagaatgcaaagagggccagccacgtgattccggcccgttcccacgccgggagcttctgggcctcatagctctcgtagagaaccctctttcggacttcttcaagacgctgtcggagatagaaatgcatgcggctcataggattgtttaggttctcaatgttaaaaacggtttcgggctactccttcggcttgatgccgagtgcttccttgtagtcccatctccggccgtcttccattatccatattttgacgaggatgagcggaccgaccgggcgctcccgggttatgtcaaagcgatagaagttcacagccattccgcgcgggtagttctctatgacgccgataacgtctgtgttgttcttgtccgctatcgtctggaggctcttgttgcccctcgggacgaactttccgccggttagttcggcgaagacctgggcgaaggccgtgtgatctatcccgaccctcttggccgtcgtcaccacaaagggcatctcctcccttatcgggggtatgttcctgaagccaatctcgcgctggagctttatcccgtgaaggtagaggtagccgatgtatccccagtcctctggatcaactttgatgaaggtcatcttgagcgggttgcccttccagacgttgattattaggagtctctcgtagcccctatcgtaggcctccatgagaagatcctggatggtcttcttacccctagtcaggtaaagtgagttcgggaagactttctcaagatcgtggccgaagctcctcgtcctcctggtcggccggtgggacgttgttatcagcatcattgcaatcacttgtttggaatgtttgataaaagcttttcgcagggaaaaatagttcagatggccttgaccctgcgggcaacacggggcctgggcttgtaaagtatcttgctgccgcagtacgggcagcggacttccctcgcggtcgcgaggtcaagctcgacttccttaccgcattttgcacagcgataaacggcggtcgccatagtatcacctcaagatgaaaaaaggatcaggccttggaggccgtaacgcgcttggcgaccttccccgccggggtggtcggcaggtaggcgccgccggcgaaggtggcaccgcacttctggcactgccagattccagtgcttatcctcctgactgccttccttccgcagaccgggcagacgtgcttctgcttcatcctggcctcaacggccgcaactcttctccttatcttgagaccgtacctggggccaaaccttccagcggatccgaccttagtagtccttcccatgagcatcacctcaggattatcgctattcgcggactggagtgttttcctggagacgttttataaatctttgcatggacataattgtggataaatccaggatattcgcaatattaacccaccagatgattactcgaaaagtttttgatgttggttcaagcttcaggttacagccgttgttgttacagagtacggaaaaatcgtgaaagttatacacggctgatttttgctctttttcttttgtgcagagaatattgtctcttcttagcatctcttaaagataaaagggcacagataaaagggcacacgacaaccgtaagtttaaacttgccagaaaaagcctattgaagaattctggtgccccggccgggatttgaacccggggcgcgggctcgaaaggcagaaggggacgtcctcgccagatataagcctaaacgaaaagtggtctcagctccaagatgcctatgcaaaatggctctccctcagagtctccaccgaggaaacgaaattccgctatatttcaacccttgagaagtttttcaatacatacgctatcaagacatatgaagacctccaggagatccttgccgagacaggctacaaaagacacataaccaaggccctgaggagctttgcgaagttcctgaggaatcgcggcataatcactcgcgaccagtaccttgatctgaaggagattatttgggtcaagccaacacacccgagaaaagtgaacgttccagacgcgcagattagggaggctctaaagtactacgaacaaaaagaccctattctggcgacgatctacaagaccctcgtcttctctggcctgagactaaaggcagtaattgagctcttcaatgagtttgatcctgagaaactgatcctcccaagagagtacccaaacattgccaagtatccaattcacaaacagaagggccagaaaaaagccttctacgcttacttaccgcgcgactttgccctcactgagcttgagcaacttccccttgactatgaacatgtaaagaacaggctacgcgtcaagctccgctcggttagaaacactgagaagagcgttcagttctccgcggccgcggtaagggagtggttcgcaacgttcctcgcgaggaaaggctgcccatttgaggtcattaacttcatccagggcagggccgagcgcggagttctggaaaaacactacctcaaccttgagatcctggccgatgagtggtattcctcggttgttgacgacctgaagctcgttttagaaggcggctggcgctcgaaacgcgccaaattgggcatctcgttgagaggtgaggagaaatgaccatcctctccgttatttggcttgctttcggcggagtcttcgcggtagtgctctccgcatttgcctacgaagcctttatggagtggcgggaggcccgcaaatgggccgagaaatatggcaaagtcatgaagaaatgaaaggaggatgaggtagtgattgacctcatgcctgccctcgacaaggccctctatcaagcaagttgctacacgatttgtctcacattgactttctttttcgtgctgacacttgttatggttgccctcgtgttcgtgctgatctatttgaaaaaatgtaggaggtgagcggaggaatggcccaatctaagtttgttcgtggaatatatattgattcggaggttgagaaaagggcaaaagcccttgccaaggccaagggaacgagcatcaaccaggtattcagagaggcggttctgaaactctatcggctggaactaggtaacacaaggccggaggaaattcttgagggctgacttcttttttacgcttaatttaagcttaaaatgttcttatttgcttttaaactcctcctgcgacttttctctggcgcctttgggccttcctccgcttaaatcagttctcgtcaaattggcaaagccctccggaggcggtagtatggacgacctagatgggatttctcgggagattgaaactctcgatcggtacgctgagcgtttgaggagacagattgaggcagcgcagagggagctcgcgcgagtcacgaggaagaagcaacagctcctcgcagaggtttctaagctcaaaaaggcgcgcaaggtgatggcagtatgaagacaaagagcctcatccagctaatcatcttctttgtgctcgcgggagcgtggtactacatcgcttggcccatgatgacaaaggaggctctagcggtcggagctgttggcggcgtgctcatgcattgggcgctcacgaacaagggaaacaaggctttagtaatcatcgagccctttacatcaagctggcgcgtgctcctctatgacatgatgctcttgagcttcctggcggcactctggcaggcgaacggtgcagctcttctcgacgcgctcaaggactctgttgagaacctcgcgcttctgctggccttgctcggcggcattggtgttgactacggagtggagggatgaagagatgaagaaactcggtgttttgctcgctctgttggtgctgttcggaacgctggcaacgggcacggttggggctgtttatattccgtctagtggagatttcggggtgtatatctttgggtcttcgtctaatgtaacaatatcggacggtcggttggtcttagatgctacggggtctgagtacgtcagggcttggcttaatgttactgagtttcaggctatcgagtttgattatcaggcgtacgcaaataacgttttatctggtgtgtcttttatgtcagggagttcaggggttggcttaactttcattgagtatgatacgggttcaatcgaggttaggaaaatctcaggggctaattatcctcagtatgatgggagtagcgacactataggtggttctattgatgcagggacgagctttaggaataagtacgtacattttagaattgagtttcagcagaggggcacggagtgggatttactggtatataaggacggtttcttattgtataatctgacgaatgttcagcagcatattgacccgttgtcaatcgagaaggtagtttttggtgttccggctgtaggcattggtaataacttgggctggcaggggaaggtcgagtttaataatatacagatttatgaggttgagtatcatattcagctctcgctcaaggatgctctgagtaatcaacccctcacgggcgttacggtgaaggagaacggtaacgttatcggcacgctggacgatggtggaagtttagatttaactaagggcactcatacactcactttcgagaaaagcgggtactggagcgtcacgaagacgatagacgtccagggtgacatgactgtcagtgtcgagatgtaccctgacagcgccgccttcaagtttgaaaacttcccgtctgacatcagcattcccgagaacacgatttacacgctcactttcactctctcgccgatcagcaccgacgcggcttacaacacttacctgagcctgagcggcctctccaacgtcctcgaagtccagaaagacggccaggccgtctctcccgagtcgggcaagtactatctcggcgacatttcaggcccgacacagatttccatcaagttcaaggcgggcgcggtcggccagcacgggttcactctgagctttgagagtcatgacgcaataatgagcaagacctacacgacgacaaagagtgtcacctacaccgtcgagccgctcccgttttcggttcagatgccctctgaatggcaggtcggccagaatgagcttcgcatctcggaaagcagtggccagagttacctcatcacggcggttctgaaggacagccagggcaacgaggtttggagtgattcccacgccttcagcccctacgaggcgtactccttcagcgtcaacgtgccgagtgagggccagtacacgctcgaactccagtggaacggccaggtcgcgacctatgacgtcaccgtgaatcctgcaatcacgctcaccacgaagcagctgacagtcgagaagggtggcgagggcacgattgtcctccacttcaagaacccgtcgagcgatgtgcagtattacacgatcaaggtctcgggcggcttcctgccgagcgagatcaaccagagcatttcggtcggcccgctcaccgagaaggatgttagcatagccttcgccgtgccagaagacctgacttacgacgcctacgagctccaggtgcaggttcttcagggcaacgcgacggtcttccaggacaaggttgccgttagcattggagattctggagggttcacgctcttcggcggctcaagtgggaacacctggctctggctcggtgttggcgggcttgggcttctcgctttagttggacttgccaggaggaggtgaggtaatgaggctcttcttttcactttttgagcagaaaggaggcgaggaagaagagcaggaaaggaaaacctgtaatagaaaaaagcgcctgtcagggttactgttactcctcatttttaccacaagcatctatgcacagccagccctagcgtttgacttcggcagctggtggaatggtgtcaaagagagggcgagcaacaccggcaaaatggtcgtctcgacagtagtgggtgttgtcgttggcggagcatgcatggcagggaccatgggtttcggtacaggtgcatgcgttgcaatgggaatggcagccgcaggtttgacatattcagcgctagaactagcgtttggagggtctcggggtggagatagtgacagtggtgcaacaataacttacgagcgccaagcaaatggaactaccgtcaaaaacgatgacgatgaactcaataaagtcatagacgacgctaaccagcaggcatatgaaaggattgcagagcttaccgcgaagctccgctctgatctggtgaggtatgacactaaggaagatggagcaactggcgacctctggattgagatctatgctccctcaaagatctatggcttttcagctttccccgtccaggctaaactctacacaaaagagagcaacataccatttaacgtcatacaccttcgcagtgttgagatctatcttcagaaggagaacagtagcgtcccgctctggaagcgcgtttgggattacggaactggtagcgagggcctaaacggccaaagtgtggtttattcaacaattctcaaggttccggacgattgggtctaccaggtgcagaacgctattcaaaccggtcaggtcactagagacttgatcgaacagatattcagcgcgaacacttcaacgtgggagatcttcgttaaggttgacgcttaccgtgaggtctggcagaacgacccgcagtacactgatcagtcatcctgtactgctcaacctaaccataagtgggactcaaacacctctacgtgctacgtcttcgttaggaatgatgacattaagtatactgcttacaccaccagcgcctggcggcacgtgagcatggcccacgacatcgccgatcttgcagatggtttctatgcatctctaccagttaagttcctcaatactgaagcctcaacgaaatgggcgctttatcaggagaagtacgctggagcgctctcaaacttcattatactgacctttgcgactccagttcatgtcattggttcaacagcagactacaagttctatattgtgcctaatccaggctattttgagcctcttaatccgtccttcaatgacgacttcaggttcgtagcagtgagagagtacaaggatctaagctggacagttgcagattcaatatttggaaacctcggcacgatgagtccggacactccaactcaaaagctcctgacagcccactacactgaagacctgagcacgttaacctataaggtctatggactggcttacttcacgatcacgagagatgacaatatcacaataccgctctggcttgttgtcaatccgaaggtctctgttatcccgaacacaaggacagtgttggcggataatcagatagaccagctcgttcagtttactgacgatggcaagctcgaagcgagtgagatcaatcagactaaagcgatcgcagccagcctcattaacggtctccaggagaagatcactgccgccgaggatctcaagaagaaggcagacgccgagggcaatgaaaaggcttccctctacgctgagaaagcgatacaggcataccaggatgccattgaggctctcaacaaaattacacagaccgatgctgtccaagagtacctcaactggctaaacgttgccaaaaagcttgagcaggccggagacttctacatgagcgcggctgagaaggcgctctacggcgagtacgaacaggccgaacttgacgcacagaagggtgatgagctgagtcagcttgccgatgagtacaagccacacattgacatcctaacaactgcaaagagcatgctgagtaagaagattctcggaattccactttgggcgcttctcgcaatagtgttcgtgttagttggcgctttcgtggtttggagaaaactgctttgaggtggtgattgaagatgggggaggaacaacaaccaaaaaaactgaaggccgggcaatgggccttaaagacggccctagcctcgggctttcttggtttacttttgtggtatgcaggacaacacagcataacagtacagcagacaacagaagcaatggcatcggtgccgctggcattcgtagtgctcgttgaactcttcgataagctcgcagataagaacgactactacaacaagctctacgcgggaatctacggctcaataggcaaaaagaagagcagagtaggtgcaatcctcatcagtttgctcttcgcagcgctcggaatgctaggggtcatgtgggcaatcacaggaaccatgacgctcaacatcggcgatgtcgggccagcaaatcttttcgtctccggattgatcggcctatacatcttcgctccagagactggcaacaatgagctgatactttggttctggaccgccgcaacgatcgccacaaaaggtgcattcatttcaatacttccacacatccccgggctgatctgaggtgactgacaatgctcggcagggttgcagcagctctcatcgcttacctcctttgcattttccacttccagaacagcatggttacagcaggcaacctcctcggcctcagtggcttttgggcgctcttcattccctcggccctcatagggctcgcagtgtacagaatcagcgacctagacagttggggactttgggacgcggcggcattccttatcctcggcggaatcttcatgctggcgattaccggcgatccaacagcaacggccctggaattcattaagggagtcacgggcttcggcttagctggcgttctggcaggattagcagcaaagaacaggagggattgacatggacgcgaacagcatcattgatcagctccacaaccttgcaggaagccacccatacctcgcgctcggcctaatcctcatcctcatcggcgtcctggcaaaaggcaaggtgagcttggtgttctacgctctcggggccctggcactcttaaagtcattcggcttagttgacactttcttttctttcctgaaacagattccagaacttgttaagtcgtttggaggtgtttgagaaatgagaaagaaagagagacagatcataaccgttggcctgatactactcttcgccgccatcggctggtgggcctatcacggcggcggaggcggctttgttgacataaccaatgccctgagcgacaacagtactgagaacaccacttatgaactcgccgtcagcaaccttttggctatagttgaccagagcactggccacgttctcgtgagcttccaactggccaacgaggagcacttcaacatatccagcgttcaggttctttacgcgctcaacgtcgcggatccgaacaacgcgacctatactgccctgaacgccacagccgagaacggcacatacaaggctgagattccaagcaaattcggtgacgtggtttactacaaggtcaaggtcgtttatgacactgacaagacccttgaaagcgacgttcagagcattactgttaccgacacgaccgctccgaccctctcaagtgttagcctcgattataacagcacggctggaaccttcagcattgacttcaacgcgactgacaatgaccagatagccaagtactacgtttattgggctgatctaggcaccagcaacaccgtgagcaacactacgaccttcaccgaggttaacgctacggccctgccaatcactatcaccaacgtcactgcgaatgactactatgcattctactttgtagttgaggacatcagcggcaacaaggccatgctctacaacgagaccgccccatatgtgattcaggccaacgcgaccgctacctggccggttgttgtgaccgagcagagctctagttgaggtgggctgaaatgtacgcccaccgctccaccccatctttttcaaaagtcattctaaggctcttcgcggtggttagcttaatttttttggcttatttcagctattcgacgtttgccgagcacgacccactaaaagaaagactgtatgagcttggttatccgactgagggattcatcttcagcaacaacacaatacggtgggctgacggacacctcacgatagtccagggggcctatgttgaggactatccggtcacagccgagcaggcgtacgagatcgctcggcagtatctagccagctacaacaagaaactggagaagtacaactacaagctctatccagacaaaaagagcctcactgagaaggaaaaggacggccagaagtattgggttttcgagctgaagctcgatactggtggttctaagctctttgctggcttcatttgggtgaaccggaagacgggagcggtctcggtgaaaggccttttggggtgagaagaatgaagttcataggtatgaagtcatatattcatatattatatatgataatagtcctcgcggcggttgtgagtaccgcagggtgcattggttggggtgatggtggaatcataatcggctttggcaacgagacctacacgataccacttaacacctctaacagcacaaactccacaatcccaacttcggaactcaccatacacaggtacgaggagctggtttacgttggcggaaacctgacgatccaggagctgaacctgacaattaggcccgactacgaccccaacaagggcaagttcttcttcatattcccggatacgatctattgggagccgatgaacgtcactatcaacaacataacaataattgggactggctacttcacgggcacgacgtactacatcgccaacatcacgattctgagtcctgaaaagttgacggtcatcgtaaacaacccggagggacagtgatatgaagcggctggttttcgcctttatcttgttcctgctgactgccagcctcgcgtcaggagggactctctacgactggagcgggagccttagtgtcggcgagcgcgtttacatcaacgacctgagcctactcgttgataagaacatcaagacaaatgaaaccgtcctcgtcattgagcaggatagccagattcaaacgattctcggcgacggcgagaactacaccactaagggcctggaaatactcttcgcggcgctcggcgatgagggctacgttcacgttgaaagcgagaagccgttcgcagtgagtttcagtgctccagacgaggccgcggagctgaggaacgagaacacagagttgagagaaaagctggcgaacctgacgaccaaatacaacaagctcgcgaaagaaaacgaacagctcaagcagcaggtttcagagcttcagagcaagctcaagaaccagcccaacacagccgagctgaacgcaaagattctgaacctgacgagggaaaatcgcgagctcaaggcacagttagcgaacctgacgaaccagtacaacgcagtcaaggcaaaagcggactttcttgaacagcagaacgatgagtacaggaagatgatacagacccttctcgaagatgcttcgcagaagagcgagcagagctacatcgagaaggcaaagaaagagaagctggtcggctctgtcatcatcaaggcaatagcgttcagcgttatcgttgtgggcttgattgggtatggcctgtacaggaagaaaaggtcgtgggaacttggcggcctctaaaaaagcattgtgggagagttgcatagttttattttcaaagcacaagaggagaaacccccatcttgaaaaagacgggtagaggaagcccaaaagtgtgaaatcgtgatatgtcacgcagacccctgcaatcatagaaagcagacagaggtgtgggttagatgggagtatcaatctatattgggaagaacacagacaaagaaaaacgctacgtggagctaaaggaaaacgaagccaaccacataactttcctcgggccaagcggtagcgggaagaccacagttatgagagccatagctgaagagatcttccaaaacatccctggagcactagtagtcgtcatcgagcagaaatacgataagaacaaggcaaaagacctaatggatttcttgaccattataacgaagaagaaaggccccgacttcgtgaaagagaactttcaaccgttactccagtattacaacattcttaaaaacgatggagtgctccacggaaagccaggggacttcgcctttggctggcccaactaccccttcaccttatatcccccatttccaggtgataaacactcgatcctcagttggcatggcctaaaaccaaaggcgttccccgtaaagaggatagtcttccgtccggtgagaaacctagaagcaatagaaaaagacaacaactgcatcgctagagaagggaaaatccgctacaaagacgtggactttgatttcatagctagacttgcacagatcaacaggaatactatttatggccgcgtcatccgacaggcttgggatctagagaaaaaacgagatcctgatgagcttgaaaggttcggctacgagtgggagaaaaaataccgcccaaactcaaccgtgccaagctcaacgctcctcagcatcctcgaagtctgcgctttgctgaggagtgatacgatcttctcaaaaaacaaagactttacttcggagctctctacggatgtcatcaatgtaattgacttctcagcaaactccgagctaacaccagcagaagaggcatggatcttcaagcatttagtcatgtacatcgtcaccaagttcgtccgcttcaggaacacccccgtcttcttcgtcattgatgaagttcagaaccttctcgaacatcctgatggcagaaaagccctcgataagctgaatagagagggccgctccaattgggtaaacatcataagcgggacccaatacatgtacggcctgccagcgtttctgatctacggggcggcacacatcggcatcatcggaagaatagccagcgctgatgatgagcttcttcttaggaaagtcatcagggacttccaccgcatcaagaaccccaaagtgaagagctttcgcgagtataaggacgtgaagccctggttaaagggccgaggttggttctcctttgataaaatgtacaccgagcggatctacttccgcccgccacaaagcttgtgaggtgagaagaatgttcggatttgggaaaaagaaggagaaatcctcgcagacaaaagtttaccccgatagagttgataccatcccaatagttccagatgcacgcatccaagagcacgctagaaagctccgagaactcaactataagttcgcccaagtctatgagccaaagcagaacgtcattatttggttcaatgggaaagagagccgagtaatcggctatcccattggccttcgcgaggacctcaatgactatgtaatcctctaccaagtcagacctccgagctggctcgacagtctagtccatagcctcttgaggatcgtgggtaaaagcccgccaacggccataattcgcgtccccaagaaaatcgcttatttcggcgacgagacgataacaattctagccagtgccttcatcatgaacgaatactacgaatacgaagcaatcccacttgccctggatgaaactgacgccaaactctatctagccctcaagaaggaaaatgacatgctttgggaccttattacgatcctccgctaccgcgtgccagaagtcgtcgaagacgccatgaagatgaatccgagaataaagacctacatgagcactaaacaacagaaccctgatgagggaacaaaagaagagaaattcggcggcatagaagtggccttcgaagacaacccattcaagcgctggagggtctaacttggctgaggcctacacagtagtaaacgacgaacttgacagcctactctccgaggaggaacaaaaaccggaagaaaatagaaaagacaagggtagcaacagcaggcccggaaggttgcctaaaaaggagctgaacaaaaagttaatcactgcaatagtccggcgcctccgcattctttacctcgatgctcccaagaaagaggacaggatcctgatcaatgagatcctcgacgaccttgaacaattgatgatactgaatagtattgcatgtgaactaataggagtggactgcagggagaaagaataacacctcagccgcctttttcttttctacggtagaaaagtttataaggcaaagccttctaccgtataatggtgaggagaatgcttaaggttcaggttcgaaagcagatcaaaaagcaaaagaaaagaggaaaagtctataacgttgagcaaaggcttatctacatcccgtccaaggctgaacttccagaggaagtttacatcctcactccagaagaactcagggaactggccaagcttattcccgagggaaaaagaccacgctggctggtggttgaatgaagcgctttaagaacttaatcgtgataattgacaggagcactgagcatgagactagaaaagggtttactgttttagcattagtcggagtttgggactctgaagtaggacatctcaaaaggatcatattcagagaactcaatctcaagcacgcaaagaaatatggaagcgcgaagaaggccaaaatggacatgctaaaagccgctctcaaaggagagcgcaccaaccttaccagccatttacacttcataagggtttatagaatctcggtcactggcaaaattcgcgatagagatcttccacagcgtttctatgacgactttgaagagctttatcccgactgcaaattcatacttggagataaggacattatctcaatcctgaaacgaaagtatcccgaccttaagacgatcgaagaaaaagaaagcaagacaacggcaaaacagtacaaacacctaatgctcttagtggataacattgcgtactttgcaagaatcgcatacctggagaatgaccttgagtttttagaactcttgagaaaaggaccgtgaaggcgtcccttttcatcttcatcgggcacggtcgctcatcgcccgcaccctctcgggacgccaaccctctcacggtgcatccccggcttcatgagcgtctgccggggccaccactcaaagggcccgccaactccgtccccaacgggacttcatgccagtgcggctcatcgcccgatcattctcacgggctcattatgggttatatattatgtaatatataaatgtttctcacggcagcatgccaacctcctggtcatccacataaaatacccacccaagcgcgttccacttaattctgattggcttaatttccactattctactttcatcccttcctgccttgaacttaactgcatgatctatgcgctcgtccagcttgtaattgttcaccttcagctcaagcttaccgcccatgactaacttggcctcgataacatcatcatcaaccgtcaaagtcgccaccttcctcacccctgcgccaactaagatcagtcctggtatcatgagaaagaagattgcgaaaaagtataggccatccttatcggtggtgtcctccttgaggacatacgcggtttggactacgtggactgtctttgaagtaatcacactaaaactattgtcataataaactacatactctccagagccatactttgtgatattcaacttcaagtgaatcggggaagtaagcttcccgtaatctatccgacctttaggagtgtccacataaaccttgaggtcattattacctccagctactgaaatattaatttcaaagagctcattcttcgcaggctccttaaaggtccaactattgtgccagacttctccaggcccaattgtccaagatttagaccagtggtcaacaggatcccaataatacttagggctcattgcggccgcataccccatcacaaagaacgctataataataagggcaacacccacccatgctgtcttaaagaatcgcaatttcttagagaaacgaacaccctccggataaatcgtaggaactctctttggcttagcaagatccctaaccgaaggaatattaccctcgctcatcctccgggccctcctccgctgtttaaccagtttaagcgatagagttcttacgagaagctatattaaactttcgccacgattattgggctaggcaatgatatagtactgattaaaccacagataaattattaaggagttcgtatatagtaccaagcgaagggagaagtatgagcgaggtaactttcacaaaaagagatacttataaagtaacctggaaagactctatggaatggttacagataatatttgtatttgctatggttaactggttttttgcactcttcagctcacttccaactataataatcctctactattacggtctccagagctacataggaacagcccttgcaggctttgcactggcttatactgccttcacgctcagaaactggcacataatctcgaaatttgtgactaacaaaatagaggctggtgaagtagataacaagattaacgtgatttccctccttttaatgggtataactattaccatatactccttaattggaatagccctccattcggaatggattccattctttattccattatgggactattacattctcgaaaaaggctcgtggtacctcacaataacagggtgggtgaacaagactgcaacagccctaactagaaccaagaaagataatatttataagacagtacctgtgggaatactcagctttgcgctactcttgagaacgcttaagagattctaatatcgtttccatatacttgagtttaaactgatacatctgataccatacacttgggaatctacagaggaacaacagcataactataaacggccctaccacaaacatagatcccttaacgtggaaacttctaaaggacaactcaaaattgggatcggctccgaaaggagttatagtgagcaccattatagaccacacgagcagagggatcagtagcaactcaacaacggcctttttgaagaagctatattctatctcgcgctggacctccttgctaccctcatcgaaaggattaaaaccactaacccaattattatcatccgagagcatgcactaaccccctctctagttactcccctcttttattgtgcgatttaatttttaaacgttgccaaacgctggaaaacgttttaatatgtttggagacattatattctgattttgatagaacatagaggggtgagccaatgcccgaccaggacaccagcgaagccagagtcgtcgagccactagcgaagttgcagaatggagtcaaggacatattaacattaaccaaaaaaattaagatttgaatcatcaaagatttagagtgatgaagtatgagtcctcaaacattaggacagcaaacacatgtgcaagacattaagactcgtggagatctctacgaatggttagaggtaaacatggctcgcagttatgctgagatactggaagaacaaaaattggaaccagaccaaaatcttgttaaaacgtatgtcattgagtcgaatatctcaccaaaattcctcaaatacgtcctgagaggcttgtttgattcaattaaagtagaacctcttgaagattacctactatacagaatagatatcacggataaggataaaaaacttcaagttcacttcttcttagatgccaaagattcgagattctggagagtattcactctcgacaaggcccaagacgttgatagtgcttataacaaatttgttagccaaataaaatcgagattagataaactatggttatcaaacaagcttctaaagaaattcatgcatatatcctttaaagatgtttatcttagaagcatctccattaaacatgacgagactgcttttagcaccgaggaagaaaaaaaggagaacaaagttagcaaactaagaattgatggctcaggtgaattggttaaagatctccttgagatcgttgaagagcatgagaagttccgatacatgaccagactaacaaaaattgggattaaactcgttgagaaagagtaccccgacaaattcgtcttagaagatctgtattattggggtaaattcacagcaaaaggaacatccttcgatgaacatttggaatttatcgatagtgttgtacacacatatagaaacaacttgaaatacatagaggactctcttattgattactcctcatgggattgggaaaagaaaatcccactcgtatatgagttcaaaaaagaaatctctgatttagatctctttgcaaaagcaattacaacacccaaagagccattcaggatttggggctttgcaaaacaagtagaaaaagacatgtatattatagtcggaactgaccttcacaatggagataatttctcgttagaagttactccctggtgggctagattatatctcccaaagggctcctgcgggaacactgcactaaggctccttgcaaacatccaacagacttatgatgccaaagcttatctcgaggtgccccaatatggcatcaggattagataaatatcttaaactatctaaatatgaaggtaccccaatccgtactcttgaagagttatcaaaattccagaaagcacatactaagttgatgaatatcatcctaaaccttgctaccccaacacccaaattccccaacgatctctataaaaaaggttatagaatagtacaaaacagcatagaagcacacatccattttaggaatgtagagaaagaagacctgaatgggaaaggggtaactcccgacataatccttccgaattatgagaaagaacacattgtagtctttgaatgtaaaagctttcaagcaaatcatgaacagttacaaaaatatctctacttgatagagcatccagaaataataattgaccaagcaagaatacccttcaaaaaacgtcccactcaactcaaagcggacgtctcatacttttcttataaagacatagataacaacgaaacgctttccaacgagacccggatccaaatcattagaatcatcgagataaatccaccagataaatccgaagaccccaccaatcccgttgtaaaagaaatagagttagtaaaaggagaatacaaaaaccccgaattaaaccaagtattcccaataaaatggagactaaaagacaaaccttcttatgtactcttcccctttgatccaaatgacgacgctgagatctttcaaatccacatcataaacaaactaatagaatttgcaacattaggacaagaactgccaacaaaagggatggtctttaaagatgatatcatcatcccaaaaggaaaaataatcaaaaagagcgaattgcccatcgatgatcccaacgagcaagaccaaaaatgggaacaactattaaacaccctcgaaaagatagctccaggaaaatacgaagtagaggaagacgaaattagaatctcagaagacatcctactcctgaaagctggcaaagccctagacgaaatgagagccgagttaattatgctaatcgatcttgaagttgatatgaacaccctaaccgaacgcgaatttactacaggagagcttgcacacgagttatacacctcaagcgcctactcaatctaccagttcctacacggagaatacagagatctaatcaagaaaagagttaatgattcactgaaaagactctcaacagggcccctaaaagggtacctcaaaagaaatcacagacacaaacacgcctggaggataaaaatcatagacaaaaaacagatacccatgtttagagagacctgtggaaaagccgtacgcgaattagaaagcaaattcaaaacaaaatacattgacgaatacataaaaatcttcctcacacccaaaaccacaccaaaagacaaaaggagctgaagagtaatgaccggccaagacgagcagggaacgcgagtgatcgagccactagccaagtttcatgccaggttagaccacggtgagaggaaaagataggaaatatactctatattccaccagggagaaacataatgcgtccggttgattcaattcctctatccacgcgccttgcaaggctaagctttacaagaagattttgagtggcttcattaggatcttctatcagcacagttcccggaaacgagttaagaaaatcattgagcatcattgtagcatgcccctgtcttctaaacttcttcctcacgaatatttgatgaagtgtcggatacttatgggcatccaccgagtatgcatagtacccaacaggttccccatttttccagaggatctttgccctcatccactcaaggttaggacgtttgaaattaacattgtctcctgaaattgcctccaagtacaagaggtaaagagtcacattgtcataactacctttcttgacttcaatcaaaccgtcccgctcgggattatggtaaaaataacttggttgcttccactctccatcccacttgaacgccacaacatgttgacccctaaaccgctgatcaaattcaggacagaataaaatctgaatattctcatcatcagggaagataccgattaaatctgtttcagtttccctaactctacggccacacacagggcacctcagaacagttatctttctccaattctcaggattaagtgctatttttgcaacattggcaaccgcttcatcaacaaggctgttaggtatagaaaaggacacccaatcactgttgacctcaaaccacaactcatttctaggcacatgctcattatcatttgagagagcttttttatgaagttctcgcaccagcttcctaagtacctcctgagtctccttagtcagtgcaaattcagtcgttgttaaatcaatcataacttccaaaagaccagaagataatgggactatgtatgcggccggttcgtttttctcttcggcttcttcaacaatatatcctgcagaaccaccgtttatgaaaggtattgtatagatcttccccccaatttcaatttcatatacagcacgcaccatacaacttcaccaaaactcttaatgatatttactccttaatactgttttgatctgatacgagatataatgaaacccaaaagtcttattagctaccactcattgttctagaattgaggtgatcccatgtattctataaaagaactccaagacattgtatctcgtatagtgtccaccaaggggcatgtaggaatcacggatggaggtatagagattcacatccatggaggcatttctggccaagaatttagggaaatagaaaacgcggcctggaaaggcggactggtcctcgacagaatatattatcaccgaatcagcgataccctcgcaatcagattcaagaaaccaggagactgaggtgagcacagtgaggaaaatattcgaagtatggagccagcttgcaacctccacaacatacactattgagacagtccaacacctaaaacaactcatagaatgggaattcgacgaaccctacgaagactacataaccctcctccccacccaaatagcaaagatagaactcaaagggactgagcgcaatcctgacggcacctctggaggaaaatacatcttttacctaatggaactccaatgcctcggcaacagcctctactttatcctaaaggctactaaatactactgtgaaaaccagaaaaaagagtgttccatcatttattcgctgtacatagaaccccaagactacaaacacctgctacaaatcttcgccttgattaggaaactagaggatatgtacaacaaagccatggccaaggccctaaaagacttcccacaagaacaacaggacaggatatgtgacgcatgcctcgaggaaattgacacccaactcaaaagaaaccttggcctccccaagtaaagacccaattctttatcttttctctcaacactccttggggaacttcccatagcggagaaaatttcgcaaaccttttctaccatagagtttattagaaccataacaaatacggaatagatacgggataaacaaccaacggagctgagaccaatgaccgagcaggatcaccaagaggcaaaggtagtcgagccactagccaagtttcagagcagagtaagacctcagggtagggttatggttcctatttatatcagagaatactttggtttgcaggatggagactttgttatagtaataataaggattccagatcaaaatcgcaaaataatcggtcgcgtttttgcggtagcaaagctgtatgatcgtggagttttcacaattcccaaacccgtcagggacaggttcggtcttaaagtcggcgattttgtagagattctgcttgtggattacatccatgtcaagtcgctcataacgaacaagatggggccaaccctatccccaaaaagtcaatttgaagccattgacgaacagcaggagcgcaagatacttgagcgcatttacaataatgattagtaagggtgtcacagttccaccaactgtgacggggtgtgacgggtgtgacgcagggttttttcgctttatttttgaaataagccattctcctgtcttctttaatgtcacagtgtcacactctataaaaatatataaaggtattaatttcagattgcgcggtattttgtcataatgacaaatattctataatttaaaccatagtatattgtcataataacgaatattgaagagttgctatgtgaaataatataggcacatttttatggggtgtgacatgtgtgacactaaactccccgcagattccttttttcaggatttaaagcccttagacccccgtcacatccgtcacacttgcgtcacacctggccagactgtgacacccttactatttgaatttgtaaattctcacctttgagcaatactgtcttaaagggtccacacaaagcttatatatcctgaaaatcagtataatactgataaacagtatacatggtggtgacgatgccgtctgaagggtggcgtgctgtgtatgttcgggagtctacctatcaactgtttcagaagttcagaggcaaattgttcatggaacggggaaagaaagtgacggaggatgaaaccctccgcgcgcttctcgcctatgtgatgcctgagcttgtagagcaaacctgaggtgagtttcaatggacgaagagtggaacagtgacaacattcagttttcaccgatcgtcataaaattcggagacctccttacaaaagcgagcaaggactcaggagaactcgacatggagtttctccctgcagagttcaggggctggcctcacgatcccgacccgtatacaatcttcttcaagcgtaaggggagggagttttgggtcctcgactacaagaacccccgcgttgcgctttacaggatccggaagaggaaatataaagatgaagatactggcgaggaagttgaagaagagtttgctgttcacgacaggactgtctttaactttgtacctgttgcaataagagaagtccacgacttcaccatcgagctggccgctgaggaggccaacatggatgctccaaccctgtatcggtgggtcatcgccgagagagctctctcagggatttacatacgagagcttggacctgccttaaaggttgagcttctcgacaagttgaatgaggttggaggtctctttctgagtgaggctctcgcaaaggaagcgatagatactattcttgcccttgctcgcctccttgaggctgttgagcatgtgcatgaacctctggcccccggaatttactggaaccccaagactaggcaacttgaggcgtacggctttgatacacaaatgccttctcgcgtcaggatttatgacgcgttgaagcttttagataagatcgttaaagccaatcctgataagagatggtatgagtcttggtcggtcaagtttggaaagatattcaagtgggccttagttgcgggcctcggttatgcatataaagtttacaacgagaagcgccgctggatcccttatctcttgttcataggcgaatctctgacaggaaagactcaggtcatctccaaggtaatttcatacctttggaagccgcttggtaaggtgacctctattggttcttcttggagcgtttacaactttggcgaaacaatctcttcagtagcttctgttattgtcatcaatgaggcggcgcccctattcaagtccctgaactttggagatgagggggacaatttcttcaacctcattaaaaacgctcccgagcaataccttttcagaaccaagagtgttgggaagaacatcaggaggccgtatcctgcccttgcaactcttgctttcaacgctaatatgccagggattaaggatgaggccattaggaggcgctttttcaccgttgagttctcgaaggtggataagatacctccagagatcgctcactactttgagacttcgattgtcccgtacttagattacctcgctgatattggacgctttgttttcaacgtgattaaagaggagcctgaactccttgccttaccgtgggaagatcttgccgagaaacttgtgaagaggctttacgagtatgccgggcttgacatccctgagtggctaaagaatgccgagctggtggataactaccgcgaggagcttgatgatgagaagagggaaaaggttgtcacatggcttaggaggcactttgatgagacttatttccgttattcccgctacgcggacagttccacaactccaaaagacagagtcttctatgtgctggagcatgagcttagtccatactttgtcgtgagaggtaatgaagtcataatcaagaagtctctacttgaagccatcagggcggacaccagactagatgtttataatttcaagactctttgcgatcttcttaattgggattaccctgtacaacggagacttggttcagcaaggcctagggttgccgttacaaccctcgataagttctttgatctcctcggggtctcggagtcaaagattgaggctgacctcaagctcgctgagcgggttgtggatgtccttgcagtgaacagcttcacgtttgacgaacttctgaagatcctcaatgtccaggaggaggagctcagagaggttatcactgagcttgagcgggagttggtgattctcccgaaggatgggcgctattctctgaacaaggcccgagcgagggagcttgggtttgagattgttgacacgtatgtcgtcacgggaggtggtcgtgtatgatgtcggggcttgagtatgcccgggaggaggttgtgaaggcctttccgaaccgggctgatgtagtgccggccagcaacggcgtggaagtggtagtctatggcggggtcaaggccagcgagctagtgtatctggagaccgtgtttggtgcggaggggttccagttggagcgtatttacttccaccggaaccgtgacgcgcttgttttcagatttagccctatgggggtggcttccaatgtctgagcctttccaggagaactctcctgacttcggcccgaagacgagcatcaccaagccctcggaggttcctggtgccgtagtgctgagcctcacgacgccagcctcgtgggaggattttcagggcttcctcaaggcggttgaagccctgcaaagtgatggtttcgttgttcgctcggtcgagtcgagctacaagctgttccgcgtatggctaaggagggaggaggaatgggcaagtgggtgaatattcgactggagattgaggccgccgtgcctcttgaagccctttcgagtgtagccccgggaattgacgtcgaggagttccaggagctcctcaataacgaccctgatgaggccattgagatgctcaagggggagttgctcgcaagggaggtcgtggactatggagtggtttttgacatcgacggcgtggaggtgatagagaatgagtgagtccgccatctggtcttgggtcgctttggagaagcgcaagctggacgcggtgctggagcaggtcgaggaagtgccgaccctgctggagtacgtcgagcgcgaggccagcatcgccagggagacggcgttctccctctctgcgaggggagagcgcgagaacgcggcctactggacggggtacgcggacgcgcttgaagacctgctgaagaagatcgagcgcagggaggtgagggcatgagagagtattcgtttgttttcgtgaagatagactacgatgacattgacgtcttcgccgacgacacgaaagagtatctaaatgagtgcgacgagccctcctcttcatcttcttccgaggaggtgatggcatgacttttgagattgtgtttgattcggctagagagtttgagagcctgatagccacgcttgagaagttcttcgatgaggcagtattccaggttaacatggaaggaattcagatgcgtgctatagacccgagcagggtcgtcctcgttgacctcaaccttccagaaatgctcttctccaagtactccgtcgagagtgaggaagcgatagcctttgatctaaagcgtttcctgaaggttcttaagcttgcaaggagcagggatacgcttgttctccgcaagggtggagagaatttcctcgaggtcggcttgctcggtgatgagaacacgtggttcaagctccctctaatagacgccaatactcctgagattgaaattccgagcctgccatggactgtcaaggccgtcgtgctcgctggagctctgaaaagagccgttaaggccgcaaagcttgtctccgactcaatctacttcatggctacccctgagaaattgactttcaaggcggagggcaacgactccgaggttagaaccgttctcactatggaggatccaggtctccttgacttggagcacaagatgacaaaggcgaagagtgcgtacggggttgcatatctcgaggacatcctaaggagtctcgctgatgctgatgaagtcatcattcggtttggctttgacataccactgcttctgaagtacatggttcgggatgccggtgaggtcagcttcctgatcgcaccaagagtcgaggagggtcgctcatgatcgcgcgcatcccgtcagcctttctaatccagagggccctcgaggatggccctgccacgttcagcgaactggtcaggaggactggccttcccgcgaaagaggttgccagcgcgctcgacgagctcgggcgcaagggcgcggttgtgaaggacgagtactgcttcacgctccggggggtgtggggatgaacgaagaggagctttacactgagcttctcagactgagaggcatgctgaatgatgtcattgacctgttcgagatgagcagggacggctatgttgcaaggagtctcatcgcagaggcctggactgacttcaacattcaggcgggcaagatcaacacgaagatgtacgcctacgcgtatcaggacagcttcattcagaagaaagtgcaggagggacggctatgaccgagtacctcatcatcatcgacggcgagcagttcgtcactgaagcccctcacgtgctcgcggcttgggaggttgcgatagctcaggccgctctgatgctccacgagggccggctccgctccgaggatgttgagatacatgtcttctcggagcgcgaggccaagcgcgagggggttccaatactctttccaaagcgcctgaacaggcttgaggttctccagaaagttgaggatcttcgcgaggagctccgtcgcgtcaggccgcacgagggccaggcgacgctggagcagttcgtcggggtgagggcgtgatggtcgcggcaagagcggaaatgatccgccaggcggccaggtacggccgccacgtgtacaggccctttttcgattatatgcaaagagaaatcaggagtgcagagaacaagtacttgttcagcactctgatagaagaggcccttcctggtcagttctcgctctatgacctcgatgcccttgtgttcagaaagcattctgaggttcctttagcggcttttgaactcaagttcattagttggcgcgtggctaaggattcatgggcaaagagggagcttctcgtgaatgggtggcagtttcagaggctcagggcgctttcagaagtcctcactctcccgctctattacttcattcaagtgggccaggagcggttcgtgatgttcaatgtcgccaatgtggagccctcttttgagtacaggcgcggtggctcggcaagagattactacgccgtcatcagcctcgatgatgtggtcgtcagcagggactttggggagtttgcggatgacctcggcctcctgctcggtgtgaacttgtcgaagccggctcaggtgccagcctacgcggttggagggaggtgacggggcgatgagtgaattgaagttatacaaggcaactgtctggacaagagatttggacccgtttgcggaagaagctgtttgggaggttcttgtaattgcttgggattacaaaggtgcagaaaggttggcattagaatacttcgaacaatgcttcgatgaggtcatggtggatgaggtgaatattgaaccattcagcggtcctaaagttataggggtggtgtccaagccatgctgaatactaacacttcccgtatagtatcattcttttccaaggacctttcccgtacaaccaaccttattcgccagaaaaccaaggataatatacaagccctgtacctattcctcccaacttccgaagcgtcctggacggtgaaaaatatgaatgttgtaaacgaaataataggggtggtataatgccgcgcaggcggaagttccctgactatgtttcgatccgagttcccgtgtaccagccgccgaacagtgttcttgaactcctctttgatggcaagactctggaaatagccaggaaagttgttgattacctcaagcagaacggtggcctgttcaaggatgaataccaagaagccctcggcgtggacggtgctgacaaggtcctatactttagggttatgaaaaagctcctggccctcggtatggtcagagaggacgctggagtgtataagctctccgaccgcttctccgagaggatggagaatcttgcaaagatgtggaagtttgagataggcaaagttgcagagctctggtgatgccctatgcatatatatcataatactctatatgacctcggtgataaagagtgggacaaaagcccaatatggcccacaaaaatagcggctctcacaaacgagaacggcccgaaagaaggcgaaagacgcgtgttcatttgtaccttgatgaagaagtggtcggcggtctcagagaagccggttatagcctgtcggccctcgttaacaagcttttgcgggaacatttagagaaggtgacgcgcatggaagctattatctggagaatggcgggcccggcgggattcgaacccgcgacctccggcttagaaggccggcgccctatcctgctaggctacgggccctctggagagaacttgaggggtgctcttataaaagttacggtaggcgggaataaaagaagggaaggaagtcacttcctcctcctgaggaggagcggcacaactgcgaggccaacgagggccgctggcccgcaggtgctcttgccctctgatgacgtctgcttggccgtggtggtcttagcggcctttgaggtgctggttatggttatctccttggtggcggtcgccctgtttccatggaagtcctctgcaactatctcaatcttgtacttgccctcctcaagacctgggagctggacgatgtagaaggtgtctccaggctttccactggagggctctccagggaacttgtcgaccttgccgtacttaacgcggtttccgttctcgtcgtatatgacggcgtagagatctcttataccaaggttgtcctgagctgtgaagtatgccatgaagttggcgttcggcttggggtggctcggctgaaggtaggctatctgaaccactggcttctcggtgtctgcaccagtgtcaataacgagctgggagacaccctgcggaatcgtgacgttcagcattatgtagtactggtcggctatctgcctctcaccgaggactgtgtaggttatgttcgtggcctctggatcaacctttgccccctccggtatcgggagaactatcgggccgctgacgctctcatcaagctggtttatgaacttgacagcggttcccgcttcggaaacgtgcctgaaggccatgaacctctgcggaacgggaacgctcatgaagtcgctctgaaccttgtcgtccttgatctcgacgttgacatagggcatttcaacgcttccgtcctccttgatgacaaccaggttgcttccataccatgtcggactgtgcttcgggtttgcaggtgggttgggctccttgtcaggggcaccggttgatgttagggttaggaagtagtgcttgttgccgttcttgtcaatgtagagccagtacatatcgtggtggatgtgaccgctcatggtgagtggcacgttgtacttgactatgtcctcaaggaagcgcttggagatttcttcctgtgatgaccagctcctgcggaggtgtcccttaatctgatcccagtcggcatctgggtcaaggcccttgagaactccaccgaggtagttccagcgcggatcgaagaagtacgggtggtggtacaggattatcggcgtgtagtccttgtgctcttcgagaaccttctccatccaatcgagctgatcctccgtcgggtatccctggtcaccgccggtgtcgaggccaattatgatgaacttgccgatggttacgtagaagtacttcggaccgaggagctgggtgtaaaccgtcggcgggtcatcgtggtttcccttgattccgacaacgggcatgtcggcggcggaagtgtccttggttatgtcaaacataatcttgtaaccgaccatgtcgccgctggtgtcaacttcatctccagtgtttatcatcagggtcgctccattcattccccagtaaaggtaggcgctgtaggtagcgacgacgctgtgaagtggaatcgggtttgagcacatctcctcaagcttgtagatgttgctctggaagtagtcgccgcagacgtagccgatttttgcacccgtggtgacgtgggtgtcgctcgtccaggctagcttaagctccttcggccactccttgaacaccttcaggccgttggggaggacgagagtgcccttgtcggtctttatgagcaggaagtatgtgtcaggagctatgtcgtccggtgtcttgaccttcactacagtcattccgtcttctcccggcgatgttccctggatttccagctggtacgggccgtgaaggactgagacggcctctattgagcttactgagactccctccttaacgtagagctcgaagctctctcctgggagtgcaaacgctggaacaacgggagccggctggtagaggtagtcgctgtaggtgtaggagtactcttccgccgagacgtagccggcggcagccaaaacggcagttatagcaagcagcatggagaggactttcctcagcatggtatcaccgggtaataagaaatccacaccgcttaaaacgtttcctctggatgctattttcgaaccaggggagaagaaaaacacggcagtcgcagaattcaggttcaatcgagatgtccaacgatgtattctgccgcctcagagtttccaccgagatgcctgtagagggcgtaaaggtcaaggattctgttcttaagctccaaggtaggtttgacaaggtatcttgtgaagagaaccgccatctccacaagaacgcagtctgccctgctaaagggaattggccgggcatttcctaccagcctcttctcggggaagaattcacatttaagaacctctgtagtcccgagcccgtccgtccagacatctcttctgcaccgggcttctcccagccagccagggagtccttgtatccatcgatactgatcatgagactcaaaggaaagctccacgtcgaggttaagggctgtcttcacgaggagctcggcgtcccaggtcatctgaagggcgatccggttgttttccagcaaatctctaaagctttttccagggaagagcttgaaatggagcgtcgctccccttcttacgacgccaacgggggtgacgttggactttgagactagaaggagctcgtaaacctgaccttccctcatcagctctaacatcgtgttcacctcaaaaagaagagagaagagctcaaagctgcttgggcaggacgattatgtcctcacggttgatgtagaaggtaacgggctgggtcgggcgaagtccctggacttccctgtcgcttatcgtcctcgcgatgatcctagtatctccaaagagaccgacgacctccgtgaagaagccgtagtactcaacgaggtcaacggtaccctcgatggagaccgcgttctcaaccgggtgaagttttattctctccggtcttatgacgaggacgacgtcatctttgtcgccgtcgtagtaaaggccgtcgaggcggaagctctcgaactcgaccgtaaccttgttcccatccctttcaacgactttggccggaatgacgttggtcttgcccatgaagcttgccacgaactcgctctggggcctctcgtagatgtccctcggcgttcccacctgctctaccgttccgacgttcatgaccgctatcctgtcgcttatcgccatggcctcttcctggtcgtgggtgacgtagataacggttattccgagctcgcgctggattctccttatctcggagcgcatctcgagcctgagcttggcgtcgaggttgctgaggggctcgtcaaggaggagaacctttggctcaaccactaaagccctggctattgcgacacgctgctgctggccgcccgagagctgggtcggatagcggttctcaaagcccttgagcttgaccagctcgagcgcccattcgaccttcttctttatctcctctttcggcacttttttcagtttgaggccgtatgcgacgttgtcaaagaccgtcatgtgtggccagagggcgtagttctggaagacaaggaccgcaccacgctcgtaggagggaaggtaagtgacctcttggtcgccgaagtatatcttcccgctcgtcggatagtctaggccggcgatcattctcagtgttgtggtctttccacagccgctcgggccgagcagtgtaaacagctcaccgtgctttatgtggaggtttatccccttgacggcctgaacgccgtcaaactccttaaccacgttttcaagcctgacatcgaccattatcatcacctcaggttaggcctatgaaggagtacctctgtttggttatcaggttggctatgactatggccgttatctggacggccataaggaagacaccaagggccgcggcaaggtttgcgcttccaactgcaccgatgatgagttccttcatctttgcagttatcgggtaccaggtcgagtttatcgaaccgagggtgatgccaacgcttgtctcgctcatacagtagacgaagctgagcattgcacctccgaagaggttgaggtatatcatcggtattatgacgctggtgagggccttccaccttccagctcccaagttcattgccgcttcctcaagggagacgtgaacctgctgtaagccagcggagattgaacgtgcggcgaagggcagacgcctgatcgagtaggccagtatcagcgccgctccagggaagaactccagcaggttggtggggtcgaggctgcttcccttaaacggcggcaccgtcgagaagaagaagaaatagctcatcgctatgacgataccagggaccgctatcggtatcgtggcgaggctgtctattatcggggcgagcctggccttcttgaacctgttggaggcataagctgaggtaagggagagcaggattatgatgaagactgcggcggttgagtacataaggctgtttatgataaccctctcaatgtccggctgtgttattatcgctttcatattgtcaagcgtgaagccgcttggccaggttccgtaccagctcttggagaacgccaggaggagaacgcctatctgcgggaacaccgtaatgaggagcaccggaactgcgacaaaggctataaggagtgcctgccaccacttgggctttgcaaccctcgggttccaccttccgcccttgctgagcatggcgtactgcctgaggccgacgtaccacctgaccgcgaggaacattataactgccaggacgagcatcaccagggccaaagccgccatctgcgggttgcctatggcgaaccccgaaacgaaggagctgtaaatctggtaggacatgagcttcttcgctatcgggcttccctggaagactatcggcgcggcgaggtcttcaaggctgaatattccaacgagtattgcaccgctcataattcccggaagggcgagcgggaaggtaaccgtcctgaagaggtggaaccccttgcttccgaggttttcagcctgctcctcgagagaagggtcaatgttgatgaagctcgcgtaggcgttgaggtaaactatcgggtagtaagttatggtctgggcgatgatgacaccgaccagcccgtctatccagatgggcttcgggaagatgtggaggtgctcgtagaatatccagtttatgattccgtcggggaggaacatcttcttgacgacgaccacgttgacgaagggtgtaaccaggagcgggatgaagaggagaaccctcattatgttcttgcctggaaagtcgtagcgcgccattatgaacgcgaagaccgttccgaggatcgtcgtcagtatcatcactgctattgataccagtatggagttaatgacaacgccgaagtcccagccgtagaagtgatagacctccttcccgccgtaagtcagcgtctttacgaggtacccatcaggatgcagcgggttgaagtaataggcagacctgaagatgctgctgaaccagtgggcagagatatggccgttgtactcaaacgccgtcgctagcatcacgaacgtgggtatgatgagaaacgccacgaggtagagcagagggaataggaacgacgttatgacgacgccatctggtagcggcgtcccgaacagcctttcgctccacttattgaccttcatcggacaaccacctctcgctgagttacagtatgttccaacagagaggggtctataagcgtgttttaaatgtttctggtcgtgattccaggaacattctgtacttcaagcgacaaaattagacgtccaagtggaaacaagtgtgggccaactcctcaaaacataaggagaaaagaaataaaagacttcaacccgtaatctttttcagctcctcaagaaccttgttgtacttctcctgggcggcactgcgccactcgtccatgagctggctctggaagcccgcgtcggttgcgatcctgtcgttaatcttggcggcatactcctcggtgaaggtgaccatctgtccggtctcagggtccttgaactctatcggtgcggtaagctcgtctttgagcttctcaaactgctcctgagtaatctttccttccttgtaagcgttgaccagggccatccaggcctggtggagcgggccgttcacatcgacgagggtcgccttgaagtagtactggagggagttgacggtcttgagcgctctggcatcgtcgaagggaataccctcactggatatcgtgagctcgtacgcctttaccagcgccggcaccgcctcagagtaggtcttccccgcgttttcgcccttgaagagtatcttagcctcgtcctcagttatggtcttgttgaacacctctgcgttgatcgggagcctgtttatctcggggctcatccatacggcttgtccctctgtgagaacccagtagatgaaggcctgagcagcctccggatgcttgctgtacttgagcagggctatcgggtcgccgttgattatactctctccggctgggatgacatagacacagttcgggttctgcttcatcgccgtgtagccgtagaagtcgatcgtgtttccagccgctatctcaccgttgatgaccgcatccctgacggcgtcgctggcctcatagaccttggagttggccgctatgagcgtcattatcctccatccctcgtcccagccaaaggcctggaggataatctggtatatcctcgtgttggaggtgctcctcgtcgggtcagctatgccgtacatctgcggatccctggcccagtcaggagaagctatgtcctcccacttattcgggaaaggaagtccctgcttgttgagaacctccttgttcactgtgaaaccgaacgatgaaagcgccgccgctatccagtaaacctggctcccgtttttcctgaccatcggcattcccgcaagctcctccggaatctgattgcctatgaggtcgagtatcttctggtctgttatcggggcgaggtagcccatcctgtacatgttgtcgaagagcgttggccctccgccccagccgacatcggcacccttctcgatgtagctcggccagagggattcgggaacgcctatgaacttgatgtcctcgatattatactgcttagcgatgtcgctctgtaggaagagctgcttcaccttatactggatcgttgcatcatgccttgtgacgatggtcagtgttattcccttgcccgaagatccggcgctgctgccttcgtttccccctatacagccgctggcgactacgcttaagccaagaacgattatcaagagaatcccaataaagcgcctcatggtaccatccccgttagaactttagtgaaccaaataaaaggatgtcggttgaatgaaacaaaaagaagggaaggaagtcacttcctcctcctgaggaggagcggcacgacggcaaggccgacgaggaacgccggaccgcaagtgctctttccgctttcacccttggtgatctcaacgctccacttgaatatgttggagacgacctttggcccgtcgagcggcttctggtagtaaacgctggtccacatgggctcgtagccgccgattggggtctcgccgctgacgatgatcacgcttgggttcttgccctcaagctcgataatctgggcagccgcaatggggaactcaccctgctcaccggcagtgtaagcgttcgcggcgggatcctcgttctcttttatgacagagtcaccggtactgcgaatcagcacgtaagtgttctcgggcttctcctccggtgtaagcttgtgccagtcaccactaccatcgacaccgtcaacccaggcaacgacaccaggaccgtgggcgaggactgctccatcgtgttcgaagccctggacgatgatgtccctcttgggtgtgtccccccacgggtcggcgtaggcaacgacacggtagggagctccggcgttgctgacggggtcttcaactgaagcctggtccagtctgaggttagtcatgttgagctggttgaggacgctgtcaacgaagttgatggtgttaacaccactggttccatagtcagaatcgccggcaatccagagggcgtggccgccctcctcaagccacttcttgatggcctcaacctcctccgggtagaacgggctcctaggctggccaatgatcaatattgtaacgttgttctctttgagggcctcgtaggttatcttgtcgccaatgttcttaatgccgaggtctgcctcgtacttagagtcgccgaagtagacaaaggtgtagtcagtcagaaccttgagcattccttcggtcagggtctcgttctcgtaagtaacgtcagtcagccccttcgggttctcgccgtgggcgaggtcgaccgctataacgacctccccagcggcgctgaccttcggcattccaacaactccaaaaacagacagcaacacaacagccgccagtattattgcagccttcttcatggtatcaccgtttgatttaatcatgattaagttataaatcttatcgcctgaactttaacaggcctgaaaaacttccgcaaagtccttaaaggaccccacctttttccaagcggtggtgatagaatggacatagaaaggaagatagagctcatcaagaaaaaacccacggaggagcttttaacggaggaaaacctgagacacctgcttgaggtcggcgctccgcttcagcactacataggcttcgagataagcggttacattcacctcggaaccggactgatggccggcgccaagatagcagatctccagaaggccggcgtgaagacgagaattttcctcgccgactggcatagctggataaacgacaagctcggtggagaccttgaagttatccagaaggttgcgcttacgtacttcaaggaggggatgaagcagagcataaaggtcatgggcggcgacccggacaaggtcgagttcgtcttagcgagcgagatacttgataagggcgactactggcagacggtcatagacatctccaagaacgttacgcttgccagaatgctccgctccataaccatcatgggacgccagatgggggaggccatagacttcgccaagctcatatacccagccatgcaggtggcggatatattctaccagggcgtcactattgcccacgccggaatggatcagaggaaggcccacgttattgccatagaggtcgcccagaagctcaagtaccacccgcttgagtggaagggcgagaagctaaagccggtagccctccaccaccaccttctcctcggcctgcaggagccgcctgtctggccgatagagagcgaggagcagttcaaggagctcaagacccagatgaagatgagcaagagcaagccctactccgctgtcttcatccacgacagcccggaggagataaagcagaagctcaggaaagccttctgcccggctagggaggtcaagtacaaccccgtccttgactgggccgagtacataatcttcagggaagaaccgactgagttcaccatccacaggccggctaagttcggcggcgacgtcacatacaccaccttcgaggagctaaagaaggacttcgcggaaggaaagctccacccgcttgacctcaagaacgcggtcgccgaatacctcatcgagctcctcaagccggtcagggagtacttcgagaaacaccccgagccccttgaactgatgagggagataaagataacccggtgatttttcctctcttttctgttcccggtgaagaagatggcaggcgtagatgaaaaggacagagaaatcctcaggatactccgcaaagagggcaggattactcttaccgagcttgggaggagggtaggcctctcccctgcgagcgtcaagaaccgactggataaactggagaggctcggcgcgataaagggatattcggccgttgttgatcatgcgtttcttgatgagttcgtgtcagcaatcttagagctacacttcaaagagttcgatgattccttgagaccgtacctttcaagactttccaagatggagaacatcgaattcttgtatgtgagaacaggggagagtcaggtcatcatgaaggtaaacgtcgccgataccgatgaactcagacgttttattgaaaggctgaaggccatttttggattgaacctgacgttcgtggaggcgacgctcgttctggaagaacttaaaaactgctgggtgtctctcactggcgagagaagaaggagcgaaaacttcccttcgaggcggtgaaagatgctcttcgtcgtgagaccgggaaggaagaagaacgagcttgaggcgttcttcatcgagaacgagcccgaaaagctatcccaaatgcagaaccttaaagctgaccggatttaccgcttcataatgagagaggggaggcttttcaaagtacttgagggaagtcagtaccggaatccgaaggagatagagaagcttctccgccaatccagaatcgtgctcgtcaacgccgacgagtgggaggactacttcaagaggaggctccagaacaagcgagtcgagaaagccgagctgtgccgcctctgtttgctggagggcaggataaccgtcctgactgagggcaaccgcataaagtaccacaacgagtacatctgcgaacgctgtgccgaggacgagctgaagagagagctccgcttccgcttcaaaagcatagccatgtttgaccaggccaaaaagcttcttgaacgttttcgcgaccttgataaagtcctctacgccttcgacccgcgctttgacccgactaaacacccggagataaccaagtgggacgagctcaaggccaagcacgttaaagtcgagaagatcaaggtggacgagcttccagtccccgagaagttcaaggaagttctgaagtctgagggcgtaagagaactcctcccggtccaaagcctcgccgtcaaaaacggtctcctcgatggagagaacctcctggttgtttccgcaacggccagcgggaagaccctaataggcgaactggcgggagtaccgaaggccatgcagggtaaaaagctcctctttctagtcccgctggtagctttggccaaccagaagtacgaggacttcaaaaggcgctactctaagctcggcctcagggtggcgataagagttggcatgagcaggataaagaccaaggacgagctcgtggtcgttgatacggggatagatgctgacatcatcgtcggaacatacgaaggcatagactacctcctccgcgccgggagaaagataggaaacgtcggaaccatagtgatagatgagatacacacgctcgacgacgaggaacgcggaccaaggctggacggccttatagcgaggctgaggaagctctatccaaaggcccagttcatagggctctctgcaactgtcggcaacccggacgagctggctaaggagctcggattaaaactagtgctctacgacgagaggcccgttgacctggagaggcacataatcatagtgaggaacgagagcgagaagtggaggcacatagctaacctgtgcagggccgaggccatgagaaagtctaagcagggctacaagggacagagcatagtctttacattctccagaaagaggacgcacgagctggccgcttatctgacgagcaaggggctgaaggcgaagccctaccattccggccttccctacaagcagaggaagctcacggaaatggagtttttggctcaaaggctcgacgtcgtggttacgacggcggcgctcggagcaggagtggactttcccgcttcccaggtaatctttgagagtctcgcgatgggcaacaagtggctcagcgttagggagttccaccagatgctgggaagggccggaaggccgctctaccacgagaagggtaaagtctaccttctcgtcgaacccggaaggaagtattcagcccagatggaaggaactgaagatgaggtcgccttcaagcttctgactgcacccatcgagccagtccaggtggagtggagtgacgagcttgagcaggacaacgtcttagctcactcctgcgtcttcaatagactggacgtcatcgaagaagtccaatctatgtgcttaggggcgaaccagagcgcagaaaaagtccttgaaaagctcgaggagttcgacttcgtgaagatgaagcggccgatcgttgaggttaccccctacggaagggcagtcagcatgagcttcctcctgccgaaggaggcaaccttcatcaggggaaaccttggaaagagggaagccaggtggatagcggtcaagctccttccgttcgagaacatctacctcagcggaactctccagagagagcttgagggggcagttagaggaagactgagcgccaacgttttctcaccgagcttcgcctcgatccttgaagaactcgataaggttatccccgagctgagcccaaatgccgctgagaggctgttcaccatctatcaggagttcttcatgtgccctgaggaggactgcaccgaatatgccatggagagggtgagcaacctgataattgagctcaggaggagcggaaagcacccgacccagatagcggagcacttcaggaaggtctatgggctgatagtctatccgggcgacgtcttcacgtggctcgacggcatagttaggaagctcgaagccatcgagaggatagcgagggtcttccgcgtgagaaagaccgaggagggggcgaagatactgaagagggagatagaagaagggaggatgatacgctaacgctcagtctcccagagccagaggttgtttcccatatcttttctttcaagtggtttcccaattagctcctctatgtagacttcagcaacgaagacttctcctctgataagatggccgccaaaaactctcccctcttcatcgccgagggtcacgtgaaggtgtgcaaagggctttccatctttaaggcttatgttgccgttcaaggagaggagctcaaaagttccgctgagctcgatgctcctgtacctcttctcttcctcagagtagtatcccaccacaggattccttagggagccaatacccatgacgactccggtcttaatgcccctactctcagcagagcggtttatggcctccagaaggtcttcccccgcgggaaccctgaagaggaaggtccgtccagctttaaattccatgctctcacctcaaccctaataaacctaggaagctttaacgctttgggtgtaaggaaatgaaagctgaaaccgtcatgaaaatcctgccgcagatcgaggggatgagagatgttgacttctctcagttcaacccgccttatcccggagttatagacgcctttgagaaatctggaagggaaggcttagtcgaattccagaagttcgttgaggaaaatgggcttggaaaggaggtcgtcaggagctttctggtgtcgctccttcagtacctcctcatccgctaccgccgcttcaacgagtacgcggttgtcaagccggtggtcaaggtcttcataaccctgaagggatggctcaacgaaaacggctttgaaagggactgggaaaagctcctggcgtcattcgttggctacctagtgagcatgatgccgatgatcgtggagaacgaggactgcgagaccactggagcctacgcagttgtcatagcaaagctggccagggaggccatggagaagttcaacgatgagtactacgatgaactgttcaaagcggccaatggaatacttgatgaactgagagaaaaatgcggaacagatgtcgcaatggtggaaaaaggaaagggctgttaacgttcgagggttacctcagcatagcttcttgggtcctcccatattcttacccttatcttcctcacgttgtcccctgccttttccgcaaccctctctgcgaaccattcggcgatgtactcggccgtcacgttgggcttgttgaggattaccgcctcgctttcgggcagttcaagccgcttgtcgttcttctcaattatgacagctccatctctgcgctcttttacccagttttcgcttacgaggattcggtggtcgaggagcttgacaaggttgctcaggtggttgaagtcaaatatcatgccgctctcatttagctcgccccatatctccacatcaacgtggtaagtgtggccgtgaatcctgaggcacttgctctcgtacggcagtgcaaggaagtgggagctgtcgaagtccttgttccagcttatctttctctcaactaccctgaagtttccactcattttctcaccgtaagctaaaggaggcaataaagttataacccttgctggccaaagctgggaaggtgttggaatgccgaggggtatgggctggggcagaggaaggggaagaagacgaaagatgaggatgatagggtttattccacaggtcaggcatttctatcctgcccagccaccagtgtttcaaccaaaacccccgattttcatgacttatgaggagttcgaggcactaagacttgtagattatgaaggcttaactcaggaagaggccggtcagaggatgggtgtctcaaggggcacagtatggagggcgttgacctctgcaaggaaaaaggttgcacagatgctcgtcgagggcagggagcttataattctccccgggggaaatgaggttccaaggggagcagacgagtgaagccttaacaagtttttattcgccagatttggcatcttgtgtcttttcttaggtgttctcggcatctaaagcccttttgaattttgttagggcagcctaaaatttccctgcagagttatctctcagatttttgggtgagttgttactttaatatagcgtaaataaactgataaatatcaatttcataaaatttatataaaaagctcgtgatataaatacaaaacaaagaaatttgaatatgttttaaataaaatgggtaataaaattacgttttaattgtgtataaaatcacaagtttttacaataccaagttgttaaaggggcaaaactatagtcaatagagggccagcagaaaaggctgagctaccagcgacaaggagcaatgaatgaattagcaggtccgctcaaaacatgcactcaaaacagggaaagttgcataaataagccagctatcacacaaccaaattccagttacaattaaaggtggttatggatcaacgtgaagaggaagctggaaagagatagaagctgagcccacagtcacctatactacccctcccagtggagaaggcctactcacaaactactcgaaagccaggaattcacaaaaagtacctgcctaggccctttccaagatatgagaagtaagcttaagggtttctataggccggatatatcctcataaaccacgaagagtatactaccttttccagaaggccaaaaaagagcgggctctcgaacgacgcaaatacgagtctgcgaaaaatagaacagggggggcaacaggcaatagctctggactaatcccggtctggcataggagcgttagacatgcaccacaagtagagagttgggcccctctttattccccaccaagatgtaagcataatcccccaatttttctcttttctatgctcgctattgttcattagtttgtcatataaggtacattatatcaaaaactgcagtacaaaaatgggcacttacatcatagttaaccaaaagagcaagacatatatagcttcagctggtagctagcacagtgttctacttaacccgtggcaggatttattcatcaggaacttcttatgggaaccagtttctccaataagccgaccttcatcgctggtctcgttattgtggggtgcttattcaaataatgtgaagccaagtaaactacctgccctaaaagtgaccacatggaatcattaacggcaacgtgtttaacatcatcccagaggatattctcaaagactctcccgcttaatcttataagaaacggagtttttatcgcttgaatcacatccagctttctcgcttgtctccagaggcagggcactctcaaataagattttggagtgagacaatatctctcatagaagcattggaaatgactacttttgggttgtcggtatttcaaaaggggtcgatcaacatgatagtgaaggtcttttagattagaatcttgctaatctcatcggtcgataatatctttcatcgtaatgaaaaactggtcttgtgatagcgggcttctcaagtgaataattagcattcttgacattcgaccatttctaggaattaaatgttcgtctttgtctatttaacgccaggaagtagtactaatttgtcattttttactattggtaatagtttctaaaaaacttcaaattttctaagcatattggataaactttaatattagctaaaataaaaagttaaatagaaatatataagcgtcttatttaaataaatgaaattaaacgcaaacaaatttctagatttaagagtataaaacgtaacaattcacctaaaaatccgagagatacattgagacgatgatcataagagaacatgcaaagaaaaaggtattaaaaggctcaaaaaagaatttagcgacccataaaagcttcttccctctctttttcccctataaacgctattacattgtccacaatctgtggtgcaagcccgatgtagttctccggcttaagggactcaaggtcttcctctgtaaggtacttcatggcctcttcgctctccctaacgacctcaagaaggtctctcttttcgtggaacgccttcatggccagctgcctaacgagttcgtgggcctcctgtctccccatacccttctccgtcagcttcaacatcagcggctcggccattatgaggttgttggtaaggtaaaggtttctcttaatgttctcggggaagaactcaaggcccgaaagcacctttatcgtagtcttcagcatctcgtcgaggagaacgaagctctccgggaggatgacgcgctcgacagaggagttcgtgaggtctctctcatgccagagaggattgttcaacaacgcgggaatcacgtttgagtagagaaccctggctaaaccgctcaccttctcgctccttatcgggttcctcttgtgcggcatggttgacgagcccacctgcttcttcccaaagggctcgcttacctcaagtatttccgtccgctggaggtttctgatttctagggctatcttgtcgagggttgaggctattaaggcgagaaccatcatgagttctgcataaacgtccctctggattatctggttggttattctagcgggcttgaggccgaggccttccatgactaacctctgtatttcaaggcctctctccccgaagctggccattgttccaaccgcgccgctcatctgaccaacgagaactctctccttgagctggttgatcctgtctatatgcctctgtacctcgtccagccatatcgcgaacttcatgccgtaggttgtgggtaccgcgtgctgaccgtgagttcttccgatgcaaacggtgtacttgtgctccatcgcgagacgcttgagaacggagcggagctctttcagatccctctcaactatcgcgaggctttcctttatgaggagcgcgtttgcggtgtctattatatcgtttgaagtcgctccaaggtgaacgtacttcccgtgctcgccgcacacctcgcttaacgccttgacaactgccattatgtcgtggtgtatctccgcttcaatctctttaaccctttcaagcttcacccacttcgtgttcgctctctcggatattacgcgcgcgctctcttccggaatgttgccgacctttgcgtgcgcccttgcaagcgccgcttcaacgtcgaggagcttctgcaacttgttctcctcgtcccagattctcctcatctcctcgctcccgtagcggtagtcaatcgggtgaacggccattttatcaccacgtttaagtcaatttttgcgccttaaaatgtttatgttgccataattttgtaagaacttaatctcgtgaagctcgcaaagccccttggaggtgtcaaatttgtttcccgcttggtgaagacgaccgaaaagtatttaaccccatctcggcgatagcctaacgacaaaacttccggaggtgccagaaatggctgaggagcacgtcgtctacattggaaagaagccggttatgaactacgtcctcgctgtgataacccagttcaacgagggcgccaaggaggtcagcatcagggctcgcggtagggctatcagcagggccgttgacgtcgccgagatcgtcaggaacaggttcctcccagaggtcagggttaaggagatcaagatcggtaccgaggagctcccgactgccgacggcaggactgccaacacctcaaccatcgagatcatccttgagaagccgtgaatttgattcctttccttttccttcaaacgcttcagtttttcttgaagctctggaaattcttataaccttcccttcggattctccacggtggaccttttggattacgaggtcatcgacattcacgacgagcgcgctaaggagcttgcccagatactttcaaacgagaaggcactctcgatactcaagttaatagaggagagaccccgttcaataagcgagatttctcgggagcttgggattcctatatcgacagtctcataccacatagaccgcatgctcaaagtcgggctcgtggaagtcgctggaaagaagtacggaaagcgcctccaggaggtaaagctgtacagggcttcaagcaagccgatactgattcttccgggaggtaagaagaagcataggacgtgggaaaagcttcgcgtcataaacctcgctgtgagtgccgtggcttctactgggatgtactttgcggttaagcttttgatgggagggagcgaagaacagtccgaaaccgttaggactctaaccgttaaaactgccaaggaagcttccaaaagctccctcgactggattgccgttattattgcaatcttaacgtttattcttgtatttggtgttttagagtatcgtttccggaaacgtttttaagataccgtgaggatttccgcttgagaggtggtaacatggcagagattaccgtaggacaggttgtcaagaggaaggcagtgctcgttaggccggacgataccatacacaaggtcgctagaatactggcccgcaacaaggtgggcagtgctgtggtcgttgatgagaacgaggagatagttggaataataaccgaccgcgacatcctcgacaaggtcgttgccaaggggaaggatcccaagaaggttctcgtcaaagatgtcatgaccacgaagcctgtcaccatagaggatgactatactatccaggatgccatagacaagatgatggacaagggaatcagaaggctcctagtcacgagggtcgggaagccgataggcttcgttactgccgccgacctcctggccgcgctcaacagcatgaacagcgaggaagaggaagaagtcgaggaggagaccgaggtctacggcatctgcgaggtctgcggccagtacggtccactctacaaagtctacattgaaggcggcgaaaagtgggtctgcgagagctgtaaggatgagctcaacctctgatccccttcagctctttcattaccctgtccaggattattccgaactccgcgttcctgttctcgaagcttagggtatggacttctccaaggggtctgaacctgtcgatgaactttctgtgaacaaccgctaggagcggtttctctgacttcaggacttccccaactgccctgatgaactcgttgcttgtgtactccatagggccgatttcgtctatcactatcaggtctgcttcgacgatcgctctccttatcgccggaacggccaccctttctatctcatctacgtggacgacgtactttccaaagggaacccctgggaggtgggaagttccccttaggcttgcgagggttccctcctcgcccgtgtcaagggcagttatcttaaacccgatgcgccttcctcccctgcgcacttctctggttatcactccaccaactatgtagccccagcggtcaacttccctggctactctctccacgagcgttgtcttgccgaccccagccggccctgtcacgaatatcctcaaagccatttcactcaccgaaggagctttaagttcctcccttaaaccctttggggtggttctcatggagataaggtacaagccagaggaactcacgaggcttccaaggagcgttaggtacgagccgggaagggtaaccatgatagaccagaccctcctcccgagggagttcagggagatagagctaaggactgttgatgaagtggctgaggccatcatcaccatgaaggtgcgcggtgctcccgcgataggggccgctgccgcctttggtttagctctctacgcggacacctccaatgccagaaccaaggaggagttcatggatggctttgaaagggcttacgagaggctcaagaacacccgcccaacagccgttaacctcttctgggcgctcaacagggtgaagagcctggttgaggaacacctcgaagaccctcttgacgagataaagaggctcatcgttgccgaggcgcagaagatagcgaacgaagatgtggaggccaacctgaggatgggacactacggtgccgaggttcttccagagggtaacgttctaacccactgcaacgcgggaagtttggcaacggttcagctcggaacggttggtgccgttttaagggtcatgcacagggacggaaccctcaagctcctgtgggtggacgagacgaggcccgttctccagggagccaggctttcagcttgggagtaccactacgacggcattcctctcaagctcataagcgacaacatggcgggctttgtgatgcagcagggtaaggtcgacgcgataatagtcggtgccgacaggatagtcgccaacggggacttcgccaacaagattggaacctacacccttgcagtccttgcaaaggagcacgggatacccttcttcacagtcgcgccgctctcgacgatagacatgagcctgaagagcgggaaggagatacccatagaggagcgcaagccggaggaagtcctcacctgcggcggctgtaagatagcgccggacgttgacgtctacaacccggccttcgatgtgacgccccacaagtacctgaccggaataatcacggatcagggcgtcgtgtggccgcctttcgagaggaacctcaagaagctcttcaagagggagtgatgcttttctttctcaactttttccacgaaaacacccttaacctcgccgagctcctcctcgagcgccgggagaagaagtccgagaaactcaaggggttcaaggcaggggcagtctattgagtgctcaaaaagtttgtccggaagctccaccctaacataaagccctctttcgtcttttctgacctcaaagggagcaacaactccagccccgaggattctgcccctcacgatcatcaatagcccaaaagctggcaggaattaaagggtttcttaaacggaaggttgggaacggttggttataatttcaggatttttcacatcccgtccagccagatgttcacgaaggcaacaacgtgagaagcaaggtagctcctccttccaatcctgaccttcttcgctatgccctcaagaaagcgctcatcctctttgctgaggccgagatggtctccgaggacgaaggctggattctgagggaactcgatttcggttatcggcttcccgtcctcgacgaggtagtagagcgtcgagtccttcatgacccttctcacgacgtcctcaaacgtcatgttgctgacgtaaacacccggaaagacctcaacttccttcgtgggctccctgaggtcttctccgatcttaagggccttcttcaggattaaggcagtgctcctctcgtccgggttgagcctgaccttcagcttaggaccctcgaagtgaatcgtcttcggagggttgggcctgccgtagagcgtcatgaagactctcacatccttccttatcccgtgcgagaggaggaaggcgctgttgaggaacctgcatagcaggtcaattcgtcccccagttccaggcaggtctttgagcgagaagtccggagaagtcacggcggtgttcgccttgaggatgaacgtcctcattttgcccaccacggtcttttacagtagttccatcagccgctcttccccaccgggaaggacaagcggccttgagaggtgcttcctggcatcggggggaacctcgtagatctttctctccagatctcgggggacttcaacggggattagccttttcggcattttgtatccacagcgcttgcacttcaggtagtcgcccttgctcttcatggtcccaccgcagaccgggcattttggttttctgtactcaaccttcggaaccagctcgaccgggtagaacttttcgaggttaagggttaggatgccctcgtgctccttgacgccgccagcggctatgatttcatcgccggggaggagcttgcgcacccagttgcggaacttcttggtcggctcgaacgccgccacgcgaatcttccctgtctcgtcctcaagctcgaagaacacgtgccttccacgctcccagtatggcgaagcaacccaccccctaacgaccgcgctgtcgtagagctttagctcgccgatcctcttgggggtgaggtggtcgtcggtgttctggttcgtcttgtagagctggtagaaagccactggttcctcgaactccaccatttcaaagacctggagaactttgcccttgtcaatcccgcggattcccacaaggacagggtcttttccgtggggtgttatcagaacaacacgcttgtaggggtccacgttgtcgtagctgaagggataagcccatttatccgccagaaagacgctctcctcgtttacccttctcggcgtcccccagtactcccgctcccggtaggccagaagctcataggtaaacctctcaagggggtagccaattgccgcgagggacccgattacccccctcccgagcttgaacttgaagtattcagccccaacctttctcgcaacttcctcggcttcccctatggtcacgtgctccctcagtgctctcagcgagaactttctcagctcgttaggaacatctccctcaaggaagacaacgccggggtttgtgttctcgtgttcaaaatccgccagctgcgaaacgtagaaaagaaccgtgtccttgatttcggggataatgtcctcactggcctcgaaagtcatcgcgactgcaccgtttccgcgcgtcttgtaggggatgttcgggttcaggcggatcagcctgggcaggtccaagggctcggctaaccttgagagctcgcggtagaggatggcacccaggtatgtggtgcacataccatttggagagtccgtatcgtcaattccaatgtggattatcatcggagggggatagtgagggagtttaaaaatcaaccgcttgcgatgagttttaaagttcgtcaccactcaaaggttaccgcttccacgagcttgacgagggcctcaaagtcctcccctgtgtattctcttggaaggccaatgccatctccctctgcccgcgatatcggaatggcgttcttctcggctatcttcaggatcctctccggaacctctccaatgacggcccccttgccagcttcagcatcaaagaaggacagcttgatcacaattccaccgaaatcgggcctaaatccgaaagcaaaaacattcctccccggaatgtcgtggtcggttaagtccgctatcgcctcgacgagggcctttacaaggggccactcttcctcggggttctcgacgtagaatgccagccggtcgtagacttctccttcgtcgtcaatcagttcgatgtacactcccctttccgtattaactggaagaccgtagggttcgaggagtttcttaatctcttcccgccacatgctcccacctcacagcatcttaacttcttccggcgggcgaaccttcacgacttccctgttcacgaggtcttttggtatttctcctctaaggacggcgaggaggttcattaccgcctgaaagcccatgtcttccatagcttccttcgaaaggcccgcgtggtgtggtgttaatacagtctcccactcgtacttgaagagcgggtgctcagttacaggctccttctcaaagacatccgtcgcgtagcccttcagcctgccctcttcaatggccttaacgacggccttctcgtccacgagggttcccctgcctatgttgacgaggtacttgccctcaaggagcttaattctttcctcgttgatgatatggtaggtttctggagttgcgggaagggctaagatgacgatgtcgctctccctcaggacttcgtcgagcgggaggtacttcgccccgacctcagcttcgatgtcttcttttctcgagcgcgaccagtagagtatctccgttcccatggccttcattctcctcgctatggcctttccgatggcccccatgccgaggattccaaccttcttgccatagacggtttcaatgtccttgaaggtgctccatatcttggcgtggctgtcccattcacccctcctgatgagcttgtcggtgtaaacgaacttcctgagaagggctatcgtcaggccaacggcgaactctgccacagcctcgctcagaacccctgaaactttggtgacgtagatccccttcttggtcgcggcttccacatcaacatggtcatagccggctgaatgacagcttatgaccttgagcctctcggcccgttcaattacttcccgcggaaccctgttcagcggggagacaataagcccgtcgtagtccttgatcttctcagccagctcttcaacgctgggatatagcagaaaatcaacgtcggcgtacttcttcagctcctcgacgggcttgctcttcatcttaaatgtcacaagaactctcggcctcatgttatcaccttaagatatacatcgaaacgaacctaataaggcttttggagaaaccgggaaagcttaaaaataaaacggcactctctcgtgtaggtggtcgagatggcggttgagagaaagaagtggagcgagaatttcagcgagtggtacaacgagctgattgaaactgctggaatccaggacaagcgctacccggtcaagggtatgaacgtctggctcccctacggcctcaagattatgcgcaacatagagcgctttatacacgctgagatggagagaaccggtcacgatgaggttctcttcccggccctcatccccgaaaccgagttccagaaggaggccgagcacataaagggctttgagggagaggtctactgggtcacccacgctggtctcgaaccgctcgacgtcaggctcatactcaggccgacgagcgagacggcaatgtactcgatgttctcactctggataaggtctcacgctgatttaccgttcaagatataccagatcgtcaacgtttaccgctacgagaccaagcacacgaggccgctcatcagggttagagaaatcagcaggttctttgaggcccacaccgcccacgacagctacgaagatgccgagaggcagataaaggaagaccttgagatatttgacaacctcgcgaggttcctcgctctgccctacatcatctcaaagcgcccggagtgggacaagttcccgggagcttactactcactcggcgccgaggtcatgatgcccgacggcaggacgctccagataggcacgatgcacaactaccgccagaacttcgcaaaggcctacaacatccagtacgagaccgagacgggtgaccacgagtacgtccaccagacaacctttggaatgagcgagaggctgctggctgctgtcatagcgatccacggcgacgacaggggaatggttctcccgccgaccatagctccgatacaggtcgtcatagtcccgatacccaaaaaggacagcgaggccgacgttttcgcctatgctcgtgagatagccgaggagctcagaacggccggaatcagggtccacgttgacgagcgcgacataaggcccggaaggaagtactacgactgggagctcaagggcgtcccgctcaggatagaggtcggcccgagggacgtggaaggaaagaaggctgtcttagctagaagagacaccctcgaaaagataaccgttgagagggataacatcgtcgaggaggtcagaaagaccctcgatgcaattcatgagaacctctatcagagggctaaggagttccttgagagccacatcaagcgcgttgacacgatcgaggaggcaaaagccgtctttgaggacaggcgcggaatcgtcgagattccctggtgcggtgaggaggagtgcggcctcaggatggaggaagagctcgacgccaagatgctcggaatcccgtatcccgaggagaaggcgaaggctccagagggcaagaagtgcccggtctgcggcagggaagccaagttcatcgcgaggttcgcgaggacttactgacttctcccatttttgaatcacgataatattatttcgtttcaaaatttttcacggtggaaggaatgatactcggagtccacgacggccacgacgctggggctgttctgatagacggcgagaggatattcgcggttaacgaggagaggctgaaccgcgttaaaaagtaccgcggctttcctgagctgagcattaggaaagtccttgagatggccggcgccagtccggaggacgttgaggtcatagccgttgccggaatattccggaagcagagccgtttaattgagcttgaggagaatctaaaggcaatctttggtaaagacttcaagaggaaagtcctcttcgtcgagcaccatctggcccactctgcttcagcatactacacctccggctggagggatgcaatagccctgagcatagacgcggctggcgacgggcttagctcgtccatctacgtcgcgagagacggcgagatgataaggatagcccagagcacgtatctcgactcactcggcgacttctatgcatctgtaaccgaactgcttggcttcaagccgatgaggcacgagggtaaggtgatgagcctagcggcctacgggaagcccacctacgatttaagctcgataatcgagctcaacggcctgaccttcgagaaccacctcaaggttgttggcatcgaggcgacgagaaggctcgcggagctgttcaagtacccgctgaagcacgcgaaggagatagcgatgcagatgaagcgcgggaagctcgacggcaagctccagaagaaggcaatagaaatagcggccagcgcccaggctcaccttgagaagctcgttgaggagctcggcctcaggctcaaaggctactcccttccggtggcctacgctggaggagttgctcagaacgtcaaggccaacgctgttttaaggcacgtttttggagacgaaaacatctgggtctttccagctatggacgacggcggcctggcctttggggctgctattttcgtcaaggcccaactggagaggctcgatggaaagtggaggccgttcaggctggaacacgtctatctcgggcctgagtactctgatgaagacatcgagagcaccctcagggaagaaggcgtccaatacgaggagataagcgacgtcccgggtttcgtcgccgatgccctctttgatggcaagctcgtcggacttttccaggggaggatggagtacgggccgagggctttgggcaaccgctcaatcttagcggacccgagggatgaaagcgtgaaggaaaagcttaacgtcgccctgaagagggacgtcttccagccattcgcgccttcaatgctctgggagaaggcagaggaatatctcgaagacctgaacggaaggcccaacgagttcatgacgatgagctacaccgcgagcgaggagtttaggggtgtggctcccgccgttgttcacgttgacgggacgacaagaccgcaggctgtgaggaaagaaatcaacgaattgtactattcaacaattgctgaattccataaaaaagcgggaatcggtgcggtgctcaacacgagcttcaacatgcacggggagccgatagtctgttcgcctgccgatgctgtgaagacgtttagagaggccaagcttgatgtccttgtcatcggcaaattcgtcgtatcgcgctgagaagctttgtttttgatcgttctcctttttcgtgggtttttattgaaaataggcctgtgtcgaaggttggaaagtctttagtaacgtttggttattatcaaacaaaaagttacattttatcccgatttatatgacgaaattttttcgaagttttgaacgatgatacttgagaagtccttttatatattatcccaatggcaattgagtgttttatcgtaagaaggcgttagagtggaataattcgagtttaatgcccttaaaatgcccgggaggtcttctgaacattgttgtgcatgctttcaacggaaggaggagaaaccttttctgcttgaaaaatccgcccacaactcctagattgggggcttttgagggcttttcaaagtaccctttgcggaaaagcttataagattggagcgttcttagtagtttgtagggcgaaaggaggaaaaaaccgccctgttgcaataagactctaagagaattgaaactcaaccttgagagccacgacgcgattatgagcaagacctagttgcaataagactctaagagaattgaaacccgtagatcatgctcgcgccgaagtcggggaagactggttgcaataagactctaagagaattgaaacgtaaacctatgccacagcccttatctgggccacagttgcaataagactctaagagaattgaaaccccgcttctggctcaggctcaacatctagccttggctcaggttgcaataagactctaagagaattgaaaccaagcttgccgtctgcatttctctccacgacagagacctgttgcaataagactctaagagaattgaaactatagggaaatatagggaaaatccgggaaattcggggagttgcaataagactctaagagaattgaaacaactatcggcgtaatctgggcttttcggcgggtcaatagttgcaataagactctaagagaattgaaactcgtcaagcccatcgctgatgaggccttcgagcaagaagttgcaataagactctaagagaattgaaacaaaaaggtgggtggtgggtgacggtggtgggtgttgcgcaagttgcaataagactctaagagaattgaaacgggagaaccacccgccttgaccttcttttgatctctaacgttgcaataagactctaagagaattgaaacgggcctgggaggaattgcccacaatcaaaagcccggacgttgcaataagactctaagagaattgaaacgactttggggagtggtgaggggcagccctgagtgagggcgttgcaataagactctaagagaattgaaactccacgcgcgccgtgctggatgttatcaaggagagggttgcaataagactctaagagaattgaaacggtcttcgcccagttctttaatggctgtccccacgtcgttgcaataagactctaagagaattgaaacctcacgaggcggccgcactacccaactatgctacgcgttgcaataagactctaagagaattgaaacaactacaagtggggcggtgttgatgcgttcttcgtgctgttgcaataagactctaagagaattgaaacggtcgcgacctatgacgttcaggtgaacccggccatgttgcaataagactctaagagaattgaaacagttttccatgaatgccctctttcctgaagacttcaaagttgcaataagactctaagagaattgaaataggatttctgcaattttctggagggccttccagcgcgttgcaataagactctaagagaattgaaattccgcagagccattggcatgggcttcctcgacgaggagttgcaataagactctaagagaattgaaataccgacgtcgacgtgaaagtcaaggtgtggaaagtttgttgcaataagactctaagagaattgaaatagagccggctctctgaacgcctttacgattttctcaccgttgcaataagactctaagagaattgaaacttggccgcgtcaacttcgaggctctcgacctggcttgttgcaataagactttaggagaattaaaatgaaccagatcccaactaaatactatttagttgtgagttttagttgcgaattgagaccaaaccgctcaaaggatgtgggtgttcttgaattttaatgagcattttaatactttgatgtctattttttcattgaggtaacgttataaacatcgctgagaagggagagcggtgatggtaatggcgctgagcgacaggcttgacctcgttaacccttctgagattaggaagcttttcgacctcgccgctgggatgcaggatgttatctcactcggcatcggtgagcccgattttgacacccctgagcatatcaaaggatacgcaaaagaggccctcgacaaagggtatacccactacggtccgaacgcgggccttccaatgctaagggaggccgttgccaaaaaactcaaggagcagaacggcatagaggccgatccaaaaactgaagttatgatcctaaccggagccaaccaggcgttcctcatgggtctggcaacgtttcttaaggatggtgaggaagtcctcattccctctccaatgttcgtgagctacgcccctgcggtcattctggcaggaggaaagcccgttgaggttccaacctacgaggaaaacgagttcaggctttcagttgacgaccttgagaagcacgtcaccgacaaaacgagggcgctcatcataaacacccccagcaacccgaccggctccgttctgaccaagaaggacatcgaggagatagccgacttcgccgttgagcacgaccttatggtaattagcgatgaagtttacgagcacttcgtctacgatggtgtcaagaaccacagcatcgcttcgctcgacggcatgttcgagagaaccatcacggtaaacggcttctccaagacattcgccatgaccggctggcggctcggcttcgtcgccgctccagcttgggtaatcgagaagatgacgcgcttccagatgtacaactccacctgtccggtcaccttcgcccagtacgcggccgctaaggcccttgaagacccgaggagctggaaggccgtggaggagatgaggaaggagtacgacaggaggaggaacctcgtctggaagcgcttaaatgagatgggccttccgactgtaaaaccgaagggagcgttctacatcttcccgcgcatcagggatacaggtctcacagatcaccagttcagcgagcttatgctcaaggaggccagggttgcagtggttcccggctctgccttcgggaaagccggagaaggctacatcaggataagctacgccacggcctacgagaagcttgaagaagcgatggacaggatggaaaaagtcctgaaggagaaaaagctcgtttaaagctcccttagctcaatgtttttcacaactttttccttttcgtcgaagtctataacagcgtaataccccctgaagagcgggccggggttcactattatcgtttctccaagctcgtcaacgcttctcgcctcgtggatatgccccgtaacaacgagcggcggctggttcttctctatgaattccctgagagctgtgctcccgacgtggaggccggagtggactctgtcagctttagtgtccttcggaggagcgtgggagaggattatgtcccctggcctgtaattcttcctcaagatttccattatctcgtcctccgtgagctcccagatggtgttgaagggtgttatgttcgagccgcctactcctacaaagccggtgccgttcacttcctttctcttgttgtggagtgatatcccgagttcctccagcagttctggaacatccctgccgtcgcagtttccgtggacggccaagatgggaacgtcgagagccatgagcggctcaaggactgttctggcaacttccgctccgctgaagttcgttatgtccccggctatgaggataaggtctggcctttcttcctcgagaacccccgcgagcctcttcaccttttcgagctttccgtgaatgtcagtgaccgctactattctcattctgtcacctccgagggaattcagcgtttgcccttaagaagttttttcgacaaaaagcgatattgacttaagcgttcaccgaaaatcttataaggatcgggggccctcatttatcaggtgatacaatatggagaaggttaagtccgtgctcgagaggcgccttgaggttgtgaggaggagaaaggaagccgttctccgcgaggaggccaggctcataaggcttgcccgccagaagagggacgttgcaatggttcttgccaaggttaagaaggaaaagctcgcccttatggcagaagaagcaaaagtcctcagggcgctcaagcagagcgctcccgcagtctgatctctaacttttctgttccctactaatgcaaggaagccatcaaaagggtagaagagaaaagcgaggacttcagaagacgtttaccttgtcctcgaggatcatcttctgtatcttcgttatgttggccagccactcgtcggctatctcgtaggccggcttctggaggacgtcgattgagtagcccttcttcgggattatctgcacgctggcaacgagaggctcgtctatcggctttccaatctggctgaggattctaacgtagacctcctcaacgccctcgacctgctcggctatgtcgttcgctatgagcattgagaggatgttgtagatcttaccgacgtggctcaccgggttcttacccgccgctgcctccatgctcatgtgcctgttgggggtgatgaggccgttaaccctgttgccccttccgacggaaccgtcgtcgccggcctcggcgctagttcctgtgacggttatgtagtagatgccctccttcggatcatcggcggtgttcacgtagatgttggtcggcctctctgtgtgggactcgacgatccccttggcggcctcgtagatggcctccttcacggccatgtaatcgtcggggttgtcaacctcgctgtcaacgatggcagcggcgatggtgaggtctatctcgtctcccttcctgagacccataaccttgatgtcctcaccgacggcggggtacttcttcttgaactcgtcgctgttgaggtacttctcggtctcaaggacgatcttctcggtctcgctgagcggggcgtagccgacaccaaaggaggtgtcgttggcgagcgggattgggttctttttagccttgttgaagactccaacgaggtcaacgcttccctgtccgatgcgggagtctatgatgacgtggtgctcgaggtcgaggtgcctgacggccttcctgaggtagtcctttgcggccttaagtgctatctcatggacggggaagaactccctgtcaaccatctcgacggcccttccggagaggaggatgtagatcggcttgatgacctcaccgccgccgaactgcgggtaggcccttccgccgacaacctcgacctggtcggtgttgtggtggagaatgatgccgtacctcttcacgtactccctggagagcgccctgctgacggcctcggctataccgtcggctatgctgtcggggtgaccgatacccttcctctcaacgagctcaaccttctgcatctcaactggggtcctgacgagctcctcaacgactatgttcctgacctttccagccatgagcatcaccttctcttcgacttaatcagtgcagtggtcgggtctgtgcatcgtcttatatacttttcggcatgaatccaaaatgttcctattcctgcaggttatataattcgaaaacgttaaaatgccttccgaagaattttctacgacggtcccgcccggtggcccgtgtcccggagggggccgaggcccacagtgaagggatgagacgatgccgggcggacagggcccggtctccggaccgctggagggggtctctggccgtcaatgagagcgggggatcagccgggcccacaccgattggtttctgttaagcagtattgttttctgaaaggttattaagaccaaagagcagtttaactgggtggtatcatgggcgttaaggatcacaaggagaaggccccgcggaagtttaggtttgccgttataacggtcagcgacactgcgagcaggggagagaaagaggataagagcggaaagtttctggttgaggagcttgagaaggccggccacgagagggttctctacaaggttgtgccggatgagaagatggaaatcatcggggcggtcgttgatgcgttccgcgcgggagcggatgtggttgtaacatccggaggaacggggatatcgagcagagacgtgacaatagagagcctcagaccgctctttgacaaggagctttcgtttggagatatattcaggctcgtcagctacgaggagatagggaccgccgcgataatgacgagggccacaggagggataataaggagctcgggcagggcaatggcagtcttctgccttccgggaagccttggtgccgccaaaactggggtaaagctcatactggccgaggctggtcacgtgctaaagcacggtcgtgaatagttttaagggaaagcacacaagacataatgggtgaaaacatggagaaagtcgggagttcaaacatcaccacggctgaggagggcagtaagctcactttagccaaaaaacagaaaataaggaaattcaggggaatactcggtaaggcaagtgaggagactatactatgggcgattaaggaggctgaagagctttgagcgacttcctgtttctcgacaccagcgtcctcgttgagtacctcgtggacggtgaaaaggcaggaattgccgaggaaatactgttgggaccctgggcatttctaacgtctcccacagtctatagagaagccattggtgctctagctcttatcattgggagagaaaaattcggaataaagggaaaatacagcctgaggaagttcgtggctcgaaagggatgggggccattttccgatgtggtgacctctcttaacgggcttcttgatgagcttggggtcatcatagtccccgattcgttcaggcgggaagaactctatgataccatgaaagagtacaacctgatgccctccgatgcacaaatagtgcttgcctgccggaatcataacgttaagcacattgctacctttgactcggactttaaaagagtgaagtggcttaaaactctgggggtgtaaaaatgagggagttcaagaagctcacgccctataaagaggccctgggccttctcctcaacgatctgagcgagatccaagaagttgaggaagttcctctcgatgaggctcttgggagagtcctggccgaggacgtcgtatcgcccatagacagtccaccctttgacaggtctgccgttgatggctatgcactccgcgccgaggatacgtttcaggcgagggagtacagcccggtggagctcagggtaatagacgaaattcccgccggcggagagagtaaaaagaccgttgagcccggaactgcagttaagctcctgaccggggccaagatcccggagggagcaaacgccgttctgatgcaggagatggccgagcgcgagggggacgttataagggttctccgccccgttgctcccggtcagaacgttgcaatgaagggtgaggacgtcagaaagggacaggttgtccttaaaaagggccagattctaaggcctcaggacctggcaatcctcaaaagcataggcttcaagactgttcgagtcaggagaaagcccagggttggtataatagttacaggaagcgagctcatcgaggagtttgatgaagaagccctgaaccatggaaagatacttgagagcaactcggttatgctgaaaggcctagtcaggcagtactttggggagccgaggttctatggggtaattccggatgacgaggagaaaatcggagaggcaataaggaaagcacgctccgagaacgacctcgtccttgtcacgggcggctcagctttcggcgatatggactttgcccaccgctttgtgaaccttctcttccacgggacgacgataaaaccaggaaggccaataggatacggggagagagtctttgtaatgagcggctatccggttgcggtcttcactcagttccacctctacgtcaagcacgcgcttgcgaagcttgtgggggcaagaaactacgaaacccgggtcagggcaaggcttaccgaaagggttccgagccagctcggccgctacgagttcgtcaaggtctggtacgaaaacggtacggcaagaccgataaagaagaagggcagtggcataataagctcgcttgtggagagcaacggatacataacgattccagaggacagcgagggttacctggagggagaagaggtggaggttgtgttgtactgagctctatttttcattcgtttatacactcactagaaaaagggataatatccacgagctccttgggcaggatcttccgcgcacttgctgttaattcctttaaacacctaataacttctttccgttctctttccttttcctcaagtattctccttagatagctttggtaatcttcggcaagccaggggacttcagttaatacgatctcttttgattttttctctgggttcatattcatacctagccttcagcattaataaccttttttattcataatttgcatactattgctgatggtctttaaaatctggaaagagtgtaactctctacgccatgacccagaattcattgagaatatggcccgccggtaactcccgccctcatcgaaggcgtacgccacccttgggcgggctaaccctggcgggccagaactgtgcccggcctgggtttcccgcggtcatcgtgctccgggacgcggaaggccctcccgcggggacctcgctgaggccgggctgttgcccccgcatcgccccccggttcattctccccggggtcctcgcgcaggggcattttattctccactgacaggtttataaattgatggtctgcaatcgcttccatcagcgggatatttttcgtcatattgccgaaaaattatttaaggagtttcacagattttcggccggtgatgaaaatgagtgacggacacgacggctataaaatcatccacgacggtattcatggtagcatgaaggtctctggagtcatcctcgacctcgtaaaaacaccagagttccagaggttaaggcagataaagcaactcgggcttgcgtacctcgtttatcccggtgccaatcactcgcgctttgaacactcgctcggagcctggcacctggccaaacgcctttctgaggaagttggtcttccaaaagaggagtctgaactacttcaggtgggtgcgctcctccacgacatcggccacgggccgctcagccacacctttgagggcatctacaagcactacgtgaaggagcgcgaccacatgcgcctcggtcaggacataatcctcggcaacatcaacataacgggcgacgaagatggggggagaatacccgaaatacttgagaaacacgggatagacccaaaggccgtcgccgacataattctcggccgctctgagaagccctatctcggccagatgctccacgggggcgtcgatgttgaccagctcgactacctggtaagggatgcccactacaccggcgtcgcccacggtataatagacctggaaagactcctcaaggttatgaagattcacgatggtcagctcgttgttgacgagaaaggcatcgaggcagttgagggaatgatggttgccagggcgctcatgtactcaagggtctacttccaccacacggttaagatagcggaaggaatgcttacgagggcccttgagttcgccctcgacgaggggcatttatgggacttctggcggatgacagactgcagggttctggtggaacttgaagaccttgagggcctccctgcggagctcacaaaacgtgttctccacagaaagctctacaaggcggccgttttgataacggccgaggaacttagcactgaagagaagcgggagcttctcaacgcctacagaaacgtcaagaagaggcaggagatcgaaaggaacctggcggatgccgtcggagcgagtgagggcgaggttatcctggagttcagcatcgcagacctcatgctgagcgagccgaggctcaaggaaactgggataaacgttctccttgataacggcgaaattcagcccctgacgaaggtaacgcctctggcgaatgcactcaagaggaggcagactcccaggtgggcggtcatgatagcttcgcccgagaagtacgtggacagactgagggaagtctggagaagggttatcttcagctgaagagcttttcctttatctccttcttcagcttgtcgatgagttctataagctcatctgcgtctttaacttcctcaaggctctccttggggatgagcggaacttctgaaacgacttcagccttagtcttctccagtatgaaaacgcccccgctgttaactattctgccgacctccgccaccatctcggcgcgttttatggtggagcgtgtcttcctttcatctatacccgtgagaaggcgtatgtcgtcttcagttgaaatcgcgttgaagggcgctttcttcaccttcacaaggcccaggccgagtttcttgagcctctcaaagacctcgcgctcgagcggcgtttcaggcttaacgttgaggtcggcttcaactttggccctcaggatgtctatcggctccgcgagggcctcatcaaatatctcttcaagctggatggcaacatcaagcgaaactgcctgttcgccgcgctcgtagttgagcaggctctttctagacacgccgagcagctgtgccagttcatttacagaatagccgtgcttttccctgagttctctcaacagctctccgtttatcctgacgtacagaccaccgcgctccgcgaaaacagcgggcagttcgttgttcaggagagcatcgtagagggtctcggggcggagggcataaattccaaagcgctcgtacaccacaccctcttcaagctcgccgctcttgctccttagcccaacaataagcggagaagccttgaagaacttggcgaggcgctttaagtcctccgcctgctcttctgttatcgtgtcgatgttcacggtagcctttataaaaagcaggagaaagagcctgctcgccactaggtcaaagcacgaccctttaaggtctaacctggcaacgcggtaccctgcgcctctaagtatcgcttcaacggtctttatgagcctctccctttccatcgtttttaaatacccataacaccttaataaatttaaggtgtggtcgatgcgtcccgtggtggtaaagggaaaactggtctcgctggctgtcccaaccaaagacgatgtgaggagggcctggctctggtacaacgaccgcgatgtgaggaggtttttaagcgatccggatgggctgttcttttttgaggacgagcttgagtggtacgaggctatgcggagaggaaagcgcgaaaacagggtctttactgttttagaaaactcgtccaaaagcccggttggctttgtaggcctgcacaggataaaccacaaagacggtcacgccgagctgggatacttcatagcgaaggagtactggaacaggggctacgccaccgaggcggttggactggccctaaaatacgcctttgaatggctgaatctcagaaaggtctacgcccgggtctatgagccaaatacagcatcaatccgcgtcctggaaaagaacggcttcgagcttgtgggcaggatgaagaagcactcccacatacctggctacgggttcgtggatgagctgatattcgagaagttcagagaagaataagggaaagaagctcactcgagcttcttgtagcagaaccaccagtcgtagcactcgatctcgcccttggccttggcctcttcgcgctgcttgacctcgtcgacggtgctggcaggcgggacgatggccttatcgccgatgagctcgttgttcggccacttgtgcggaagggcgactcccttctcgtcgctgaccttgagggccttgacgagcctgaggatctcgtcccagtccctgccgacctcggccgggtagtagacgatggcccttatgatgcccttgtcgtcgacgatgaagacagccctagcggttatggtggcgccgctgggtatcatgccgagcttgtcggcgagctcaccgcggtcgtcggctatgaccgggaaggttatctcctcgccgaggttctccttgatccactccatccacttgatgtggctgaagacctggtcaacgctgagtccgatgggctcgacgccgagctccctgaactggtcaaccctcttctgcatggcgtagaactcggtcgtacagaccggggtgaagtcagccgggtggctgaacagcacgaaccacttgccctgctcggcgaagtagtccgggagctttatcacgccgtgggtggtcttgacctcaacctctgggaacttttctcctatgacgaccatcttacatcacctctttctttttgtgtgtcgtcttcactataaacctggttggttcgaatatataaagctttcggtttggtttcgggaacaaatttgacggaaagacaaatcaacgtgaacatctgttttataaacgtctaaatctggattcttagattgtcataattggtcagttctacctagattgtgggcataatttcaaaaaatgtggccattgatagacctcaacatccattcatttggaggattgctttagagaataaaaactggagcaacttaaaaggacttactttagaggaatatccttactcttcgtgcggcctctctctcaacgagggctcgcccaataacggtggggataatggccatatctccggccataaacggcccatactctttcatgtccgggccaagaacggctgggaggtctatctggataatgtaagcttcctttggaacctccttggacctgtactctgcctcggcttcgctctcttcctgcggttggacttcctctgaaatttccgggagctcttccctctcgataaatgctcttatgacgttgaagagcctcttttcctcggctgtcatctccgcgattttaccctcgactgcgagatcaactatcttatggagtctgagcttgatgatctccttcatgagggactccgctatcttgagctgggcgaggtaaagcctttcctcgacgtcttctccgcgttccctggagctctctgcgcttagctttagggcctttatcaggctgtcgaactcaacgtagaagtcttcgtcaagttcgtttaaatccgtacttgagagctctgcctccaggagttccctgagcttcactatatccacgttcccacctcaaaaaagagttgagggaggtcactcctcaacgcgcggagcgagcaggaaggtcagtctgccctcgtctctgatcatgtactccatctggagcggcatctcgttgccgaagcggaggataacttcgtcggccttcccgatgcccttgaccatgtcgctgaggtatcttatgccgtaggcactcttggtctcttcctcgacttcaaggtcgagaaggccctcgtcctcaagggtaagccttatctcgacctcgttggtctcgccctcggccttcattgtgaactcgttctcctttgctatgaacttgatggcgtcgctgacgagggaagcgtcctttatgccctccttgagaacctcaccgaggaggactaccttagccgtgaacgggagctcgggaagctccagctcaagctcttccacatctatcagagggagcctgaatgtcctcttggcggttccctcaaaagttatctcaaggaagttctcgtcgcccttcctgagtatgagggtgtctttcgccttgccgcgcttgaggattttcttgaactggtccatgttgatgccgattgtctcgggctcttcgacctcgtacttggagaagatgctttcgggcaggttgaggtcaatgagaacgaccctgctcgggtccattgcgcgcatgcttatgccttcctcagtgaacttaaaggcggcctcgtcgatgaggttgcttgcggtcgctatcaggtctgcaaactccttggccccgtcaaaaacaacttcgaacggcatttttatccctcctttttagctgactctaatatctgaagcatgagcctaaccctttcttttccacggaataaataagtctttccattgtccgtgtcgggtaagcggaggtaggcctcctcaagctccttgagggccttctgggcgagctttctcagggtttcaagctcgacctcgttcactcgtaggccctccaggtatagccgcacttggtacacttgtagaagatcgtgctcggctcgtctccagccctcgtctgcatttcccaccagtaagctgtgtcgttgccgcacttggggcatgtgacctttgtcgtgggcagggtcttgaggtcctgctccaccactatgatctcctcgtccggcttgtgctcgactttcttggtgatcttcgttttctctctgtctttctcctcgtcgaagggctcttcatagccacatgagcggcagacccagaccttcctcttcctgtctgggagcatcaggttcccgcatttcggacagaacttcatctctcaccacccctttagccgagggttcggtatgttgaaagaggataaaaagttttgctccgattatgacagcagatcaaactccaagctggcgtttacacagccccttggccagccgcagatctccttaacaatcctgtatcttcccggtggcaggtcccggagtgaaggggcccctccgacggattcattttccagcagatacttcaaactgactttctgctcccaggactgaaagggcatgagccagtggagtaccgcaggaaagataaggccagttctaaccggggccaacgttccgttttctaagcggtagagatggtagccctctccgaatgagattggcgtcaacccaatgttgcatgtccttaaaactggctcttctccgggatgatagccactcttgtcaagccccacgtagaagtgaggtccggtaaggccccagacaaggagtattatgagggtgcaggccgcccctgtcttccccctcattgggatcacctgacaatctcaaactcggccgatagagttatttcgttactcctgctttcacatttgtctcgatcaatgagaactgttttctctattttgtatctacatggcggaagtggtttgagctttccgaaggctccgtcagggacgcgtatgaccaagggcacggtttgcgtccagttgccgcccggcggtatctgccacccgatacttgtgaacgtgaaaccagtttctatctctttccagcttccgttttccagcaggtataatctgtaaggtgcgcccactattatcgtctcgctccccgtgttggttatggtcagggtaaggttgtctcaaactttgtatgcctccttttcgaggtccataacggcagtcccggccgtacaggctgcattgttctcggttatctcgcggtttttgcaaagttccacgtaaaaaacgccggaaaggagaagaaaaacaacgatgaacactaggggccacttcatcggactcatccctttacctcgaactccgcactgacctcgtagctggcagcgttttcagtcccctgtgaagttagaatgactttcttgacgatcttgtagtgtcccggggaaagcttcagatccgcgagattgaccttctgctcccagctctttccaggttctatcgaaacggcgatctctatgaacatgaggttaacgggaacttcctcccactctccgttttcttctcggtagagcctgaagtggtagctggtagttgcctttgtctcgccctcgttgataagcctgataatcatggtatcggaaggactgtaggtggacttgtcaagctccattttgacgaacttcgcgtggctgtcctgcggcgaaccgctggcctctttcccatcccagctgagggctccgtatcctgctacaaccaaaacaacaactgctatccctatcacaagcgccttcctcattgatttcaccagaggtttttgaacttccagaataataatcctttcgttcacttcaaggagtttcgaaacgtttggtaatttgaaccactggatttgagccccttattttatcccgtttcgggggaagttagcggtaccgggggcgcgtggctaatgaaggtgtggtaccgctggaaagggctagaaaaggttgtttataacgttttcttcaaaaaaatccagcaagaaggctttccacctggatacgattgaaattagaaataaaaatgtggaaaagttccaatttactccctgagcctgagcgggagcccgtggtcgaaggagtagtaaaccttctggtactcggcgcggaagccgtagacgtctctcctgaccttggcagggtcttccttgtctatgaggacgcgcctgatgaaccttgctatctccttcatctcatcctccatcattccaaccctggtcatctcctggactccaatcctaaggccgctcggctcgttgaccttctcaagcgggtcccacgggaggaggttcttgttgaggattatgccggcctcttcaagcagcggggccgcccatcctccagctgcagggtggaggtctgaaacgtcaacgatgacctggtggctctcggtgtagcccttgtcctcgccgatgaccttgaagccttcctccgccagggcttcggcaagggccttggcgttcttgactatctgggccgcgtacttctcaccgtactcgagcatctcggcggcggtgattaccttacccgccatgtggtggaggtggtggttgctgaggacacccgggaagatggcccactggagcttggctatctcttccgtctcgccgaagcgcttgtaaatgatgacaccgccctgcggcccagggaaggtcttgtgagttgaggccgtgattatgtcggctccctcgcggagcgggtcctggaactgctttccagctatgagaccgaggacgtgggcaccgtcgtacatgacgtaggcgccaacctctttggcgaccggagcgagctccttgacagggtgcgggaacgggaagagcgaaccgccgaagacgactatcttgggttcgacctcgcggatgagcttctcggccttgtcgacatcgatgttgaactcctcgttgtcgaagggccaggtgtggacttcaagacccctcattccggcggcaccgaagggcatgtggcttatgtgtccgccgtggctggtgtgaagaactatcgccttgtcgcccggctgggtgagcccgaagaagaccgcctggttggcgtttgttccagaaatcggtctcaggtcggcgaagtcgcttccgaagagcttggtgaagagctcaacaccgatgagctcaacctcgtcaacgtacttgcagccctgatagtacctctgcttcggccagccctcggcgtacttgtgcataaaacctgaggcaacggccctggtaacgctcggagaagtcacgttttcgctcgcgatgaggtttatcgtgtgcttcctccagttctcgtggtcttcaataaagccaagaaccttgtctctgtactctctatatccttcagccattgggaacacctcgatggttgtttgaacgggggggatataaattttacctaaagtgtgcatgtgtcctgagatgtacattagggttcgcagaaatttttgaggtgtaagggccgttttcatcatttttcttcatagtatatggcacactatacccaagcctttgaaaactctaaggagcttattcaatcgccctcaaggtcttcggccctgtaccttcccctgttctcgaagaccccaacggggttgttcttgaggtcatagacgtagacgttctcaaacttgactagggcaaagcgctccattatgtcgccgattatcttagaatacgctatggcgctctcgcctgttatattgtactcggcgtggctctcgaagttgagccagaccttgagagtatcttccgtgacctccaagccggcgacgacacccgagtcgaggatgtctcccccggttattgggtcagttatctttgcaagctcctccagaacggccctgtagtgttcgggccactcacggtcgggcatgtaaactttcattttcctcccacctaagtgggattttgtttgaacagttataagccttcctgggcagttctggtcaattctcttaaagaactaagctttttcatttgatagctctgtagttttcgacataaatttaaaaaaagcttaaatacttggcgttaaaatatgccatgggtgttgaagtgggcgagggtcgaacagttctattaaacggaaaggagttcatgcttatcgggactgttataacaatgataagcggtctttttggggtaataggcctcccgatttttatcgttggagggctcctgtacgccgctgggctgtacttctggagcattgatgttgactcaagaccattgctactcttcgtgggggagactgctttgatagccgcaggtgccttggtgctcaatatgctggtgtatcgtatggaactctcgccggtcttggggttcaaaactctcgtcttatcactcttggtgctttaccccttcatagtagcctccgccgttctctatcggatcagaatgggcctttttgccgaagaaactggggaactcaatttcaaccttgcgggtaacttggctctcatcggcgctcttctgctccccctacttatcggaatccccctatacaacatagggaagctcgttgagttcttcagcctctggaaagttcccctggtaggcactagaaccgagggtttaccctttgtctcactgaaaaaaatagcaggaatagccctcgtcacgctggtgcttggaggaacgctctattatttcatcaagcccgattacgactttgagatcataaagaaagatcaaaaagttgcactctatggaaacttttatgaccatggcatagaacttgagcttgtgtatgtccctagaacgtgtggagacgtgaaatacaaacctagaccagacggaagccttcttctcgtggattcaagacatccatgcaacgttaaaatctacgttgatggacgagaaatatattccccagattatcagattcaggagataaagggagtactagaaaacctgttttacactcacggtgttgtttcgataaagaagacgtttttggcaccgaaaaatgccagtactgtcgttgtatcctttgaaggtgagaacgtaaccttccagattccaagacatggataaagataaaaacggaaaagatcactcaagtgtgacctcgttctcccagaggccgtggatgttgcagtagctgagcgcgtagagcttgcccttcttctgtgtcctgaagaagaataccgccctcggctcggtgagcgggtcggtgtggttgctgaactcaaccttaccgacgagtatcgggaaggctccatcctccgggtggaaccagagctgtatccaagctatgtggtgctcgggggtgttcgggtgcggtatctcctttccaacagagacctcgaccttgacgaggtcgccctccttctcgtactctataacggggacgtgcttctcacccttccagtctccactctttatggtctggctaagcatcttccatcacctcactcaatcttctcaaacatatccttgggagcgccacagagcgggcagacccagtcatccggaaggtcttcgaacttggttcccggggctatcccgctgtcggggtcgccctcatcctcatcgtagatgtatccacagactatgcacttccacttcgccattttctttcaccgctttaatgttattagtcataccttataaggtttgcgtctcaaacctgtgaaaaggaaaatcgaaagattcactcgaacaccacgaacttgtccctcggggcgccgcagacggggcagtactcgggggcctcatcaacggccgtgtagccgcagaccgggcagatgtagaccctctttatctcgatgtcctctcccttctcggccttctccttggccttcttgtagagctctgcgtgtatcttctcagcctcaagggcgtagtgggtcgtcctcaccgcgtccttctcctcctggaactcggcggagttcttgtaaacaggatacatctcctctacctcgaaggtctcgccctctattcccatctgcaggttctcgggagtcttcccaagcttgccgagggctatgaagtggttcttagcgtggacgaactcggcatgagctatagccctgaagagcttggctatgttgtgaagtccttccctctcggcctgctcggcgaagataaggtacctcatgtgggccatgctttcgcctgcgaaagcatcctccaaaaacttccgggtcatttccctcttcactaccattggcagacacctgaaaaagtcgtcacaacaaatttgtactttgatgtataaaaatattgcgtaattgtcgagtttagttttattgacgctctgtttttacactgcctcaaaacttcccgaaccgccgttagaggggagcagtggaaaaagataaaacctacgcaggcaaccctttcaggtgatcaaatgagcatgaaagttgcaggcttccttctgatttttctgctcatggtagcttcagccggatgcgtaggccagaactcaagtacagcacaaacaggctctcagggcccaccaacctcttccgccgaaaaaggggctggatctgacataactcagggtgaccaaaccagtcaaacatcctcaacacaatctcaaactaccagttcttcctcttccgaaacatctaccacacccaggggcacatcaacaaaaacagaatccagggagataacagttaccttcatcgtctcggttccaggttacacccccgaagacgatgcagtttacatagcgggcgacttcaacggctggaacccaggagacgaaaactacaggctcacgaagctccccgacggcaggtgggcaataaacctgacgttcccctacggaaaggtcatcgagtttaagttcacccgtggctcgtgggagaccgttgaaaaaggcccaaacggggaggaaatccccaacaggcagtttgtattcaaagatagcgggacttacgagttcaccgtttaccactggcgcgactacgtcgaggaggtcggagtgggcgaacacacgataacgggcaacgtaacgaccttcaagatggtcatcccccagctcaaccggacgaggaggatatggatctacctgcccccggactacgggactaccaacaggagctatccagtcctctacatgttcgacgggcagaacctcttcgacagcgcaacttccttcgcgggcgagtggggtgttgacgaggcccttgaaaagctctacaccgagaggggattctcgataatagtggttggaatcgacaacggtggggacaaaaggatagacgagtatgccccctgggtgaacgaggagtacggaaggggcggcgagggcgacgccatggtgcgcttcatagtcgagacgctaaagccctacatagactcccactaccgcacagttcccaacgaaacgggaataatgggctcttccctcggcgggctgatggcagtctatgcaggctttgcatatccggaggtcttccgctacgttggagccatgagctcggcgttctggttcaatcctgagatatacgacttcgtcaggaacgcagagaaagggcccgagaaaatctacatcgactggggcactatggaggggagcgatccaggagcgttctccaggagcaacgaggagatggtgagcatcctgaaggagaagggctatgttgaaggagtgaacctcaaggtcgtgatagacgagggcgcccagcacaacgagtactactggggcaagaggttcccagatgccgtcctgtggctctttgaggggtgacttcccgaccgctttattttttaaccgcggttccaattctaacccatgtccctctttgaagtcctcaaacccctgaagtcagagatcgcgagagtccacgtttttcctccgagagaaggtgagtttggagaattcgcgttcaaaaacccagaaataaacgccctcgttgaggagctgggcttttctctctaccgtcaccaggttgaggccctggaaaagctctacgctggaaaaaatatcgtcgttacaacgccaacggccagcgggaagagcgaaatcttccgcctggctatcttcgactcctacctcctagatccgcggaagacctacctcctcgtttaccccacgcgggcgctcataaacaaccagctcgagaagttccagagggcgaacctttcattctaccgcataactggaaagctcgtacctgcgaagattctaacgggggacgtcccttgggaagagagaagaaggctcctccgcgagaggccgagggtggtcttcactaccccggacatgctccactacaacatcctacgaagatggagagagtacgagtggctcctcaggaaccttcgatacctcgtcgtcgatgagctccacgtctaccgcggggtctttgggagcaatgccgcgtggctcttcaggcgtctgtccttcaggctcaagcgccttggagtgaagccgcagataatagccctctccgccacgctgaggaacccaaaggagttcgcggagaagctctttagaacggagtttgagccaataacccatgcaaccaatccgttcccgcggaggtatctcgttctctttgagccgaagaaccttggcgataaacagctcctaagggccgtaatcgagaggctcgtgagtaagaggataaagaccctcgtctttttcgacagcaggaagggcaccgagaagaccctacgcttcctcctcaactctccggtcttttcaaaggtgaccacctacaagggcaccctgccgaagaacgtccgatgggaagttgagagggacttcagggatgggaaattgcttgccctcctgactacgaacgccctcgaactcgggatagacataggtgacctcgatgccgtgataaactacggcattccccctgacgggctgttctccctcatccagcgctttgggagggctggaaggagcgccgacagggaagccctgaacggcgttgttttgaggaagaacggcctcgattactactaccgcgagcacttcaatgagctcgtcgagaggcttgagaagggcatcatcgagtacatgccggtcaagaccgacaacgagcgcatagcggagaagcacctccactacctcctcaccgagcttggaatagttgactgggacgagctggacgagttcgagaggagaatagccgaaaagctcgtggtcgagaggaaggccgacctcaagaagaacccgctgacagggaagcttgaggtcagggttagaagaccggccttcgagtactcctcgctgagaactgccagtgacgagagcttcttcctcgtgaaggacgagccgtggataagggcgaagctgatggaaaagtcctctctccgagagctcctaaacttcataaactggctcaagatgaagggccacatcattgaagaagtcgatgaggacgaataccaccgctcgctcttacccggaatggcctacttctcaaggggagagctctacatggcgatggagcggctcagcatcggaaagttccacttcgtatttgcgaagcaactaaaccgcctctgggacgttgagaccttcgcgaggaagctggaagaagtcgagatactggaagagagggcaaagaaggcctacaaaggcgtggagataggtctcggaaggctccgcgtcaggcacgtctacaccggcttcgccgtgaaggggctcgatactggaaactacgtggaggaactggtacggctgaaggaagctggcatactcaaaggcgaaatctcctctccagcgacgggcgagagagttgagacggaggaagacttctcgatactcaactgggagaagttcgcgaaagtggaattcgaggagccctacgtcagggagttcgagaccgaaggaatatggctcgtcttcccggaggagatacgagaactaacggaagaggagttcagggagttctttggcagggcgaccgagaaggggtttgaggatttggcgttccagatatacgagagccttgatagaagaaagctcttcccgctctacctcggtgccacgagcttcataataaggaaggcaataggtgatgccctccagaaggctgggattcagaatgaggaactcgccttcgccgtgaagaagatggtggacagcaaggacggaattggaagcgcgctccacgcgatagagcacaacatgataaagatagcgccgatattcacctacgtggacagcagggagctcggcggctacagctacgagagctttccggggacgccctattttggaaagccggtcgttttcatctacgacggcaacgagggcggcgctggtctagccgggataatctacgagaacgccgagaagctgatggaaaagagccttgagcacctgaaatcgtgtaaatgccaggatggctgtcccgtctgcgttctctcgccgaagtgcggaaccttcaacgagtttctggacaagtgggccgcaataaaggtttgggagaggattttgaagggaaataaagcggatgcacaagacccgttttgaccttactccccattcggtaaatttttaaacttgactctagagaaagattccatgcaaccggagaaccccgcagaatcggccgaacactttattagatcgggaatgttcgatgaggctcatgagttcttcaaaaccctgccggaggatacgctgaacggagagctgaaatggtatgtggttaaaaccgtggagcacttcgccaagactggagaccttgaaaaggccctgggagtggcttacctcctcgatggcgaaggcttcgaatgggcggtttacagggcgttttgggtctacctctgggaagatgagagcgccgagagggcaaaaaaggcctttgagcttcattacttcattcctgatcccgataataaggctgaaatcttggggcggatcgcgggagttctggggcgtaaggagcccgaactggcaagaatagctctcagactcgggatcgagtggacgaggaggatccacaaacggacctaccgctacgatgccttcgagtggctttactggaaggcggaggatttagaggactgggagtctgtcaggaggatatgcgaactcctcgacgaggggggaagacgtgagctcgtagctgatgtgcttgacctgaaggagggagagcccgtccccgactgcgaggagttcattgagatcagaaaacgtatgttggaagatttaaaaaatggagatccgctgaacgatcttatacatgcatacaaagagcacgaaagggagctcctgcgctccaggggtgttaacccctacctctacaagctcaaagccgtaaaaacggaagaaggtgttcagttctacgctgtgaggagaccgataacattggccatcctcctcttcctcctggacaaagctaggagagtgctatctaaacgctcctcataaacagcggcctcagcctaactcttccccttgtcctctcagttaaaagctccatcagcggctccgcttcccctttcctagtctctaccgtgaactttacaagctcgccgtactcctctcccacaaccctgccgccgttctcctctatcgtgctcctgactgtgtgaaagaggttgtagggaaaagtcacctcgaagcgctccgtttcatgcacctcaacgattcctgcgttctctattgccaagctcgccgcatcgctgtaggccttcaccagaccaccgtagccgagctttatcccgccgaagtagcgcgtaaccacgaccacaacgttgctcagccccttgttctggatgactttgagtacgggctttccggccgagccttttggctcgccgtcgtcgtcatatctgaccgcgaagttctttccgtcgttgatgagataggcagagacgttgtgcgtcgcgtcgctgtggtgtgcttttatcctcgctatgaactccttcgcctcctcctcagtgctggcaggcgaggcgtagcctatgaagacggacttcttgattattagctgggcagtgccgaggcccttcagcgtcttgtactccaaacgctatcacctcaccctctcagcgtcgcgatgagcttcttctcgtcgaggagcatcgctatggcatccctcacgtcggtgacaacgacgtcgctcgccaggagggcatcaacggtagccccttccttcccaatgacgcagaaagtaagctccgctccctccagcatagcaacgtcgttgtttccgttgccaactgctgcatagggagcgtagcccctagctatctcgaccttttcagaggcgtttgaggccctcgcgattcgtactggaagacctccaagctcttcttccagcgtgccaaaggtgtcagagcttatcacgacgacggtgtacttatccgccagcctctcaaggaggtgcttaacttcctcatcgactctcccgctctcccccagggtgccgttgaggtcgaaaataacagagtctatctggacttctccgtagttaggtatttccactttcattttacacaccgatggaagttcaagaagtgtcgctaaaaaacttcccgttcacgttttgagaataagcgataaaagataaaaccgggctaaagcatcttctctatctcgtcccagagcctctccgccagctcgcgcttggtcattctggggagtttctttgcgaagtcccttccgaccaggacaacctcgttctcctcgcttccaaaggccttgagggtgtttgctacaaccaggtcacttccagcgcgctcaatctgcttcctggcggcgctgatgagctcttcctcgctgagaccggtctcggccttgaaacccacgaggaaaaccccgggctggagttccttaacgcggtctattatcttcggcgtcggctcaagctcgagaacgagcggttgcccgctctttatcttcacgtccgctttgttcttcacccggaagtcgctgactgcagcggccaggacaacgacgtcgtactttttgcccttcagctcactctctatcgcttcaagcatctcctcgacggtctctacctctatctggttctccacgaagctcggaacgctgctcttggtacgtatgagcgttacctcggcgcccctgaactccgcctcttccgcaatcgccactcccatttttccgctgctcgcgttggttatgtagcggatcgggtcaatgtactcccttgtcgcacctgcggtgacgaggacgcgctttccttcgaggctcttgggatgaagcttcctgattacacggtaaactatttcctctattgaagcgacttttgccttgccctcctcaaagcgcggctctatgaactccactccaagcttcttcagcttctcgatgttttccttaactatcgggtggtcgtacatcgttgagtgcatggctggagctatcattatgggggtgtgggcaaaagccgttgtcacgaccgttgtaacgggagtatcgtcaattccgcaggctatctttgatatggtgttagctgtcgcagggcagacgagaacgagatcggctttgttctcgtgctctccagcaagttcaacgtgctcgatgaagccagtaatttcagtaactacagggtttcctgtcgcgaactccatggcatagggatgaattatcttcgtggcgttttcgctcattaccgcgtgaacctctgcgccgtgccttatcagctccctggccagcttaacgcattcaaccgccgctatgcttcctggaatagccagcacaatcttcttcccaacaagcttcctgctcttggtcgcgtagataagcttgacgtgatggagcatctgaatcaccgtaggtagttagaaaaaggggttaaagaccttgcctaaaacaaccagttaagcggaactaactccgagctgtcccgagggcgggttggctcgtaggtatattaaaagcatcccgttttccacggtacttttggccttctcagtgtccaggagtctgagcttgccaaccgtccttgagaacacggcgtccacgagctcctggggggcatctgccagcgtcccaactactattctgtcgggatagaacttgctgacgttgtagtagaggagcacgaacacgggataagtgccagaggagacctcaacactaaacagaaacgcctcgtgaatcagcttttcaccgattttttcttctactatggtaacttcgaggggaataccaacgaccctcgcaagtctaaggagaaactgctcaataacctcggcggagattaaaacccttattaccacggaattcgttctctttgagtagcgaacccactggagctttgcatcctcctcgatgatgaagtccatgacatcgttgaggagatcaaggggaacctcgaattcaagggacatcatttatgaccacccctgattatatggagtcttataaggccatcgtctttaggagtttattaagtttttgattaatgtccaaaaattagcactctaagtttctctaacggcgtcttcctcgaacttttcgatctcttccttagtgccgacccacaccactatgacgggttcgaccgttatcatcccatcctttatcataggttttatctcgcatatcgccttctctatcttatgccccctatccacgacctccacaaccactggaaggtccgttgaaagcctcataacgtcgcttgagtggacgcggctcttttttccaaagccgtagatgccgcgatagacagtagcccctgccatccccatttcacgaagcttttccactattgctttgtacaggggcttcccctcccagcggtcgttctcgccgatgtaaatcttgagacggagcgtgttccagtgctcaacttcgaccatgttttcacctccgggccagcataaagcccgcaaatactaacgcgattgtgattataacgtttgccaaaatgttgagggtcgctataaggtactcacgctcgcgcaggagcgagaaggtctcataggagaacgttgaaaaagtgctcaacgccccacagaagcccgttccgaaaaaggccctccaatcaggcggaacatcaaagccccagaacaggagtccgtagaggtatccgaggataaggctagctatgctgttcaccatcagggttccaaccgggaagtcccggtagacggggagcaggcccgagatgtagaaccttgcaactgctccaaacgcgcctcccagtgctatcgccatcgctattctgaggttcatggtacttcctcccgcacgttagtcctacacacaggagctttcgaaaggatggattgtttaaaagatttacagatatctcatcatggcatctaccactgcaagcgccctgtatgtgttctggaagtttgaaattccaagctcaagacttctcctgaagccgccgttggagttttgaagctggcggataaaccagatgtgcctcctcgggcaggttagggtctctccctggagctcaagcccccttgttgcgtagaacgtcggctcaagatagggtggcaggctgtacggaacctccgtaaagccgccccagtcgccgcagagctcacagttccggaagtgaggacttctgggtgggtggtaaccaagcgcgtagagggtgtagagggcctgataggtcatcgtcgttgtcggctgcttgacgccgaagccgtttctcatcctgaacctcatcacgaaggcccgtatcttctccctttccttttcgcttattggctgtccaattgccttgaaagccttaacgacccagtatgttgcctcaaggggcgtcgcagttccgaactcctcactgccgccaagaccaacggcaaacttatcttcgagggggttgtacttggtatagacgatgcccacgtgctccctcgcgatgtccttcgctccaagtatcgcaaggccttcgagggccattgctatggctacaacggccgtctggggctgaattgccctctcaaggaactctatcgtcttctccttctcagggactccgaggccgagcaggtcgtacatcttgactgcatagtaggtgtcgttcacgttggtgtcgttcaggacgctgacgaagcagtagccgccgtcttcgtgccttctcttctcgacgtactcaagtgctttgtgcacatcaacaaagcgtgcaaactcatcaagcttcgagcccattctaccgcctcctatggagtagaacaggcgtcatcagccctttcgagcggttcgggctcgaagccccgggcggacgccatcgcccgcgctgaattatatgaagtcgtttaaaaatttcacggttcgcccctaaaaactttataaggctcctcccaaaatcccctgggcagtaaaatggagtacataggcttcacatacgtctcgaacttcgtatccgaaagggttgaggaagctctcttcgaggcatacaacgacgtaaacaggctcttagaggagtggaggcttcctattcgcctcgtgtatttagacaagcttattctggagcccgggtacttaataacccttgaaacaccagaaggaaaggtcaggctgttcccgctagacgtcctggtggattttatggactaccggcttaaggtagaacttgaaaagaacgacgggctcaacatgaataagatattcgggataacaagctttcccctagcttccagggataagtactttggattctatgaaaaatttctgggattccaaacagagaggcttggcaggagagtaatgctcctctccatgcgcccatttgagtccgattccatgaggatggccctgaagatactcgataatcccctggccgatgatgacctaaggagcttagcggagagagtcctctctagagagcttcctgcgttcaagacgcggcttatcaagggcatgctccacgagattgggcactctttcgggctggaacactgtcccaacgactgtgtaatgaacccaccacagacgcttgaggagtgggactcaaggtttctgggctactgcgactcttgccgcaggaagcttgaacggaaccttttagcagataccaaggggaaagattaatttaagatgttgccataatctcttcttaggtggtatcatgcggctcccaggacagaaaaccaagataatagccaccctaggtcctgcgtctctcaacgaaaagaccataacggcaatggttcgagcggggatgagtgttgcaaggataaacttcgcccacggtgatctgaaacagcacgagaagtcgataaaactcgtgagaaaggtctctgagaggctcaacaggcccgttgcaattctcggagacctgcccggagtgaagatccgcgttggtgagattgagggcggctcagtgacgctgagacgctggcagacggtaacccttaccacgagggacgtaatcggcaacgaggccgttatacccgttgagttcaaggactttccaaggctcgtctcgaagggggacgtcatctatctcagcgacggtttcatagcgctaagggttgaagacgtcagggaccaggatgtcatctgtaaggtgctcgtcggaggaactctcttctcccgcaaaggaatcaacattcccaaggctcgcctggctatcgaagcaataaccgagaaggatttagaattcctggagttctctctggagcacggagttgacgccgtcggcataagcttcgtcggttccgcctacgacgttctaaaggcaaggcgattcgtcgaggaaaggaacggcaagctgttcctgatagccaaaatagaaaggcccgacgcggtgagaaacttcgacgagattctcagggcggcggacggggtcatggtagccaggggagacctcggagtggagatgcccatagaaaagctcccgattctccagaaaaagcttatccaaaaggcaaactgtgcgggaaagcccgtgataacagcgactcagatgctagagagcatgacccacgagaagctcccaacgagggctgaggtcaccgatgttgcgaacgcaatccttgatggaaccgacgccgtgatgctctccgaggagacggcggtcggaaagtacccggttgagaccgtcaaaatgatggccaggatagcgaagactaccgaggcatacagggactccaaatgggctgaaagaaccgtcgaatggaagatgagtgagttgaggggtacacggccgacaaagggtaccataaaggacgcaataacgaggagtataatagaggccctgaactccatagacattaaatacatactaacaccgaccaggatgggacaaactgcgaggctaatagcccgttttaagccaaagcagtgggtactggcatttgtaactgatgaatgggtcaaaaacactctgatgttctcctacggcgtttatccgttcctcgttgaggacaccagcgaagaggagatactgcgcgtgataaccgggctcggactggtagatgagggcgatacggtacttctgacgaagggaacgcccataggaaagaccgcggggacgaacaccatccgcatcttcaacgtttgatctcttcttttatcagtatttcagtctcgggttgtattcgaggagcatcagcccgttcttgaatatccttatagttccgctctccgagaggcttattgccatcgcgctggttatctttgttattccagcggctgctatgtgcctgcttcccagcccggggggaagcatcaggtctataaccctcggctctacctcaagataccttccagcggccactatcctgccgtcttccctgatgagaaaagctccgtccagctgggcgaactcctttattatttccttgctctccttgtccagcacgtttatcctgtgccctttgaacgggtttggaatgagctgtctcgaatgtttaagaaccctcctcgtgtcgcctatgacgaatatcgtccccacgggatttccctctctcccctctatactcagctctatcgcaatctccagcatcctttgaaggacgttctggttctgggcgaagaagctcttcatggcaacgattgacctctttattgtacgaacgccgatcaggttctccgttacgtagacaaatgagtcgccctctgacaggattccatgctcaagcagaaaagccgaaatgaggttgagaaggttgttgaggtcgaggttctggggaattgatatcctcttgacattatctttttcaacatcaaacgtagagccaactataacaacggtaatgccaacgtcagggatttcctcttcaggaagctcctccataatgaccaatgcctttgccccaattttctccgctacctttgttgcctcctctaaaagcactcttatgacttcgctcatctccctcaaccgaggatagtaacctgaaatagtataaaaatctgccggaaaagtttaaaacaagcgtccctagcgaacgttaggtgattggatgaaagtcattgtcgcaataacgggggcaagcggggccgtttatggtgtgaagctggtagaagttttgaaagagcttgggcatgaggttgttgttcttgcttcaaggacaggaatagcagtcacatatcacgagcttggaatcaagttaaagcccgactatgacgaaaaagacctattcgccccggtcgcgtcaggttctcatcctttcgatgccatggttgtcgccccctgctcaatgaagacgctctcggcgatagccaacggctatgccgacaacttaataacgagggcagccgatgtagccctcaaggaaaaacgaaaactgattctgctcgtcagagagactccactcaacatgattcatattgaaaacatgatgaaggccgccagggcgggggctgtgattatgcccgcatcccctggattttatacaagacctaaaactgtggatgatatgataaactttataattggcagaatcttagatattcttggaatacctcatgaattatacaaacgttgggggacgatccatggtacagctggacgaccttgatagggctatactcaagctgttaaaacaagatgcccgactaacgatatcagagctagcagagaggttaaatagaccggaatccacgatccactttagaatcaaaaagcttattgaaaaaggtgtaatcgataggtacacaataatccttggagagccgctgaagccaaaatccgtagttgcagtgtacattgagacggagattcccgtgatagaggacttccttgagaagtacatcaatcacatcacaaaaacactctcaatgctcccgaacgttctggcagttgcaaggagcggcagaaacggaattatagccctcatcggcggggaaacagaggagcagatagagaagttcgtcgacgatacgataagaacccttccgagcctcagaaaggtagaagtatttccgttcaccaacatcgtaaagggtgaagacgtcataggcttcctggtggacgtctgatggagattgaaataaagttcagagttgagtttgaagacatcaggagaaaaattgaagggcttggagcatcattcatcagggaagaagtccaggaagacctctatttttcccttcccctccccaacctcctccgcgttagaaaaatccccaaccttgggaaggcttttctgacgtataagtccatacaggatcctggcagaaacgaggagttcgacgagcttgaggtcgaggtctccgacttcgagactacagttgaaatactcaaaagactagggtttgaggaagacgtttggataaggaagaggaggctcgtttacaaacttgacgatgtgacattcgagctgagcgatgttgaaggattgggcgcttttctcgatatcgaagtcatgagtaaggacgttgaatacgccaaaagaaggatatgggagattgcagaaaagctcgggctcagtgagaaggacgttgaacccaggctctaccaggagctcctgaaggaaaagattcagacgagctccagctgataaaagctgattgaaaaaggggaaactgacccaaaacggcagctcacttcgccgttgccactatctttattatgtcgttgaactggagctcgtaatcatcaccaacgcgcctctttgttctcgcgttgacggcatagaggaaggtctttccaaggtcagtatgcaccttgtaggccaggtcttttggcgttgagcccttcgggagcaggtagacgtgcgggaggacgttcccaaactggtctgtgagcttgttttcgtcctggacgggatagacggggatcagcttgaggagctcaaaggtcgccctgtttattacctcctgcacacccgtcgaaccgaagcgctggagaaccttctcccttattagctcaagggccttctcctgttttggactcagttttttgagaaccttgaagtctgagcttccagggacatagtctataaagcccgccttggcggctttcctcagcgttagctcggccgccgccgaggtcgggattactatgtatcccctcttttcaccctctttcttcagcctctctagctgctcatcgcttgcggcatccgccttgttggctgctatgattatcggcttgttcacctttctgagctcgcggacgaagttgaacaggtcttcatcagtccacttcgttgggtcgtcgctgaggccgagcctgtgaatggcttcccacacgtcctcctcgctcacgctgattccggagaggtggtcggctatcgccccctcaagcttcatatgctggagctttatcctcttggcaaacttctcccagcccttcttgagtatcccgagtatccagtagtctatctccctctcaaggaactcgatgtcctcaaccgggtcgtggtagtccgttggctggccctctgcgtcggtctttccggtagcatcgacgacatggatcagcgctgacgccattctgagatcatcaagaaacttgtttccaaggccgcgcccctcgtgcgccccgggaacgagacccgcaacgtctatcatctttatcgggatcagcgcctttccatccttgtactcatagttctgggggttcggcgtgcatccgagttccttgcacgggtgctctgctatcgcataggtaaccccaacgttagcgtctatcgtcgtgaacggatagttagcgatgtccacatcaacgagagttgccgccgagaagaatgtggactttccaacgtttggctttccaacgaggcctatctccatgttctccaccaccagcccaaattcgccactggcttttaagtcctttcggccgaaaactataatttcttcttttactattctctaccaattgtccgtgccgttgaacggaggaagagaaatgaaaaaacaggaagagtctaagattactgcgatagcttactcaaaggacaaattcgttagcaggaaactctcaaacctagaagaggcccttggattccaagattatcgggttgtctggatcaacgttgacggtctttctttgggggagcagctaagggacgtttttaaaatccacgagaggcccataagggctcttcaaagacagacctcccgtgttagagtcttcgtgtttccagaatatctgtttctcatcgtccaccaggtttacgagagcgagggaggcttaaaaagggagagagtcggcatcatcctgagagacaacttcctgataacaattcaggagatacccggggacgtttttgaccccataagggaaggtatccgcgagggagagggccttttcagagaacagggggcggattaccttctctttgctctcctagaggcaatagtggagaactacgtcccgataattgaggccataagctccaaaatcgagggacttgagaacgagatactttcgagaagcgacacaagaacccttagaaagatacaccgcatacggcaggacatcctcttcatgcggagaactgtttttccgctccttgaggcgttcagacggctcgaaattgaggggtcaaggtttttcagtgaaggtacacggccttttcttgacgagctccacgaccatgttcgtgaggttctggaaatcctagagggccagcgtgagctcgccaacagcctgatagacctctactactccacgatctcgatgagaactaacgacataattagaatcctaacggttgtttcgacgatattcattccgctgacttttattacgggcctctacggcatgaactttaggtatatgcccgaactccagtggcgctacggttatcctgcagtcctaacaacgatgctcgtgatagcggtaggcatgctcctctactttagaagaaaggggtggatttagaagtcctcggcaccaagtgctagctttacagccctctcggctattacgtccatcgggtctatcagggggacgttcaagtcttccgacttcaggacgacacttacctccgtgcaaccggctattattccctcactcctcctctcaagtttcttcgcaacctttaagagaagctccctgccgagttcgaggtttccagccttaacgccttcatagatcgctttcatgacgagcccctgatcctttttgtttggcactgctatgtggatgcccctcttaaggagcgccctgtggtagaccattccctttatcgttccgtcggtggcaaggaggccaaccttcctgaggcccattgattcaatcttctttgcagtttcttctatcatgcttactagggggatgtttatcgccctctgaattgtctcggcgaagaagtgggcggtattgcagggcattattatgaagtccgcgccccagctttcgagtttctttgcgctggctataagttcgggcctcggatctgggccgtttccaaggataaaggccgttctgtcaggtatcttggggttgttgtagattattattctcgggtgatcctgatctctcctggctggcgtcctctcgactattcgcctgaagaggtctgccgttgccagcgggcccatcccaccgaggattccgattaccctctcgggcatattcccacccgctcattcaagccacactgagtcatcgccgtgatagttcagcttaacgacgaagagcctgaagggttcatctttttcgttgactacccagtgaacggtcttcggctttacaaggaagatgtctccaggtttcgcctggtattctgtatcacctatgcctaacctcgcctcgccgcttatgatgtaaaagagctcgtattggcgctcatggtaatgcttcttgacggtctgctttggcttgacttcaactatctgagcgtagctcccctcaggtagctcaccctcgaagagtgggagctttctataagtgcctctgtctatgaggtttttgatttcggccttcatattatctccacccctcccgtggtataattatctccagtattgaaaaaatcttcgctttcgaatttcatcgaaatgttcaatctacctcaaaagacttttatatctcgttgagaacccatactggacaaacatcaacggtgatggccatggaagagcttgagagggcccttaagtgggcggagaacaacctgaatgcggagtacatagagctccgctatgaagacctgagaaagacaacgctcggcctcaaggacggcgtttttaccagcttcactggaaagcttcacaggggcgtcgccataagggttctggctgacggagcgtggggttttgcttcaaccagtgacctcaccaacctcgagaagaagattgaggaagcctacaagctagccaaggccgcggcccagacgaagaaggagaagatagagctggcggagataaagcccgttgaggactttgtgaagagcaagatgaagatcaagccgagggaagttgacattgaggagaaggtctcccacctccgcgagctggagaagatcctcaaggaggacgaagccgtaaagagcgtccagatacgctacgaggacggtggcggtaaaaagctcctgctgaccaatgaagggacgaggatagagtgggactacaactacctctaccagggagcctacgtcacaggaaaggccgacggaaagctcgcgatggcgagggacagcatcggcgcggttgactacggctgggagctgatgactaagagggagccgaacgagaaggtcgccgagaggctcaagagaaagatgtggagccagctcaagggagttgctccaaagcgcggcgagtggcccatcgtggctggaccgatagtcgtcggcatcatagcccacgaggcccttggacatttagctgaggctgacctgacgataaactcgcccttcaaggacttaatcggcaagcagatagctccggagttcgtcacgatgagcgagaggattgttgagggcggctttggaaacgacaagtacgacgacgagggcgttcccgtcaaggacatccacatcattgagaacggaatcctcaaggagataatgctgaacagggaatacgcggccaaatggggcatggagccgaacggacacgcaagagcggagagctaccgctacccaccgataatcaggatgagaaacaccatcttcgagccaggcgaccactccttcgaggagctcatagaggacatcaagttcggttactacgtcgtcgacttccgcggtggacaggcccagctcaactcggccttccaggttggaatccaggagggctacgtcatcaggaacggtgagatagccgaaccgataagggacacctcgattacgggagtcgctatcgaggccctcaagaagatttcagcagttggcaaggacttcggccttgaagtagggttctgcggcaagggacagacggccttcgtaagctcgggcggcccgcacatgcgctttgatggaggaataatcattggttgaagtccgctttactgggcacgccgtagaagcgctcaggaaaagggaaatagctggggaggacgttatctcagcactccagaaccccgacataagggcagtggacatgctgacgggccatttcatagcagtgaagaaaaatggccgctggctggtcgttgtttatgatgcggcgcacgagggcattgaagtggtaacagtttacgaggtctcaagaaagactcaaatagagagacgcatcaaaaaaggtaggtgggtggaagtatgaaggtcaggtacgacccgcgcggggacatactttacattgaggtatccagcggaaaggccgctgagactgtggaaattgacgacgaccttttggtggattacgacgagaaaggaaacatcgtcggcatcgaaatatggcgtgcccgggaagttctcctcggggagatgtttaggaagataaaggagcttggtcttgatcttaagaccgcagaggtggagggttgaagtatggagaacctcatacgcttcggcgagaagttttttgacgagcttgagatagccgtttaccgctcaagggatatcgaggcctcggtggagctcaacgagatttcgatggcctcgacgagaagcggggctttgacgataatccgcgggataaaggacaagcgcctcgggctagcgatagtcgacagcgacgagccggagaaggtgaaggaggccatagaacaggcagcaaagatggcgaagctgaactcacccgacgagaagtgggtttccctgccggagccgggcaagtacagggaaaagccgaagccgaactacgagctcaaggaggcttctcctgatattctggtcgagaagcttgtcaaggggataaagctcgcccgcgagaaggacaagaacgccgtagtggctggaggagccggaggagtttcatgggaagagaggcacgtcctcaactcacacggtcttgacgtcttccaggaaggtggagcggcgtacatgtaccttgagattgttggaaggaagggaagcgtagttacaccaggaatcttcgacttcgacgcgcgcagagacctcaacctcgacgttgaggggatcgtggagagagccgtccagaaggtccagtgggcttacaacgtcgtcccaagcaagaatgaggaagttccgctaatattcggcccgtgggcgattgctgggctcttcagctacaccctcctcccggccttcagcggcgagcgccttgttaaggagaccacgccgctcgccggaaaggttggtgagaagatagcgagcgaggtcataacgctctatgacgacccgttccatccgctctccctcaggccaacaatagccgacgatgaaggcgtcccgactaggaagaacgtcctcattgaaaacggggccttcaaggggtttgtctgggacaactactgggcgaagatttacggcaccgagagcacaggaaacgggaagagggatataaggagcggcggaataaacataggcttccacagcgttgtcatcgagaacggaaagcgctcccttgaggacatcataggggagatagacaggggatacctcgtggacggcctccagggtgcgcattcgagcaacccggacaacggaaacttcgcggtaacggccaatccagcgttcctcatcgaggacggcgaagtgaagggttcagcggtcttcctcatagcgggcaacgtctacgagcttctccagcaggcaagcgaggtctcaaaagagcagactgtaatgcccttcatgaacaccatgataacgccgcacataaagttcgagaacgtgaagatagcgggcaagtgatcaccacagtgcccactcttcgagcgggacaactctgatgcttttttctccaatttttatgccctctgccgggtacctctcccaagtgaccagcgtcatcttttcaattcccgtttcattcgcggcgttcaccaatggggagagctcacgcttctcgtttccggggtggagctcccacgagacctgaataagctcctccccggggagtatgaagtccacctccctgccctcctgggtaacgtaatagaacaggtccctgttcggctcaaggccgcgctttaggagctccgtgaaaacgaggttctccagcaacctgctccagtctctcacgcccagcaccgcgagtagcccgttatccacgaaatacggcttgaagccaaggagctccctcttcttctccgacttcacgtacgccctgagcggaaacaccacgagggcgtcgttcaggtattcgaggtagttagcaagggtgggctttccaaccgctattcccaggcttttcatggtggaatgaagcttggttatcgttgcatggctcgaagaggccagaagcttgaagaggaagcggagcgccttgaggttgtctaccctccacctctcgaccacgtcccggtagatggtgacctccagtatttcccttaaaatttcccgcctcagctccggctggaggacggtctcaggatacgagccccattcgagacactcccgcagaacccctcgaattttcccccttgtctccaggcttggaagctccccttttagccccttgaccatgagaacctctggaagggagaaggggtaaaggtttagggtcactgcccttcccctgaggacagttgccacttctttagaaaggagctttgaggaggagcccgtcaccactaccctgtgtcccctgtcgaggaggtagcggacgaacttctcccagccctcgaccacctgcacctcatcgagcaggagggtgagctttgttcctttggggtggttcagaagggagtagtaaaccctgagcatctccatgaggtcactggaagttaccccaattaacctcgggtcttcaaagttcacgtaaagacttttcttcctctcgctgtcaatcgcatcccacagctgaaagaggaagtatgtttttcccgccctcctcggtccgacaaccgccagggctcggctttttggaaaaataaccttcacgttgcgctctacgtacttcacccggagttcaaggttatcgcctatgacctcttcccagaccctctgttcaatcatgttttatggataaaacattatccttataaacattgttttccacacaaaacaagccttcatttccaaaccctgaagtctatcgctatgttgaactgcctcggcgcgtagggacggactctcctctcatctagaagctcgaccttaaagcccagttccctcgcgacggcctttatcttctgctcgtgctcggagaacaggtcttcctccggaccaaagccgtagtagtgaactattccaccggatttgacgctcatcatggcctccttcaaaaacctgtccgcgaacttggggaggttcatgatcactcggtcagccttaatctgaccagctaccttccgtacatctccgaggatgggaatgacgttgggcgttttattgagcttcttgttttcttcaaggtaccttaccgcccaggggtttatgtcgcaggcgaagaccagctttgcctttttggcgaggagtatcgagtatggcccaacgcccgcgaacatgtcgaagacgatttcccccggctgggttctctcaaagaccctcattctctctgtggcgagccgaggggtgtagtaaaccctcgcgatgtcgagcttcagccttattccgttctcacggtggagggtttcagtcctcttttcaccagcgaggtggataagctctcttatgcggtattccccagaaaccttgctacccttcgcaaatactgcttttatgtggcggtggactttgagaatagcctctccaatggcctttccatagtccatgagctcttcgggaagctcgattatcgcaatgtcgcctatgatgtcaaaggagcttggcaggagtggtttaatctcatctgggacttcaacgacctcacggtagctgtggggtcgcctttcagttttttcgaactccgcttcaactaactcgaatccctccacgggcatttcaacgggaaagagcacgaaatttccctctcgtttcggggagtaccctttagctaagactccaagctcgatgagctttcttctgattttttctgcttcacgttttggaactttaacggcgagcatcggaggggagattgggaaggaagttaaaagattttttatgaatcgcctgtattttgattcttaaatactctgtaaaacggaactgatattaaaccaagggccagtattgataaaattataccccctattttaatggggcctagtgttattataaatgtccttaatgagaggggacctagtattattatcattgatgtcaccagcagcagtcctgatatgctttttattccccttaagactacgttgcgggcatgctcgtacgagttccgtacactgtggagaacaataaacagcccaacgaaaaagcccactgtagttagaataacggaccaataggatataatccagttaatatccttgttacgccacagcattacttttttcttttgaaagcctcgcccttcagggcggggatgcagtaatcgaaagaccagcctgagagcaggaaagcaaaactattttaaagcctaaaaaacataccatgctttgaaatgaagcgttcagtaaccattaagctacaaccttcaaaagcccaagagaaaatcctcaaagagttagctctaatcagttcaaaagtttggaacaaagtgaactatctgaggagacaagaattctttgacggcaaaccaatagactttaacaaaaccgagaaaatagtttatgaagagtttaaggctgagataggctcggcaacagtccagcaaatagcgagaaagaacgccgaaagctggcgttcattcttctcactcatcaggaacaaacggaacggagaactaccaaaatggttcaaacccaaacctccaaactacatcaaggagagaggcttaatcgttctaagaaaagaccaatacagaattgaagggaacaagttaatcctaaaaggccttgggaagtttaaacgcttagaagtccagttcgaggggagaattcacttgaagggcaagcaagggcggttagaaataacttacaacccaataaggcggaagtggtatgctcatatttcatacacggtggaagagaaactaatcaatggtgagtgggttgaactcccaaggcaacccttgggcaacctctccgctggaattgacttgggagtgaacaacttaatggccgtttatgtggagaatggtgaaagcttcttagtcaatggaagaccgctcaagagcattgatttctactggcagaagaggattgccgagtatcagtccaaacttaacaaaagcggtgctaaaagtagcaagaaactcgcaagaatgcaccagaaggccaagcttcaggcgaagcactacattaacacggcggtgagacaaaccgttgagaagctttatcaccgcggagtttccagaattgtggtcggttatccgaagggaatagcgaggaactcgaacaagggtagaaagcaaaattaccttctctctcacgtttggcggtttaacacagtgataaaacggctcaaggaagtcgccgaagagtatggtattcaggttttggtggttgatgaggctttcacttcgaggacttgtcccgtttgcgggaagcctcacgaaggggctcgctttgttagaggattgtttaagtgtcccgcaacggggcttattttcaacgccgacttagttggagctttcaacatcttgaagaaggctgtcaaaaccataaccccgaacttgggcggtttgtatgcccaagggaggggtaactggctcaaggcccgagccagaggggttgaaaacctggctgaaagttgggttcaatgagacccctcaaacctctccgtcattggcaaggggttgactcgttggaaccctcgccgttcacggcggggaggaggtcagaataacgctaaaaaataaactgcttactagcaaccccgtctcagagaacactattttgataccatcgtctagtgacattaagaagtctctccaatccaagcactcacccccctgggctctcatgacttcaattatggagcgcagagatatattttattaaaccttttgtggcctgcatgataaaatagtcggggatagggggcttaatagtccaaaaagacattctgctggtgtctcaaaaggcaagttcaaaaggaaccgcgagccttgatcaaactcaatggaactatcgttccgtgcgttgaagctccgcttcaacgtcgtgcaggaagcttttggaaaaagcttgaccaaaagtgctccctttcttttgactttcctgtcaaagagtgtatgccctaccagaaagcaacttcacgcgggtttactttcaaaatctcttggtaattgtgatttcgaactttcttttttagcgctcttcgggcactatacggtgagaaaaatcctttgaattggccaattgaaagtaaacccccataaaataagcctgcttaaaagcgcatactcctcttccgccagcgctttcgcaagaaagggctgttgtggtgggcccgcggggattcgaaccccggacctccaccttgtcagggtggcgtcataaccagtctagaccacgggcccaacccaaggatggtggaccggccgggatttgaacccggggcctccgccttgccaaggcggcgctcataccaggctgagctaccggcccacttccatcgacgccgtaatcacctatctgggtgggtttataaattttacggttcgcccagatgtgaatcaaaaagttgatatcgtcctttattgcaaatactctcggtgagaccatgaactttgacccagtttccgaggcgaagaggatagggagtctgatcgtatcctggcgtagggacttccacatgcacccggaacttgggtacgaagaggagagaacttccaggatagtcgaggagcacctgcgcgagtgggggtactcaataaagcgtgttgggactggaataatagcggacattggcgaaggtgaaaaaacgatagccctcagggcggacatggacgccctgcccatccaggaggagaacgaggttccctacaagtcaaaagttccaggaaagatgcacgcctgcggtcacgacgcccacaccgctatgctactcggagcggcgaagataatagcagaacacagagatgagctgaagggtcgggtcagacttatcttccagccagctgaagaaggtggaaacggcgcggttaaaatgattgaaggcggcgccttggagggagtggacgctatcttcggcttccacgtttggatggatttgccgagcggtattatcggtatcagagacgggccttttcttgccggggctggcatattcaacggaaagattattggcaagggaggccatggggcttctccgcacgagacagttgatccaatcccaattgctgccgagaccgttctcgctttccagacgatagtcagcagaaacatcgagccaattgaaactggtgttgtcagcgtcacctcagtccacggcgggacagccttcaacgtcatccctgaggaggttgagttcaaggggaccttccgctttttcaagcccgaagttggggaactaatccagatgaggatgagagaaatcctcgatggtataacaaaggcccatagagcaaggtatgagctcagcatagaggagctgacacccccaactataaacaccaaagagatggctgattttgccagaaaagttgccgagaagtatggcctgaagtacggtgaggttagaccaacaatgggcgcagaggactttgccttctatcttcagaaagttcccggggctttccttgccctcggaatccgaaacgaggagaagggaatcatttatcctcaccaccacccgaagttcgacgtggatgaggatgtcctctacattggaacggcaatggaagttgccctggccttcgagtttttgagcgagtgatcgtcgagcttcttttttgcttttggttttattttgatcgttacttttttctttgaaagcctcgccgtttacggcgggaaggagatcaacaggggttaaatgcccttcagaagaatgaacttggcatgaagtaagaaaagaaacaatggaaaaagctcagataacttttttctcctcagatttggagatatcctcctcggtctcttcttccttctttggaagtcctcctgggcgtctctgcttcttcttcatcagctgctccttgagtctgttggcctcgttccagtaattgattgctagagcgcctgccacgagcgcaacgagcaggaatactattgccgcaggtttccacgggttgcctttcttctcttcaggtggtaggtatgccttggaaacgttgagaatctgctccgctagtggggttgcgttgttcatgctggcgagtgtcttgtttatgtattctggaagctcctcaggggtcggccatagtttgatcttaacctcttttgtaatgatcgtcggtgggatgctgtcaatcagcactacgttgccgatttcaagccggtgttcccgaccaagcgggtcctggtaaacgagttctgctccaatcgggaaggtgccgttttccgtaacagtgacggaagcctgtatgagctttgatgaacctgccttaaggtcgccgactggaataacggcttcaccgctgatgccctcagggaatactaactggagcgtcgcgttctttatgaactcgtagttgggtctccctcagaggcgcttacgttgaacttcaggagaacctttttgcctgcctctgtgtgaacgtagttgccctcatgagtaccgttcgaggcaaccgcagagacctttatctcaggtagtccgtacacgatgatgccgctgaggggctgggagtatatggtcttctgcttgccagtttcaaggctctgatcatcgtagtaggttaccatcacccttccaatatcgaactttccgacctttgtgggctggagaacgtatattaaagcgggcatctttgtgaatgcaggaaagctcttaaacgtccagctcttgactgagctaacgagtttgaagccgttcggaactggggctgcgacgttaacatcgtaggcatcgcctttgcctttgttctcgaccgttactatgataaccatgtcctgtccaaccatgacggtctttggaacggtgtctatcgaggccactatggttgccggcctaagaatcggcgtcgcctttgcgtcctccgggccatataccgttagggacacccttccatactgcggttcagatttcgatatcaaaactttcaggggagtgtttgggatgtccttaatggcacctatgctgattatgtaagtgtctagtgccttgccgtccttgtagacctttatactggccttcgtggagacggccgaaacgagctgtagctcgtacttggtcttgttctgggtgatggtcagcttttcgttcgtgtagaggagaccatcgtacagggatatgagggtttgggttgttgatgttcccgagcccgagcttgagctcgagccccccgcgcggctcactgatatctttgtagcgggaactgccggcatgtagacgttgaacttcgctgattttccaggtgtaatgtcaaggagctcaacatagacgaagtcgtagtacttgaagtccgtgttcgggaatgcgtaggcaactcccccactttcaccttccttgagggtgatgctcttagatggattgttcgggaggtaaatcgtgaaagttacctctgtggaagtgactttatagacttttattgtacccactgggagggtgtagctctttcctgcggaaagtatcaacgggtcgccgtttacctttttgagtggggactttatgtcaaggtacaggagcggctttttgtctttggtccatacagccgctccaaatactagcttggggttcttgctgttgggatagtacgcgttagagccctcgggaactattatagttgaaggtgcccctgtcggcccctgaatcgtcagagaaacctggctataatcaacgctgatgtccgagaacttgatagtgtactcaccaagggttacagaatctcctagattaagctgaacggacggcccaacggttgcataattagtttcttcagcgcggacaatgcccttattagacgtaattccacctgaaaccattaaaacaatccccaaaattaaagccaggagtttcctcattttccaacctccgcaggtttatgttgctggctatcagtttaaatggtgaaaagtataaaggccttacggtgtcagcctcctcctgtccctcgggaacaggatgacctccctgatgttcggaaggtcgagcatctgttttatcagcctctcggcgccgagtccaaagccaccgtggggcggcatgccgtagcggaaggccttaaggtagaattcaaagctttctgggttgaggcccttctccttgatctgctcaacaaggatgtcgtgcctgtgctccctctggccgccggagcttatctcaactcctctgtactcgaggtcgaaggctctgcatatctcgggcttgttatcatacttcattatatagaacggctttgcttcgctcgggtactggtagaggaagtagagcggagcgttctcgttctccatcatgtactttccgagaagcctctccccttcagtgtctatgtcctctccccagggaatctcctttccaaggtccccgaggatttcaagggccttatcgtagctcacgcgcgggaagggaagtttgggttcctcaagttcaaagttgagtatatcgagctccttggcgttgtgctcgcggacgtagtttattgcgtgggcgacaagcctctcaaggaagctcatgacttcctcctcgtcctctatgaaggccatctcgctgtcaatgctccatgcttcgtttaagtggcgcgttgtgttgtgctcctctgccctgaatatcggcgctatctcgtagaccctgtcgagaccgctggccatcattatctgcttgtagagctggggactctgagcgaggaaagcgtcctcctcgaagtacttcatcgggaagagctccgtcccaccctcggtggcggtagcgattatcttgggcgtgtgaatctcaatgaagccgttctcgtggaagaagtccctcacagctttgaagacgcttgagcgtatcttgaatatggccatgacctcgggccttcttaagtccatgaagcggttgtcaagcctggtgtcgagctcagccttgaccttacctgtcgggtcgagcggaagaggcgtttcggccctgttcagcacaacgatcttctcgggcagaatctcgaaacccagcttggcctttggagtgaagttaactactccctcaactgcaaccacatcctcgctcctgagctttggaatgagcttgaagagttccgggtcgaccttcttcttaggagcggttatctggacgattccatccctgtcccgtatccagagaaactttatgccgccgaggtctttgacttcccagacccagccagcgactttaaccttctggccgttcaactcctccgtaatttcgcttgagtagtgcgtcctgtacatggcaaccccccagaaagagtcgcgggcaccttttaaaggtattcgtgagggaatatggaaacgcagacatttcaacgacgaacgtaactgctttctgcgaactcctcgaagctgctgaatacatctggcttgaactccacgggttttagcctcacttcggtgaaccttccgacgggagtggccttaaagcaggcctcgccgttagcgtacgccctgaaaaccgtgcactcgctttctttcacctcaggattccagtcaaggacagcaggaggttccccttcgggctgaattgatgcgatgaacgcttctccgattccccagagagctccacctcccacgagaacgtgttcatccgccaaaactgttctcagtccaccgtccattttcagctttagcctttctccccacaagggttctcctgtggagccaattccggccagctcaaaatcttccatggcgacaaccagatcaccgctggggcttaccgcaatgtcgacggcttccatcccaggaaatctcagcccccactcaggttccccctcgccgtccaggcggatggcccaggcatcgtggcgggactttattggaacgtaggttttcccgaccaccacggggtcaccctcaggagtcagcgcgattttaacggccttttccaggctctccgttccgtacgtcttccccagaagaacatcaccctcgttatcgagccagaggagccacgcgttcgatgggccttcactgaagctgtatgtgtagcccgcaaccactatcctcccttctctgtcgatagctacggactctgccccgtcccacagcttgccgccgtaggttccccaccagacaaagtttccatctccgtcgagccttaggaccagggcgtcgctgacccccgcgccgaagcttcttgtttcgccgacaactacagttccaccgtctcttgtcgtcgtgagggcattgaagctatcaagcacacctccgttaaacctcctgccccacaggaagtttccattaccatcgaatttgaggatcacccccagcatcatggagcggggttccctcgttacccccaccaataccacttccccgttaccagtaacttcagcatcggttatggtcaccttcgggatgattctaaaccacttgaggcttccatctctcccgagccttgccacgaagcccccactgaggattaccctgcgtgggccatattctgccaagaaatgcagctccttttccgccacccccgcagcaatcatgtctccgccccgtgtgagggagatagatgccactccgcccttccagtaggttttcgcccacttaatcatcctcccccaccaaccttgcgttcagttcaaggtacagcttccacaggtactcgggatcgtcaagctcgggacagacctcctcaataatgggtgctacctccgttaggaacctcctagagagcactaaaacgtcctccgcgaactccaaaaagggaacctcgaatgtccccctgtgtgttttcctggcatcctcgcagtcgctccatccgagaagctcgttgaggtagtgaatcctcagcctttccccgacgagctcaaaaaacacggtggtaaccccttggtccacaaagaggctcgtctggtagagctttgtgctgtcccctattttaaagcccaactttcttgcctcccttctgggatacgccatctccccctgctcgtcgaagtcggggtcgagaaaggagatgcagaggtcgagaaggtcctggaacatgccgtggaggtttgtatccatcatcaagggagtgcatcccgaggatttgaatattccgccgatgatcagccttctgtcaattctcatcagggtcgggataggagatggaaagcacgtgggggcgttggggtccacgtcaatttctatgtgcttcccaacgagcctcatgggctttaaacttccgagccaccagctcacagaatcacccccagagctcctcagcggaatcctgactctctatacaacctttcaacctcgcgatagagccccctgagggaatcgtagtcgtcaggttcttccccatgctccagcctgattttctcaataatcgaagcgtacttttctaagtactctctgctgattttcagaacatcctccacgaactctctaagcgggagttcaacgacacccctatgtctgttctcatattcacgacagttggtatatgcaagcagatcattataatagtaaacttttaggatattcccatctgcttcaaagtaaagaatgctagatggatttgatgacgtaatgagctcataagacggattgttctcgttaagaacaaacccatgccacttcgcttcctttctggcaaaatttgaagtgctactctttgggttaagcatctgaatgcacgctataaggagctcttggagaaccccataaacgtttgtttctgctccttcaagcttacccttccaacaggctcctacaatcaggttatcttttatcccaaagatcagaaaaaatggataaggagagggaatatacctatctaggtctatttttatcgtcaagtgttttccttgtatggtgatccacattcgtatcacctcactgccagccacccttaccaggaataaacgtctcaacagcccaaccatcaacaggatacgccgtcttcaggacgaattcacccttctcgaacctaaactccagctgaacaacatcaatcccatcaacgtgtattccaagctagtgacaatgtattcatatcctcctgcctgtaatttcctccttgatttccagataccatctccagaggatatcatggtcatacggttcctcctcatactctctcataatccgttctatgacacctgcatagtttttgaggtatccctccgaaatctcgagcacatcattaacaaattccaagaaaggcaattcaattgtacccctgcccattcccttgaattccgggcaatctgtttcgtagagaagctggttatagtaatgtattttcactacatcattctttctttcaagaaaaatgaagactgagtccgctaccgatgttgcagagtaaatcgaagagtcctccccaacctgaaatccgtactctctaacagtgtccggcttaacaccaacgagccgtcttggcttcgccaccataaagaacctcacactgtccagtaaatcctgcacaactccatatgggtcccctggcgacccaaccagcttccctgaactccattttttccagcacatgcccacgatgacatggtcatccagtaacatgatgaggggaaagggatatgctcccccatagaatttccctaagtcagcctctatgtagatgtgcttgccagataatttgagcgtgttcatgggatcacgcccaatgttcttttttgcttaagctagagctcccgcaactgggtttctcgtacattttcttaacctcctgataaaagttcaaaaggtattcatagtcatcaccgggattgtgttcattctcgatcaaaatcctatcaataatcgaagcgtatttttccaagtattccctgctgattttcagaacgtcctcaacgaactccttaagtgaaagctcaacaacgcccttatgcttgcccttgtattctgggcaatctgtgaattcaaggagctcattgtgataataaattctcgcaatccgtccggtagagcaagcatagtaaatactgttcctctcaaccccccgatacaccacaacctcatccccttttaaccggaatcctgcctcttctgcattctttctctcaaacctggttagtgcccgaacatgcggatgctccgggtctaaaagacaagaacacgcatctaacaagttctcaaaaactctgtagacatcactttcatctccttcgagttttcccttccagcaggctcccacgagtatgtggtcatctatcgtaaaaatcgaaaagaaaggatctggagatggaatgtacctatctaggtctatttttatcgtcaagtgttttccttgtatggtgatccacattcgtatcacctcactgccagccacctctcccaggaataaacgtctcaacagcccaaccatcaacaggatacgccgtctccaggacaaacttcccatcctcgaacctgaactccaacctaacaacatcaaccccatcaacacgcattccaagcttcttaagatccactggaatcccaaagcttgatttcggtgctccaagtctattaaagaattctttttgataatctgggtccttgagagctctttccacgacttccttcaggaactccatcagctccccctcatccctgaaaaccctgggcaactgcttctcctgaccgttcacgatgatcttctggcccatcagccagaaggatgtttcccaattaatgcccaaaatccagttctgttttaatttcctgtatgaggttttctaagtattgcctaagccgagaaatttcctcggtaaatctgttatattgcatggctttagtctccatttctattgggaaacatttttcaaggtactcctcgcttattttgagaatatcggcgacaaaggccccaaacggtagttcgatagtgccctgaagggaattcttcgaagaaatatacttgggagcttcatttatgaaatgaaaacgcaacaattctccctttctttcaagataatacgtgttaaaatctaagtcaagtatnggtccgcagacatagctatcaggtaacaacttaaaaccatcgctctcagcgtttttccttttgttaaaacaactttcagggcactttaggagatctctcgtacagaggagtagatcctgaaagaggccatatgagtcgccaagccatccctcattgtggtatccacctacttcgtgcccagccaccaaaaaaagaataggaaaacggccgggaaatgggtctggctcaaaggattccaaatctatttcaacctcaataaattttccacgaagtttgcacctcattgaagtcaccccatgcgtatccatttaccagattgtttttctctgtcccacacgtaccctaaaacattcttaccctttgagggatacgctgtgataagttgataggcacccttagcttggttatacgagaactggaactctaccgcatctatcccgtctatatgcaccccaagcttatccaagtttacccttagcttcacaaagctctgtcccctaaattctgtgtagtactcttcctcctgaagtgccctcttcaacacttcatcaaggaactctctgggctctttctcgttcttgaagacttttggcaaccgcttctcctgaccgttcacgatgatcctcttacccaaacttctccttatacagtctctcaacttccagatagaacttttggaggaagtcatagtcgtcaggcttttccccatgctccagcctgattttctcaataattggagcgtatttttccaagtactccttgctgactttcagaacgtcttcaatgaactctctaagcgggagctcaacgacacccttgtgcttgcccttgtattctggacaatcagtgaattcaaggagtccattgtgatagtaaattctcgcggtcttccctgtagagcaagcgtagtaaatactgttcctctcaacaccctgatacacaacaacctcctccccttttaatctgaatcctgcctcttccacattctttttctcaaacctggttagtttctgaacgtgcggatgctctggctgtaaaaagtaataacaagcagtcaacaagttctcaaaaactctgtagacatcactttcatctccttcgagttttcccttccagcaggcccccacgagtaaatggtcacctatcgtaaaaatcgaaaagaaaggatctggagatggaatgtacctatctaggtctatttttatcgtcaagtgttttccttgtatggtggcccacattcgtatcacctcactgccagccacccttaccaggaataaacgtctcaacagcccaaccatcaacaggatacgccgtcttcaggacgaattcacccttctcgaacctaaactccagctgaacaacatcaatcccatcaacacgcattccaagcttcttaagatccactggaatcccaaagttcctgttgggcaccccattcttaaagaatttctcagatatgtactctggatccttgctcaccctctccacaacttccttcaggaactccatcagctccccctcatccctgaaaaccctgggaagctgcttctcctgaccgctcacgatgatcttctggcccatcggccagaaggatgtttttcccacgttttccatgtcgtatccccacacgtgcctgaggagcatgtgaatgagcccctccttttcgttccctttctctatggccacgtcgtacgtccgtacttttccgaggacatgttttccttccgctccacctgctatcctttctaatgccctctccgaccgttcaattccttcctttatctcctttatcgtcgcgccgtgcttgactgtctcctcgacggcctcctttgaaactccagccctgacgaggtcgtcgagggcctttgcggcatcgtcgccgtgctttactatgtcgtcgaatatgtgggcgaacctctccttggccctgacgactccatcaccaacctcctcaacgaggtcgaggcgcttcagcgtgctgtatagctttccaggaacctcaacgagttcatcaccgtgcctgagcacgccgaccagctcatcgccctccatagccaggctgaaaacgaacaccgaaccagcggcgacggtgcactttattgagtcctccccgtagtcggaacacgcattataggcatcgtaggcgtcccagagcgcaaagcccaccgagattattgccccgatgatggctggaattgggacgaactgcggccttatctccccgtctccccaggaataagtggtcgtatagcctgtcgagaagactctcggtacggattggggcctcaacttcacccacgagctcatgaagattccgtttccagaggtgatgcgcagtttgacgtaaaccggctccctgacgttgaggaaaaccgctaccttcttgccccagggcttcagccggccgaggctgacgcgctctgtgatggttcttccatccctgctgatgaacacggtgccgtagccggagaggcagttgggcgggacgtcccatgttacgaccgcgatgttgccggtctgttcaacgccgtcgaggcggattgggtaggcccctgagcttgctccaaagatggaaagccctgaccacggcagggaaacggcggagactccgggcagcgtcagcaagagcaggagaaccagcgctccaaccatctggcggctcatccgctcacctccagatggtttcaactatggacgaataatccagctttaaaagaatttcgtaaacttaaagttggaaacaaaagtagaagtcgctatgtgatgcgggataatgccaccagaatcgtctcacatcgagggaagaaactcaaaagcaaagtgccaaaaacaggatgagaacagaaaagagcatcaaacaaaggatatcctaacgtctttgccggttatctggctgagaatgctctcaagaacttctggcttctcagggagcttctttctgtcccttccaaagacgaggatcttgtagtccctctctcctccggccttgtagaccacgttaacgccaaagactccagcaggatagaacaggtcagaggccagcttcttcagctcgttcgggttttccgctttcataccctcgataaccctaacgcgctttccaagctcccttatcagggctttgatgttctttccacccttacctatgaccacgggcacgtctccttccccaacgacgatgacaacgagatctccagcttcgacggcattcttgaactcgatatcagcgtcaccgagaagcttgtagagaagcctcgcgaccttaacgtcaagctcggagattataccctcctggagttttttctcatcggcgggacagagaataccatccgtcttcaagcacacctcacagatcggcgccttcacgttctcaccccccagaatgaccctgagcagactaccccataattcaggaaggcatttaaaaaggttattatggagaaaagctctcctccaaaaggtcagatttcaccctctatctcacgcctgagccgctcaataaactcctcggtaaagcggtgtctctcttcggccatctttctcgcggtttctgtgtacatcaggtctttcagcttcagtatcttctcctcaaagtgctttattgaggcgtctatgcccctcccatgctcccccgagtacatgaagaccctcgctatccccacggcccctattgcgtcgagcttatcggcatcgctcaggatctttgcctcaagtgttgccggttcaggcccacgtgagaagcggtgggcctctatcgcgtgggcaacggcttcaaccttgtcttcgggataaccgaggctcctcaggtacctcctcgctatccttgccccctcaagggcatggtcctcgactttccctgaatcctccagcgggcgggcaatatcgtggagaagcgccgccagggcgaggacttctaaatcagccccctcttctttcccgatatgcatgcagaggttgaagaccctctcaacgtggctgaagccgtgcgtgccctccctgtcgaagaagcttttggcgaactccctgacggtctctatcagctcccttgacttcgggtcagatatgaactcctcaagcttcattcaaccacctagggcatcattaattagtgcctttaaaagctcaacgacttccttatggacttcgaggccgatcccgtccacgctctcgctggatttctttctaaccccatctatcaacccggcgcttgttagggcttttactgccctctcttcatcccagtctgcaaggagatttgtgccggctaagatcgaggcatgtgccaccagcccgtaggaaccccagttcgacactccagccgttataaggtgatcaacctcaacaacgctggctatcttttctccaaggggaatgtacagctcaattaggtccctgacgttgcccatcccggcttcgtttccgccgtcaccaaccgctattgttgggattccatattctctcgcctcaattaccagcccgtcaaaggcctccctcgttatctccatgccgctcatggagtaatacctgccgtcaactgcccttccgggagtctcaatggcgacgaccagcgagtattccgagacatcaccgtcccttgcaaaagtgacgccaaacggcctcaatgctcccattacctccggatagctgaggacttccgcccttcccccgagcttttctacggcttttgcgactgccaatgccccgggtgggccgtcggtttcaggagtcatagaaggcggaatcgggaagccggttactataagagttctctcaaggttgttgagaaacgtctcagcggcgtcctccaaaaaatggaagtttctggtgcggtagtcaagatacagccttcctattcccctgcttccaacgtcggtgtttacaaggtgggcgatcatcagtcttcgctctcctccagctcgtaggccacgatcttaactttcctgcctttgatggcttcctttaacttccaccagagctcagtcgggttttcgcgcctgtgggtcagctcgtggccgttctcaagctttaccttcttctcctcgtattcaacaaacgtcccttccccttcgaacaccttcttcattctaccacccccagtatttttctaagctcgtggagcgtcctgatttcatagtccgctaagtgatgcccgggttcgccctcacggtttatccatattgagagcatgccaacgtgcttcgccccataaacgtcctggctcagggaatccccaacgaaagcggcctcttttggttcaactccgagtttttcaagggcgtagagaaatatctttggctcgggttttatcgccttaacatcctccctggtcacgatgacatcgaagtacccttcgagcccagtcagcttgagcttaaggcgctggtattcgggcccgctcgtgacaactcccagagggtatccagatcctttaagccactcaagggtcggaatggtgtccggataaacgtggagcttgtgtgggtacctcctcagaaggtcttcataccgcatattgaggccaaaaagctcaaagaaaaagttccagtcgtgccagtcgtaggtgtctcgccttgagaatatctcggacagaaacacgttcctggcctcttccttggtagtttccagcttttttgccagcttttcgtacacctgcgggagaaagagctgaataaggggcatttcagttagcagtgtgccatcgatgtcaaagagaacggcctttatcctgcccatatcaccacctcttcacaagcagggcgaggacttccgagcctttaacgtttttgtcggtgatcacaccccagattatgtccttctcagagagtatctcctgaaacttggagagtattctgtgagcaccgctcagcgggaagtcttcaccgacaagtattccaacaagcccgcgctcccagatgccccagtgccagctgaagtcaacctcgcggagaaggcgcattatgccgacgtttcctccccgtatcatgctgaacaggtccgcgtagtctatgttcacgagcatctcactttcaaggtaacggtagagctttgagaacatatcagaaatgttctttgaagcttcctcaaaagcctttccaaggggcacgtcctcctttaagaagtcccagagggagtcgtagaacaccgtctcgaacttatccgcccattcgggtttctggttgatcagctcaactttaggcgtgagtacataagcgagccttatagaatccgaggggagtgcttcaaggattatctccataatttccctgtttgtctttgtgtcatcaaagacgagccacacaaagctgttttcgggaacgttagagaagaagttcacaatcctttcccggtattccttaggccgcagaatgtacctggctggattcaaggatacctttaccacggagtccgtttcaattccattgactatccttgaaccattgctaccaattccagcaaaaatatgggtaaaggagaacatcgcgaccctcactcaagggtcgcgtgcttcctcttcatatccttttcggtcttctggaaggtcgccatgaggagtgctataatgccgtcaaggaagaccatagtggagtcctcgaaaagagttcccataggggctatccatttgtactgggtgagcatctgcctggctatgtagtcagtggggacgtctgcctttgtccttcccgggatttcaacgacaacgtcagcgagttttccgagtgtcgagtccgcgtacgaggttatgccgacgacctttccgccctgctcctttgctatctgagcggcatccactatgctctttgtttcacccgaaccacttatggctatgagtaaatcccctgcctcgaatgctggcgtgattgtctcaccgacgacgtagacgttgaagtcgaggtgcatgagcctcatcgcgaaggccttgccgacgagcccgctccttccggcgccgtagatgaatatcttgttggcccctatcatggcatccacgaggcctctaacctgttcgagcttgaggttttcggcgacgctccttatgtggtccgttatgtcgaacatggcctttcttatcgtcatcatgtactcgccccagaagaggtctattatccttctggtgacttcttcagggtctttggccttggttatggcgcttcccacgatgattatcgtggcgccgagctctatgaccttaggtatcgtatcgagattcaggcccccagcgactgcaaccggaactttgacggcctttacgaccttctcaaggtcctcaagtgggttcttgccctgggcctgctcgtcaattccagtgtggacgaggatgtagtggacgcccatcttctcaagctcttttgccctcttaaccttgtccttgacgccgatcaggtcaaccataacccttattccatacctcctcgcgacctcaactgcatccttgatggtcttgtcgtctgcaacgcccagaatagaaacaacatcagcgccgtgcctcgcggccatctcgacctcgagggcaccggtgtccattgtcttgagatccgcgactatcttcctgtccgggaagcgcctcttcatgagctctactgccctcattccttctttcttgatgaggggagtgcctacttcaagccagtgggccccgccgcgggcggccttctcagctatagaaatggcctgctcaatatcggtaaggtcaagagcgacctggagtatcatgacacgacctccggagatttttcagttgaaggttttgggtcgagtttttaaaggtttggccgtgaagattgacataaaaatgcctattattcctcccaacgcttttaaaaaaagttcccaatgttgtgctggtggaaggaatggtaactttcataccctttggagagaagcccaaccgcgatggagttctctacaccctccagctcctaaaaaggaacaagctcattgatgactacgtcatcgtcgaggccagcaggattgaccttctatcagagcgaattccccaggacagggcctatgtggtcggtgaacacctcgcaacctacgggataatcgacaggctgaggccaaaatccctgatcagcgttgatgctcacacagatttgatgcacgactaccttgatcacggctcgtggctggcctatgcccttgagaacaggctcgttgagagggccgccgtgatggctccggtcttgatgataccgacaaccgacagaacccagctctggacgaggcgagtcaagatatatccagccctgttgaggagcagaaaacggggtggaaagtggagggcttataagaacttccagacgaactccattgaggacataatagccgatgcaaagaagtacctcggcgatgaaatatacctcacagtcgatatggacgttctcaggccggagtacaaaatagctcgattccagcacggtgagctgactctcgatgagctaatcgagatacttgaggcgataaagcgggagttcaacgttgttgcgtttgacattgccgaaatttcggacagaataaggcactcccgtcttggaaagcgggcactctttgaggtcttccagctcctgacggagggattggagtgaaggggccaaccgaagaagaaatcaggaacgtgataatgcctctgatgctttccggcgctaagatgctcgatagacactgtccgaggtgcggttcgcccctctttgagaaggacggtagggttttctgtccagtatgcgagtacagggaaagaaaaaggaaggccgaaatgaaggaggaggtcaaagacgtcgaagagaggctgagggagaagctgacccagcttgcgaactcccttccagaggacattgaagaacttgagaaacatttaagggtgatggagaagataatcgacctgttggagaggtataaacgactggagggatctgaatgaagaaccagagggttttgaaggcccttgaaagcggcccgaagaccgttgatgagatagccaaggagactggaatcagcccgatggaggtaaggcgctacctcctaaggttcgccgagcagggcaaggtggagagcttccagagggaaggaaaaatcttctggaaaatccgggaaaagagagaggaggaagaggagttcaagtacgtttgactaacctctattctctccacttttgacttctcggcccagtatgggattgaacgcctatgataggtagcacaatgtttctctgaacaaccgaagaaaagaacagtaaaagcaagaacagagagaagggatcagaccttctcggccttctcccagtactcgttgaactttgcctcgaagaggtccctgaccctgaagtccttgatccagacctgggtctcgtagttgaagtaccttgcagccatgtcctcaagggcgaagaagacctcgtcgtcgcagatgagcatcgggagctcgaacttgtcaagggccctgagctcgagcttgcccttcttggcgtactccatgatctttgagccctcaagcctcttgaggagggacttgctcacgatgatcttggccttggcgccgttgtcgatggccttaatgaggtcgttctcgaggtttatggcgatgtaaccgtcgtcggcgaggaggatcttctccttgacttcctcgaacatctccttggtcttgagggtggcgttccttatgcccctgacaacccagaccctctcaacgccgtacttcggaatctcggtctcgatgagcggcttcatgagctcgatgagctcctccttggccttcttcttggcctcgagctcttccttaacgcgctcctgccactcctcgatgaacttctcgaggatgttctccgggtgcaccggcctgtacttgttgaccttgcccggctggctgatggcgaatcccttcttctcaaggctcctgaggacgtcgtaagttcttggagccggaacctctgagacgctggcaagctcggccggtgtaagaacaccaaaaccgaccagggccacgtacgcccttgcctcgtagaggttcaactcaaagtgctcctgaaggagctccaccatcctgtccttgaccatctttaccaccacctaattttctatttctaaattgggtcccaaccaatataaatcttttcctcccaggggaagttcatggcatgtgtcggacatagttggattggataacttacttagattatactctggttgtatggggatacaaccaggttaccacagctggggttttaaagtttttggaaatcagaacctcaagagagaacaagataacataatggattatttacggtaaacataccctaaggctcaagcattcaaaaagacagaatgggacagcataaaaagatagtggcaagcgattaaaacaccatcaacccgaaacgtatctttgaatttccgaataaagctccccgagaacctttatgtaatcctcaatcccttcttctatgcggtccattatttcctcaagttccctcgttctctcctcgctcacaaggtccctgtacttgctgacgaggtagtggtagactttgatgcctttttccgttggaaggagcttctttcttccctttgtttccacgacgtaacctcttctcatgagcgtttcaacgatcttggcgtacgttgacggtcttcctatcttcctctccttcatcagggctattatgtctccctgagtgtagagggaaacctttggagccttccacttctttgcctcaaccaccttgagcttcattcccttctcaagctttggaagctccctgagcggcggcgagcgcagtcttgtccagccgtcctcgattatctcaacgtagccttcaagctcggcctttccgacgccagcgttgattacggccttctcgtagagtatcttcgctggggtcatctggctcgtcatgaagcgcctgaatatcatgtcgtagagcctgtagtgattccttgtaaggttcctcgggagctggattattccatcgcggatgagctgcatcaacctgccggtgtctatcggtctagtgggtcttatggcctcgtgtgctccctcctctccccacggcctgggtttgaagtacttttcgccgagttcctgggttatgtattccttcgcgacctctattccggtgttgctgacgtgtgtactgtcagttctgtggtaggtacagttgtgggagacggcaccgttggagaggaagttctcagtggtcgtcgtgaagtcatagagctttccggtgtaaagttcttcttcaacccccttcactttaacccaggtaacccccgcctcgacgagggacttgaggaactccttctctgggctttcctctgcgtactcaagcacctttgagagtttgtcccgtggaatctctccctccggacgtttgagccagttccaaacgtcgattccagtttccttcaggatcctgttcttggtgccgtttttgaacttcagctttccgaagacgggagcgaccgggagcaggtcaccctcaaaggccctccgcgatgccctgtaaacggaatacgcctcgtcaaactgcgcccttctaattctaaggtacgggtatattttctccctgaacttttcgaggctcctgttgcttattatcaagtcccaaaccccagtgcgctcgtcccgtctgaggtagttcatgatgccgatctggtagaggtaaacgctgagcattctgaggacgtcgcccctctttgaagtcaggatccccctgaagttcggccctttcctgtcgttgaggatggagaaagttccatccgtgtcaaaatagcctgcgatcattgcgttgatgtactcctcacggagtccaaacacgagcgggtggagctttccttttctcgctccaagtctcctgaagacctcggcgatgattgagttcgagaagccaacctggttcgtcgtttcaaagacacggaggaacgggaaaacatcttcgagtacggatttaacgtccttcaggggagtctgggaaatcaagaccttgctgtcccttagggttccatcgccaaggacgaggccgaagacgtaccagaacctcccgtcaagtttgaagttgggtatgggctttgagcctgccctttggcggtagagggacttcacgtgggcctcgtagtcatcaagcccccattcctggagaaggtagaggggaaggacacgcctgcggagatacttgtacttggtgctcgttgagatcctctccctgacgattggagctaccttctcgttgaaatactcctcgtccagctcgaccatcacgtcggttattccgagctttatcatgagtttgaggagcgtgtattcatctcttccacggtggccggtgttgtaggcgaaggcaacgtagtctccttccctgacgttcttggcggagacccagccgagcttgccctctctcatcacgaggagaccatggtcgggagttgccttaatttcgtgtccgtttttgagcttgatgaccttaagaggcccgttccagtcaatctcccagaacttgagggcttttgcttcttttggcttaaggccgttcactgagagcagattcccctcggacttctccaccgcatcctttatctccatgatccttccgtcggcaaggctaacgagagtatcgggtgtgacgcagagacctgcctcgaagagatcctgtgcgagcctcatcgtttcgggagccgaaagcttcaggaaggtcgaagcatctttcagcatcgcgtccgtagtatatggtggagctgggttgagttccctctcctcgagctggacttcctcgacggtgacgtattcaggcggctctacgtctttgccgtcttttccgagttcaatagttacctgtaagccgttctcaagggtcaggccgaggaagtaaacttcgctctccgtgaactccttatagcgctcgattatccagccgagaaccggtgtctgaactcttcctgctgacaggttgtagctctcaaagaccctctggagctcctggctcagctcgaagcctatccatctgtcctcgattctcctaacgatctgcgcgttgacgcggttctcgttgacatctctcgcctcctggatggccttcattatggccggcctcgttacctcgtggaactctatgcgctttatgttgggcgtgtacggggcgaggacgttcctgatgtcccaggctatcttctcaccctcggtatcggggtcggtcgctatgaggatttcatcaacttcctgtgctatctcgcgcatagcaatgacgttctcaagggcgtccctgacattagtagagccacagcgcgggcacacccctttcttctcccagtccacgaactggtggccgcagtcacggcatctcttgagggtgtcgtaaacgggaatgaacttcagcatgtcaccctcgttctggattagaacgccgtgatagccctcgttcgtgacgaggtcgaacatatgacctccgctggccagaatcgtcagcatcctgtccccaacgcttatctcgtaggcgaccaggtcccctatcctcgtcttgctcggctgaccgaagaagttcgctatagttctggccttgttcgggctctcgactatcatgagggcagacctgacgaggtctttgactttggcgcttattttgccctccataacgagcctgaccttctctctgtcctcgtctatctgcctgagaatctcatcgaggtcaagctcctcgaatggaaccatcttgaactcctggaaacgccagcgcatctgcctgacgaggccgttgaagaccttctcgttgtccactatgaggacgctcagacccttcgtgattcctcccgcgaagagcctgctcgtccttcccgttgcctggatgtaggttctgacgtcgggtatctcaatgtaccacttgccctcttccttgaccaggcttatgaacggatcttcggcgagctttctaaggacttcctcgtctctgagaaccctcctcaggaactccaccagctcgcggaaaacgccgaggacgtggttgtggaactcgttttctatcgggagaccctcggcaagggcctcttcaatctttaggagctcgaactgcgggatgttccttatgagcctcctcaagcgggcgtggagcttttcggcttgcctcctgtcttcctcactgaggaagtccattatctcgctgagcaggcctagggcacgatatatggttggtctctcaaggtctatactaaagcggaacttcggaacgcccgtgaagacggcgtagcgtatgaggtgcggtaggtcaatacccctgacgagggagccgtaataggtggcagaacctatcaggtagtccgcctcgccgttctcgaatttctcaagggccttcttgttcttggacgagacgagctctatcttaaagcccttctcgctgagataattagctaattcctcagcgtagccaagaccctgatcaactgggacgaatatcaggccgccctttccgagccttgtgagaagctcctcaacgtgctccttaatgtctttagttggcttgaggtagctgtcaacgacattcctaagggcgctccttccgcttccgacttcaaagcccagaagctcgcggtagagctttatcctgtcgcccctcgcggaacccgtggcagatgcgattatcattattccaatcttgttcttccgcttgaacttttctatctccctctgaagcttttctatttccctgttaagcccgttcagcttctcatttctgtcctctgagttcccgttcaggtatcttgacatctgcttcttcagcctgattatttcccaggccttctggattatctcatccgtaaagccgaggagataaagggagcggtctatgttcttgctcgccttaaggaaagcgtcaacatcgtcaacgaatatgaagtcgaagtgcctgcccttcagaacctcttcgtagttcctggccagccactgggcgctggttacaaggatgtcgtagtcctcgtttttgattctctcaagcatctcctctttttccttcttcctgaggttcccgtggtagtaggcgagcctgacgtcggcgttcgcgttctccattataccctctatcttcctgacggtctggatgacgagaggagttgttgggactactatgtagctcttcttgccctttagagcgtgccagacggccatgaaggcgccaaaggtgctcttacccattccagtaggcgctatgatggagaagctcctccccttgagaagcctctttacccaagtcctctgggcgctccagaacgtaaagcctgtggctttcttgaagaactcctctatctccctcgtctggttctcaagctggtatattttctcccactccttgagagtgcccctgagtttaagcgcattcctcaccgcagaaacgagctggaagtaggagtcagcgtgaacgggttcgtcgaggcattcttcacacgggttcctcattacgagcctttcgtcggatattctcccccagcagtttgggcacatctccctgtatacggctttcatggccccaccctctaagtctttctctggaaaaggagaatttataaggcttttctggttctgcctttcagggcttcaagttctttctcgatcttttcagtcagggggtaatcagggaacacccgcgcgaactcctcaaaggcctcttccaaaacgtggaggtattcctcccgcccggaaagctcaatgagtttcatagtcctgaagaaaagcctcgccgtttcgcttccactctcgtcgcgcttcagggctgatatcagctccttcaccgaaacttcgacggcgagagtcggcacttcaattagaaattcccagacaacggcctcagggttaacctcggccagtttggagttctctgaaaagtatgcaccgttttcgtacgccctcctaacggcttcaacgtgttcgcagttgccgcccttcgaacaggtgcagaggccttcaccggtggacaggtcaatctcgacgtagtacgggtacaggcccagcaccttgccgtggatctttttcccgctcttcagaacccacaggacgcttcccatttttaccactgaggctggttattggagagggcgtttaaaatggtttcggagggaaggtttataggctctgatgacttattattcctggtggtgaacatggtggacgtttttgaactcgcccggcgctatcacgacgaacttggggtaaaggaaccgagtctcgccacaatggcggctgagatgttcgaagatctcggcctccagatggcggacttcctcaagcagaacggctattctatcgtgagcaccaagttcatagactacgacaagagccttgtaatggaaataacgaaaggagacaggagctttgagataatactgaggaagagctaacctctatttacttaacccctatacctttagttaagaggatcgagaaaaaaggcaataagagaaaaaattcaaaatcgcttttttctgaggattagaggaactagcgctagagtaatgaacattgcgggcccacatattcctccactgccggaactgccacctttgacagcgttggatgattccagatgaatctcctcgctgatctttacaccgaatagatctactgatcccttgtaactctttagcaagcctgttctcgtatcatattcccatgtttctatcatattcttaacttttccgtcctctggcaattttttggggtctgcgtaaatgttgttatctcctggttccacatcccacggaatggttagggtatcaccttctttgatttttccttcatcgccccataacttcttgtatttgtccagatctcctttgacgtcttcaaacctaatggtgaacccctgatcatccacatttatgacgacgactttgtactctattgatcccgagatcttctcgttgtctcctgatgcttcgaacttgagtttgtactttgcccagtctccaactttaagtggatactcggtggtagcgctttcaggagaactctcagaggttctttgagtggttgttgtctcttctgttttctgttctagagttttattattcgattgtgttgtggttgtttgttctgtggtcttctgctttgcaatttcaactttctttgagagttgcttatatattttcattgcttcgacgtacgcggatacgtagtctccttgagacttcgaagcctcaatgattttttgtctatccttaaggtcgcctatagctactccgtacttgatggcctctgacatcaacgatgttatgttctgctctatctcatcgagggactctttggccattgaatttgcttcattaaatgcatcgttaaggtactttaatgcattggttaagtcaccggatatcattgaattcttacctgactcaaagttaacatccaatgagatatcgctcagaccaactgatctggcgagagagactttgtaatacagatctgcaactttgttggcgagccttgttatagcttcggtctgtattcctgctacttctttagaaatctttgaaatcgtacgtgtgtctgaaggatcaacaccttgaagagattcctccgctgagctgagcgttgtcatgagatcgctgacatcaacaccaagggaggagacattctgaaggaattcgcgagtgctttcaatgaggtctttgaggtcttccagagatactccaacgaatattggctttacgtagtgcagattacgggcaccgccagtaccaccggtgaatccaaagtatgcggtctgtcccagttcggatatcaggtctatgttcttagtgtattcataagtgttatcaattttgatgccaagtgtctctgtatcggggtcccaatagaacaacatatcatgttctttttcgtctgcgaagcaaacaccgcttgtaatctcttggaagttgccgtttagatagagatcaacgcttcttccgatttcccatattctaaatcctactgctggccaaataccactaataccaacaccactgccggttccgccaacaacattagtaccagcgttctggaatccaacccaaatgccatctccccctccacagcgacctgaatagaactttgccctagcttggaaggtcatcgttagatctactgggatcagataccacgttgctcccgctttgtatccctgatctggagttaacacgatggcgttaatggttggatccacatatgcgttgcccacaacatgccagttatcaaaggagtttgcacttatcaaagccgttgtgggcatctgaatagagttccactggattatggccccttctcttggatatacaaggtacgtctttcctttcatgtcccctgttacgttaattgcggcgtttccaaatatgaatgtaaagccatccctgttcgtgaatgtcacaaggaacgagccttctgcaaggggtgttatcctgagacctcctggatcgccttcataaacgtaggagttcccctctttcttgatgttgtagttcagataactggttgggttacctgtccagtacataacaacttcacttaattcccaggggaatcctgcgaggggggtctttatagtcctgccaattgaacttggagttagtgtgacagggtattctcctgcatggagaatagccccagctctttctgcatattttacgggtgttattgctaggttagttgcgttcaggtattttatcttcaggataaccgagtagtcagtcccgttccagaggccaagaaggtattctctatttgtggtgtctatcatgagaacatcgatcccgtttcctatggtgtaattggtgccaaggatagtaatgcttaggtgctttatgggaagtatgggaagtgccatggttgcacgattaaggtagtcccagccccgattctgtccaacatacactctggctagttcgagaatttccccgggaatatcaaatggaacctcttctgaaagctgaggatctacttcttcaactagagccaccaaaactgccgttctgtatggagcaccatagatgtcggggattgtagatagattcctattaggtatcccgccagcaaaatcattcatcctgcgggcgatcacttgcataacttgggggtttgatattttctgaatccatttcatgacatcagatttgccgagggttgagtacttcgagtttatatcttcaaacctaccattggccacggcctttagatcaactccgttgtattccgggagcagagttcttagaatctcgattgcaaggatctcactgaacagatctgttgaatagtccgagtcgtatgtctggatgttcatgtgccagagaggacttctgtcatctccgggccagtttgtggcaatactgtctagatagctcttcacggtgccataagcgattaggtaatatcctttaccacctttaacgccagaatactcttctttgaagaagtctgcaccgactcgtatctcgtctcttgaaatcctgacctctgacccgggaactatcttaagttgtgggttccacccgttgtaatctcccccgaagaatgttttcaccgtactctttattgtagtaaagtaaccttggatgctgttgcctgcggatgctttatatggcacaattgccaagaacaacatcatcactaacagaacgctagcacgttttcttgtggtcattgtagccacctccggagtttgtcggcactctataaatctaggtatcaatttaaagtttatgatctgtcatattgaaaatcattaagttgtaaataatgtttaagtgctagggattaagaatacctaaatctaaaaacagagagaaaaaaatctcatttataactgtactcaaagactacttccttcttttctccagggttcacggtgaggctgaactccacgtagctggcagtttcgtcaatgggttcaacgctcgagcttaggagattcccgctcttgtggtgtctaataataacggttttcgtatcgtttccaaagttctcgacctctatctttatcttgtaatacgtcctgtcatcactccgctggacgtccagcacggtcgtccttcccttcaggtcgtagtccctgccgatgcctattctcacaacgtcatccctcggcgtgtgctctatgctcatctcaccgatcagtagggctcttccttcgctttcgcggtagacttccacgatgcccgccgggaggactttgtccgttttgaaggagatcgactcgtaaaccggccgctctccgtcggctacccagctctcgtagaggtactccctctggaacgggacttccattgatacgtagggataaaccatcgtgctcgacgggtttatgttggccgttccaagtgcatagacgtagaacgcttcgagcttctgaggttctccgacggtggcctgggatgccttttcgtcgagggagtaaactaccctcggccctggtagggtctggtagagctgaacatcgcccgcaacgaggagaacgtccgcgctttcaagcccaaccgccgtcgggttggttatgacgacgtatccctggagtttcgctctctctcctatgtaaagcttgtacctgctcttccagttcatcccctcaacgcggtagattaaggtgacgttgtactcgccctttttctcggcacggagaacggcgtagacacttgactcgtcaagggttgaggccttaaagtaaacgacctttgccgggtcgatcaggtagtagtcctcaccctcgaccaccagctttccgtctttgaggccgtagaactttccctggattgtttccccggtgtccagctttacctcaacgtccattccaacgttggcgctgtaggcatcttcgtttgttcccctgctgaatattccgaggacttcaaccccctcagggggcataatcgtgacttccgcaacgttgagcccttccagctcctttaggggaacgttgtttaggccctcgttcaactcaagggtcagcgttttttcaacgactcctatacccacggagttgtaaagggcgaccgctgtcgtgccctcgactgccctttcaccctgaaacgagaagactgccagcagaagaatcacaacggcgccagcggcaagaacccactttttctccataattttcacctcaataggaatcgtcttcaaactatttatacccccaccatcggttcaatccaggccgaacccaaaggtttgcaaatggaaacccttttaaccgtccgctctgattgaggaatgtcaagctgatgaggtgattggtatggacaggatcgcaaaggctagggagataattgagaaggccaaggccgaaaacaggccgctcgttgagccggaggcgaaggaaattctcaggctctacggcgtcccggttccggacttcaaggtcgccaccaacgaggaagaagctgtaaagttcgctcgcgaaatcggctacccggtcgttatgaagatcgtttctccgcagatcatccacaagagcgacgccggtggtgtcaaggtcaacatcaagaacgatgaagaagctagacaggccttcaggaccatcatggagaacgcgaggaactacaagcccgatgctgacctctggggcgtcatcatctacaggatgctcccgctcggcaaagaagttatagtcggtatgatccgcgacccgcagttcggcccggccattatgtttggtctcggtggaatcttcgtcgagatactcaaggacgtcagcttccgcgttgccccgataagcaaggacgaggcccttgagatgataaaggagatcaaggcctacccgatcctcgccggagcgcgtggcgagaagcccgtcgacatcgaggccctcgctgacatcatcgtcaaggtcggcgagctcgccctcgagcttccggagatcagagagctcgacatcaacccgatcttcgcctacgaggacggcgccgttgccgttgacgcgaggatgcttctctgagggcttttggcccttttctacttcccatcttattgtgctgttcccgtggaagattcttttctgcgctatctcatagtttacgacgatgctacggtcatgacaaatatgtacatccaaattccaggattaccgacaataactcagccgacattaaacataatgctcattacgttttctacttcataccagagaaaagcttataaggttcgagaatgtacctcctgtgccattaaagctctccgaggggtagcaatggtcaggttcctaataagacttcatcctgagaatgagccgttccgcataccattcagccaccagcactacttacaagggctgatataccgccgcattcagcgcgttaatcccgacctgagcctgagattacacaaccctaaagttccaaaactatttacgtactctctcttcatgggggagaggagagagcttgccgaggataagagttctctgctcggccgcggaaagggcttcttctacttctctaccgtcgttccagaaattgcggaggcattcataggggggctccttcaaaaccctgaggtcgagctgtggcgggagaagttcacggtggaagaggtcaaggccttggctgagcccgagaggctgagcgggaagaagttcgtgactctctcgccgatagccgtgacgacgaagagaatccagttcgggaagccgaggagctacgacctatcacccagagaacccgagttctacgaacttgtcagggaaaacctgcgggagaagtacgtcctcatctatgggtcgaaaccgcctgaagactttgaaatgagagtcctcaacgccaagccgaagcgcttcgaggtcaagccgggaatcttccagatagcgtggcatctcgtgttcagggcctacggggacgaaggcttgttgaggacgggctatcttgctggcttcggcgagaagaactcgatagggtttgggatggtgaaggttgatgcgcggaaggagagggtgaagaagaaatggaaaggaggtgcggaccatcagaaaggaaaagaggcttgataagttcctgacaaaatccgaggagcaaaaaactcagagcaaagatacagatacgacaactacatcatcgcttttcacgtggacaggacatccatttactgacgcaggacttgttgcactgttgcttttaagtgggaagaaaaagcccgaagagctgagtaaagaggacattgaaaatgttgtaaattttgcttctaggttatatgctcgaaaagaatggagttcagggtacatacacgcaatgatgctcccaaacagtggaattcttatggcaaaccccagtatggccaagaaaagaacaccagaagcaattaaaaagaatctcctcagtttgctcaatgagaaagaagacccaagagccccaatatgtgagatttgtggaagaaggcacgctaggattaagcccgtatatcgctccgactttccacttgtaggcactggaggagttccgaactatttcccctctgggaaagatggggcaaacatctgctcccactgcttattcctagcccagatgatgccattagttgcatataggctctctagggttcttataattcatgcatatccataccagctgatgcttgagttccacaaggaggctatagaagacatcaaaaagagcgaacttgcttctactgcccgggacttcaagaggcctgaaaacttcctgtttgagaaactcacagagataggaacgaagttcgaaatcggtaaactcgaaaatgcctcgattacgctctactacttcgttaacaacaatcagagccaagaaatggaagtaatatacatccccaacccagttctccgcttcgtcgcctttgcggccagagtggacagggcaggatggaagaagatagtctcaatgggatggaacaaaggatgtgccaaaaggctctctaagaaaccagaggaaattcctaagtcttgttctaatgatgtctactcaaaacttctttcaggcgggagcattctaccctacttcatcgatttccaaaaccgcaaggtcaatgcaagttggaggctcctctcattttactgctcggaggtgttgggtttggatagagaagccttggagtttattaaagggattgccgacaggattgtggaaactgtcgagaaattacccgataacaagctctcaaggcgcatcagggagcttgagagggcagagaagctctaccagttcgaaagcttcttcataagagtcgaaaaagatcggcaggagcttggcattcccgaggctctgatgagctttgatgactttgcaagaatattgaccagctacggcgaagatctgaacgtctcctggaagaccgttaagaatcttctccttttccgcatctatgaaaagctccatgacaggctcatgaaggcctccgctgaggaggtcgaagccgaagagaacgaagaagaatttgaggagggtggtgaagaatgaggttcgcaacagggctggttttgatagacgcaccccactcggcgctgaacatgcttggcatagatgaaagcctcgcggacaggaacgttacgagggtcaaaacctttaaacgcggcggaaagcgctatccctacgtctcctcgcaggcctggcgctactggtggcgttccactctgaaagagcacttcaactgggagctttcaccgctttacagggagcagaagcaggtgtttacggcagcaaacccactcaagtaccctgacgatgacgtttttggctatatgagggccttcaagaaaggcggcgttaacgtaacagtcacaagagtctctccgcttaagaacaccccactcatttcggttctccctgacaggaactccctaacagttgacgaaggctatgcttcaagacacgagggcgatcccgttccctatagccaagagttctattccacggtcttcaagggtgcattctcattagacttagatgcagttgggcgcttcacaatcataagcaaggcgggcttcaagaaccttctcacgagagaagatctccctaagaacagaaacaaaaacaacgaagagatattccaggaagtcgaggaaatggaaaagcttgctaaagagcttggagtccagatgaacgaaaaagaatgggttatgccctctgagataaggaagaaacgcgcgagtgaagccataaaagcccttcgcctcctctcgggtggagctaagcagacgcagtaccacacggacataacacccaagtttgtgctcctccttaatgttgaagcaggaataaatccgttcataagcgacgtagtcttcgaggacaaaggagacatcaagtttgacgcagaagctctatcgaagaggctgggcgaccttagggatgtcattccagagggagcaaagctctaccttggctatgacgagggcttcgttaagtcccttggctgggatatgaacgatatcgtccagaagcttgaggagagcggtattgaagtgttcctcggaacagtgaaggaagctatagaggagttcgtgaaagaagtcgaggcgtactacgggtgagcccatgatacgggtgaaactaagggcgtggacggcatctttccgcttcccaacatttcagtcggggtaccagccaactctgccagttccgccgccatcaactattcagggcatactctcggccgcaaaaggggaaccagtctacctcacccagcttccatatgttggctatatcttcaaaagcagtggaaagggagtggatcttgaaaagatctatgcccttggaaaggtcgagaccgatatcatgaagcgcgagtttcactacaacgcggagctctacctttatcttccagatgagtggaagcaatatttcaaaagacctcgctatcagcttctgcttggcagatcaagtgacctggcgattgtcgaggagatcaaagaaaacatttcactcgacgaaaaagaggcaccccttggaggaaccgtagtgcctatcgagcttggagtccctggaatggttcatgcgctcgttgttgaatacgactactccacagttccacgaagagcaaagctcgtgaagccatttgtagtactaccgtatccaaaaacagcggcagaaaaaaggagacagaccacaagaggtttctatgacagcgagcttgggattggagtctacctacacaggtggagcagatgaagctctgctacgccaaattcaatccgcaccagtaccttgagtgccacacactcgatgcaatcaacgtgctgaagagcataaagaactcctttccctggcttgaggagctctcgcctggcatctttgaacgttcattttatgccgttctcctccatgatatcgggaagtgtgcttcaggctttcagaaaaagaaaaacaagtggggttaccgccatgagatactctcggttccgtttgtgcagtttctggacttttcggagagggaacgcaacctgatagcgctcgccatattaacccaccataaaactctggatgaacttgaagagattctcccagttcgtattgacaacataggtcccctcgagttcgacgaaaagcttgatgaactccttgaacgagctgagtacatagagaagacgttcatatcacggattccgaacattgaggcttactattttggtacgacaaaactgccaaaaaggtttaaccttccgccagactggaaagaacggcttagagatttcgatttccaaaagctgactgaatggtatgagaacaacctcgaagctgaaagaggaacattgacgttcatgcgcggcctccttaatgcgtcagaccatcttgcatctgcgggcgaaacagaaatactcctcctccccgacattgtcgagcggcttgaattaaaaatcccaatgaggaagctcaggcctcttcaggttgcggcttccaattcggagggaaacctgctcctaagagcacctacaggatacggaaaaaccgaagcggctctcctgtgggctaacaggaacgctttcagaaacaaggaaggtataacgagcagaattttttatgtcctgccctacaaagccagcataaacgcgatgcaccagagaatgatggatatattttccgacccatccttggtgggggttctacacagctctgcgagcttttatctttacacatctgcccttgagtacaagcgactgagctcgctgtaccataaaatttacactccgctaaaggtcaccacgccatttcagcttatgaaggccttctttggggttggattccacgagatgctgaaaaccgagctttcaggatccctcatcatattcgacgagatccacgcctatgagcccaacgttctcggcataatccttgcaatgcttaaagaactcgaaggtctgaaagcaaagacaatggtaatgacagctaccttaccggacttccttgaagaacttatcacggatactgctgattttagagagctcaagacctctgcagaagaagcggacaagtttacccgccatagggttcatgttatcgatgggggaatggagtctgtaggggagctaatagctgatcttggaattcacaaaaaggtcgaggaaacttcaaggcctggattggtagcatgcaatagcgtagatcaagcggttagagtctacaaagagctgagtgaagattatagagttctgcttcttcacagccggtttacatacggcgatagagagactaaggagaagttactccttgagaagatgtccgagtacgactttgttgttgccacccaggttgtggaagtttcccttgacctcagcttctcgacgatactaactgagccggcacctctagacgcgttaatacagcgctttggacgcgtgaataggcaaggttggaaggaggggcggattgaggacgtctacgtcctaaccaaaggcgcagacgctgatagaaagatttacaatccctatgatgttgttgaggagagcttaaagatactccaagacttcgatggtaaagaactaagagaatccttaatccctgagctagtaagtgaggcttacgcacccgtttccgacgagcttgtagaaaaggttcgcgactatcaaaacacagctcaagatgtcttcaacaatgtgaaacctatgaggacaggtgaagatgaacaaaagttctatcagatgtttaacggtctcgaagctgttcctggggtttatcaagggagggtcagcgaactgcttgataagaaaatgggtatggaattgtacagatatcttattccaatccctatgtggttctatcacgctgagcggaaaaacttccacaggctctccgataagggctatgggaaatacattcttgttgcggagcttgagtacgatcccaataaaggactccagagagtcccgttgagtgagggcgatattatttgagtgattacagccaaaactataaaaatcattacagtataaactgttacaggtgagactgtaatggagaaccccttcagatacggcgaaccggtcgtcggtaaggactttgcggacagaaaaaaggagcttgaagagctgaaaatggaaatgctgagcggccagaacgtgataatttactccccaaggcgtttcgggaagagctcactcgtttacaacgccattctctccctaggagaccggattgttcccctctggatagactgctacggcgtgctgacaaagaaggagtttgcggagaagatagcctctgaatccctgaagcatttaaagttccaaaaccttctgaagagtgccaaaaggctgttcaaaaaagttactccaaaaatccgtctcggagatgcacttgaggtcgagttcacctttggggaagaggaaactgcctttgaggagtctctcgaactcccccagcggctggcagagcatcttgagaagagggtagtggttgttttcgatgagttccaggaagttgctgaacttggggaggacgtcctgaaaaaaatgcgctcgaagttccagtggcagagggatgtggccttcgtgttcattgggagcaggaggagcatgatggagagaatattccgctcggcccagagcccgttctacaacttcgggaggcacatggttcttggaaagatcccgaaggacgagttcaaagagtttatactggagaaattcaaggaaacggggatcgaggtcagggagaacatcgtggatatggttcttgagctaactgggggccatccctattacactcaaaagttctgccaccggctctggtacgtcggaaagctcaaaggaagcctcgagatggaagacgtcgaaaagacgtttgaagaactcgttaaagaaagcgaagccagctacatagagatatgggactccctgccgctctcccagaggaaggttctcttagctatagcccggggagaaaaggatctgtactcttctgagttccttataaggtacaggtttagctcggcttcctcagttcaatactcaatcaaggccctcagggagaaggagctgatacaccgcattaacggagaatttgagatcagcgaccccttcctccatcactggcttctctggaggtttggaagtggaagataagtattctctcgacgagctcctcatcggcggcaccgaggtcaactacctcttcatctgcccgaccaagctctggtacttctccaggggcatcacgatggagcaggagaacgagtgggttgatctcggaaagttcctccacgagaggcgctatgccagcgaggagaaggaagtccagatcgggagcataaagatagacttcatcaggaaaaaggactacatagaagtccacgaggtcaagctcggcaagagcatggagaaggctcacgagatgcaggcgctctactacctttactacctcaagaggctcggtatcgaagccaaagcagttcttcactatccaaagctcaacgagacgaaggtgataaccctcgacggcagggaggaagaagtagaggcggcaattggagaagtccagaggataaaatcactccaggctccacccgagccggtgaaatcaaagaggtgcaaaaagtgcgcctactacgagctgtgctgggtttgagtagtagaaactctaatatagtagatactctaacttactaacaaggaggtgatactatgcctgtgacaaaggtaacccggaactatcagataacgctccccgcggagatcagaaaagccctcggaattgaggagggagagttgctggaggttgagcttgaaggggaaaaaatcgtagtcaagaggctgaagagaaggaggaaaaccctcaaactaggagagaggctcacgcccgaggagattgagaaggtcattgaggagggcatggaagaatgcatgcagtgatagataccaacgtgctcctgtacgacacatttgaagatctcccatttcatcacaaagcccgacggcttttggattcgctggatcgctggtacgtacccccaatagttctgcaggaatacgtttggttcttcaggagaaaaaacctacccgtgaagcttgcaaggtccatgcttagtgagtatttagatgatcctcgctttaacaggttgaacgataacggggagtctatagtctacgcacttgagcttatagaaaagaactccttgtcactatctcgttttaacgatgctataatcctgtatcacgctctccaaaggagctatccccttgccacgtttgacaaaaaattcagaaaactggcagttaaaaatggcgtggaggttctcccagcgaaagtataattggtggtgagaatgagaaagcgctctctcaccctcttttccgacgggaacctcttccggcgggagaacacactctacttcgagaacgcgcagggaagaaagcccctcgccgttgagggcatctacgatatctacgtctacggccacgtcaacataagctcgcaggccctccattttctggcccagaaggggatacccgtccacttcttcaaccactacggtcactacgatggctcattttatccgcgggaaagcctcctttcgggggacttgataatcaagcaggccaaacactacctcgatcaagaaaaacgcctcatccttgccaaactcttcgtgagaggttccgctctcaatatggagaagaacttgaagcgctggaaggttgccgatgggttttcggggcttttagatgaactcttcgaagagcttgagagcgcgaggaagataactgaggtcatgaacgtcgaggcaaggataaggggggaatactacacccgctgggacaacgccctgcctgaaggctttaagatcgtgaaaaggactagaagaccaccggagaacgagatgaacgccctgataagctttctcaattctcgcctttacgccaccatcgtgagcgagctctacaacacccagcttgccccgacggtgagctacctccacgagcccggcgagaggaggttttcgctcgcgctcgatttgagcgagatattcaagccgataatagcggacaggatagcgaacagactcgtgaagcagggaataataaagagggagcacttcaggggtgagctgaacggcgtcctgcttacaaaggagggtatgaaggttgttttgaaggcctacaacgaagagctgggcagaagcgttaagcacccaggacttaagaagaacgttacaaagcagagacttatccgccttgaggcgtacaagctgattaagcatctcgttggggttaaggactacgagccactggtggcatggttttgaggtgattgataatctttaaacagacatagttagatgccgcccgcaaaatggtagatatatcaccctgtaggagagggatctgtgtttgactttttctaaacatctttttaatcctagctaaacactaactaaacgtaaactttaaattcttgtaatgcatttactacaatcgaggtgaaccgtatggtaaagactgagtatgaaggtatcgtaaaaatgctgaggttctttgtccagacgaagaacttcagctatgtggacaggattggaaacgcactgaacccggaacctgttgaagtggcccttctcgaggctctcagggcctttagatcgatcagagaaagtgcttccattgaaggagatggaaggaggtacgtggagaaggatgggaataaaatccccatgccgggaattccaagcgatgaggaagtaaagatattcctcgacgatgttcgctcggatatgggagttgcaaaactcgtggctacccttgccctcgcgtatccctcaaagaaagaaaactctggaggtgatgagtgatgtttttgagcgttggagttaggtttgaggccaatgttgaggccctcaacatggtcgaaacagccggaaactacggcaagcacaggcgtgttccctacctagtcgaggaagacggaaagctgaaaacggtctacgtgcccgccatgagcggcgaaagcctagcccacgcataccaggagcacctcgttagggaggccctctcggcaggtctacctgtctgtgatgactgtcagagaggcgagttctacaagtccatggacgaggtccacttcgcccccaagctattcaatagagaagaagtatttgagagtgttctggccaacttgtcagaagtagtggatatcacaatctccgttttatcttcagagattgaaaaagagcgcaataagaagaaacagaacgaagataagatcaaagaacttgagaaattcagagggttcatggagaacttagtgaagtccgagaagcctcgagactatatcctcaaaaacctctcactcgcttcacaggtctttggcaattatgtaatcaaaaaaggcatcttagatttgcctcctgtcaagatagaagacataattgtcaagagctgtgtcgtagaagatgttggagggttcctatatactggttcagcacccataagacggagttcagccttccaagtaagctacgccctcccagtcaagtcggtcgccctcttcgccacttccgagccgcaactccacgctaggcacgctcagatggatgcatcgagcaagaagggcaacgcctccgagcagatgatatactacgttgaaactggcaccgcactctacggtttcacgttcaacctcgaccttgacgcaataggtgtgagcgcgataacatcgaagccaatactcgatgagaatgagataaagaagagacgtgaggcgtctctaaaggcgctcttcagaatgctttcttcgagccagtttggagccaaactctcccgcttcttcccggttgggggaataacggagcttattgtggcagtcacggatcatccttttgtcgttacctccccgatttacgacgactacattgagaaaactcagagacggctgaaagtccttaagagctttggggaggagagctttctcgtcgtggcgggagaggagaaagtcccagaagaggctctgaaggaggcaattgactacctccacgagaaggaagccttttgaggtggttcccttgactttatttttgaaggttcagctaagacccacgggaataatagccctccgtgccctcccccagagcaagatgcgcactgccctacgctacgttccaccaactacgctaataggggcaatatcatacccccttctccacatcagcgacgacagaggagagacaatttacgaaaagaaaactttcaagagcaaagcagaatcagtaattggcctcttcaaatgggtcaccattaagacagagggcagaccaaagctctatgggtctctactgaagatcaacacaatttaccgcggaaaagttcagagcgcagtgacttcgttcccatttgcagttttctatggagagtctaccaactcactcacagccgcttattttgttgacgaggacgctctctctgagagtacctacagtgcaaaagacttagagagagccgcatggggaataacgaggctcggctcaagggaatccatagtcagcgttgaggatgttaagatgggaaaggccgtatttcgggaggcgaataaggttagaacagcgtacgcgtttccctttaagggagtcaacgtgcatggaaaaggaaccctccaggcagttgtagactggcgcttaggaatcggcgactactccaatgccaagcgcatggtaatgttttatccggaagaaacagttgaagtcgaggggggactgtcgattgtggagctcgacggggaggtggttatccttgctccttgaggctctctcaagctatccatacgaaggtttgaccaaggaactgctctccctaggcatgtcgtgggttgtaatggacgcaggtattgagcctgacgaagaagaactcgccgatacattggaaggggcattgaaatccctcggtagtagggtgaagattcacacatcaaaaatgggcagaaacgacaggagttcctttgacaaggttctaaaggcatggttcgggaggagtgcccctgaaacttacggtgaactctttgaacttgtggtcactgagaccataaagctgctcagagacgggaatatagaccctggggagtctttatccacaataaaaacagacaaaaacggaacctatctcggaatagcgtacaacggggagcaagccatcctgccagcaataatcaagcaaccagagtattacgagcgccagagcggttttctaagtccgactaccggccagaaagcccagatacgcatggatcccctctggttctctttcatggccctcggtttcttcacgagctttgcgggattcataggggggaagtattacctaatgacgaagcctggaattgaggttttctggccatacgaggttgaagagatcatcgagaagggcatcctgccgctaacaggtgcaggagcatcgggtagaatttctctgagcacggaggagctctatgagatgaagttggcaatgaagctcgccgaggagggacgcgacgtcattgaggaagtctatcccgtgacactacatctgataagccttgaggggcaggtttacaccgagctcaagaccacacagctcaatttgactggattgagcgagtatatggaagaatacgtgaatagaatagagtctgctagtatgggtggtttgcccattctcgtggaacttaaagcgggaaacgccacgattcagaagtaccccctctgggcccttgtggatattgcagaaagagaactctggaagggtgttaacggtgacggcgagatgctagcatatatctttgtcaaagacctgtacagggccattaacagcggaaggagagagttaatcagagacgccgttttcagactgttccgtcagggcagggcccttctggagggaagcggtagggcgagcggagagtttcggaaggtcatgaaaaccttcatgtggcaggaacacctggaggtgcttctttgagggcattcaagaaggcactccagaagctcgcggaggcaaaggggtttaagccagaaaaaaggcccctactagaggaggcttttcattttatcaccccctccgagaatccgccttttttaatcctccaggcaccaacaggctacggaaaaactctcctaagctttgccctggctgttcactccctttgggatgcctccatctttgacagggtgattcatgttctcccgatgcgttcaatcatagaggacatccagaaaacagcggaggatgcattcggattctccagaaccaagatgatgggttcgagcggtgaattccttcacctctttccgctcaacataaccaccgcggacacattcacgtgggatttgctaaagctcaacacaaagaagaggcacaggattaaagctggcttagagttcggctacgattacttgacccaggcctcaatactgacctcgctggtaatctttgatgaggcccacttccttcttgaggatgaatcaatggtgaccgcatttctatcagctattgagttcctcacatcccagaaagttcccatcgtggttatgacagccaccttatcggaagcccacagaggaatcttcgagaaatatgcaaagaaaaacggctataacttttatgttttatgtccccaagaagatgatccgttcatcgagagagagctgaaaaaagaagttgaaattgagtttagggaaggaaatccccttgattttatagagcctgggagaagaaacgcaattatagtaaactcagttaaacgagccgttgatctgtttaacgaagccaaaaacaatccagaaatctggcctgaaagcgagagaattatgctgatccatggcaggatgactccaagtcacaagcgggagcttatcaaacgcttaagagagtggacaaagaaggaaaatttcctcctcatcggaacacaggcagtcgaagccggcgttgacttttcagttgaccttatgataacggatagggcgcccataaattccctcctccagcgttttgggagagtggccagatatggcagtgacatgaaagctaatatatttgtccttgaagatgcaccttgtgggccatatccaaaggataaagtcgaaaagactgtgaacttgatgaaggaacaccagatcctcccacgggtgccagacacatatcaggcaatagttactgaggttcacgggaaaaagccaatatctgtcaaaaagaacgttaatagagagctcaagagaacgcttctcaagcttatgtcagatcctactaaaagagcaccccatgttttaagctcgatagagcggttaacagctagtggcactccgatcatgagaggtttcctaattccgctttcagtagggggagaagccgtgctgataagcccctccaagctggtggagctttactacagaggagtcgtggagataagaggttggaaggggaatatacggagcttaaacgatgcctacaacgtggcgaaatccgttgcactcggaaaaaatgttgaggtcgtttttataggcgagtatgactgggagcgtggtatcccatgagtacgtgcgcattttttgagaatggagcctgcgtggaaccgatggaagcccacataagaaagggccttgagattatcgacgggttataccttcgtaggggctatgctcgcttcctgtccagaattttggacgtagatcccaagcttgcgggagagcttctaagaaaggcctacatccttcacgacgttggaaagtgccttgaagaattccagaaaagaagggcaagctttggtttccatgagttctactccgcgcttgtggcgagaaacgtttttggaaaatatggggccatagggaatgtgatgtccgttgcgatactacttcaccatcacgattggattagaggtaaaagtcccaaaagaccagggaatcttaggctttgtgatgactgtatagccgtgcttgaggagctttcaggagaaaagctacctagggaaatccaatggaaggagtggaatgaatttatgcaagaaacaaaagaagttatgagacgaaatctcagaagcgtttattcactccttcttcctctggttgttgcagacaactacgccgcgcacttaaataggggtggaaagggcagcacacttgtagaagaaatttttgaagtcttaaaagttagggggtgggacgttgctggtggtctttcctgtgggctttgatgagagatttatcattagggcattagtgaggaagagagaggatgttgatggactcgaaccgggagatacgcttttggcaatcgttccagaaggttatcggagtgagcaaagaaccacaaacgcaatcaatgcaataaaaaacatagcctcccctataattggagaagagcacatcatgattctggaagttcctcttaacggcgaggagatagtaaccaggatatcccaagccataaaggacaacctaaccgacgaccgtctcatcctagcggttctctcaggtggtatgaggccactcatcgtatccacgctcctggcacttttgaacattgaggatgttagggttatagtggaaagtgacttcgagaacctctcaggacatatttctcttgaactggggctctttctggcgccttccaacagaagatgggcaaagataatctgcggcttccttgagggtaaaagtgtgaggaagatttccgaggagcttggggtttctccagcaactatcagcaacgagctgaaagaaatgacaaaatacggccttgttaaagccgaaaagctcgatggaagggctccaagatataaagcaaccaatgccgggaggctctacctgaagatcaagggggaaaactgccatgaggattaaactgctcctccgcttcaagcctccctttcttatcccctacaactacccgcgctacctctactccttcctcctccgtgccattgagctcgccgataaggaagtcgcgggcaggattcacaacaacaagagagacatcaagttcgtggcctctaagttcatgcctattgggagcacaaaaaggcttgaacagggccttcttgtcgagtcaggaaccgtggagctttacgtgggttccacggaggacatcatccttgaatctcttgttagaggcctcgggcagggagtaggaatgctccacgtaaggggtcagagactcctgagctacgaggccgagctcgaagagatccctaaacacctctctggaaagcgctttaaaaccctctcgcccgtcagtgtttaccacaacaatcctccaaatggatttcggcagtgggatctttctccagttggtccgccaaacagcccctttgagaacgagcctaaggtttggaaggagcttctctttgaaaaccttaagtcaaagtacatgatggtttacggcgagccttatgaggggagctttgacattagagtcctcacaaagaagccgaagagccgcaggcttctcgtcaagatagatgagagaacaggaaagccaatctacgcccgcgtctgggagtttgatttcaagatgtggggcgaggaagagctccttcgggttgcgtatgagcttggaatcggaatgaggaaccctcacgggtttggtatggttgaggtgatttaaatgtccctccctgcagaaatagaggagttcaacgagggaatccgccgcgccgtgagtggaagccctatagtggagaggaagatatgggtgacctcgctgagccactgccttaggaagacggcgctctcgatatacctcaacacgtacaatccctccagaagctgggaggctaggataggtactgccctccacggctggctcggggaagtcgttaggggcgcggagttcgagattcccgttgagcacgacctcaaagacggctggaagctcgttggaaaggtcgatgccgtgaaaggcgattacctcctggagtttaagttcaggggtttcgagaacaacgattcgaagaagaattcgaaaaaatcaaagaaaaacatcgacttagatcacgccgagccgtccaaagaatcgattgagcagataaacgcatacatgggcatcctcgggaaggaaaaagggtacatttacattttcgacaggaacgggcttgacttcagggtctttgaggtgacctttaacgaaagactcttcaggagattcatcaagagggcggagaaagttatagaggcagttgaggacttggagaggggggagttcccaaagtggatatccaccgtcggcaacaagacgtgggtttgcaaccactgtccattcagacccatatgcgccgcgatagataggccatgggagaagtctagataatgtcctcaatcgggttcttctccactcccattacttctctttttggcatcgagcgaagtttgtatatgacaaccgaatcctcatccccgtctatgagttctcctattccggcttttatgcgctcaaactctgctagagtaacctcgccttcaaaaacgctgttctggacccagtgaaggtgctggcggagaaacttcttgactctgttcacgcgctcgaccgagacgtcgtagaccactatgatgtacatgccaccaccgtacaaactccggttagttccttttatattttcggtcctatcacgtttaaatcgtccagttgtctgaactgaggtgtattagccattgaattttcaaaatatttgctgatcagcctcgggaagtctttagtaacgtttggttactatcaaacgaaaagttatatattcagcaaaaatcgtgacgaaattttttcggaattctgaatgggggcactttagggcctttttgtgcccgttcctaattctgacacgatatttttggcaaaaagcgtctgaaaaccactaaagttctttttaagactctaaagatgcctgggaagtcttctgaacgttgttgtgcatgctcttaacggaaggaggagaacttgtttctggctgaaaaaaaccgctcaaaagctttttaattggggaccgttaggggctttttagagcaccctttgcggaaaagcttataagatccgagcgttcttagtagtttgtagggagaaaggaggaaaaaaccgccctgttgcaataagactctaggagaattgaaacgttaaggcgataaatgtttcatgttctgcttcgggtagttgcaataagactctaggagaattgaaacgtccacgcaaagaaaaaggtaaagctcttcaaactcaagttgcaataagactctaggagaattgaaactcaatgactctgcccatctcccttttcatgtcgagaagttgcaataagactctaggagaattgaaacacgaagatggggagatggcttttaacgggttcaacgagttgcaataagactctaggagaattgaaacaggtttttcattggagctatctcatactggtgctttctgttgcaataagactctaggagaattgaaacgagtttgcgagggctttctgagtgaggtaacgtgaaagttgcaataagactctaggagaattgaaatattatcaaggaggatttaaggcaaatactccgcgaaagttgcaataagactctaggagaattgaaatcaattccgcgagggtggtagggttcgggttctttggttgcaataagactctaggagaattgaaataagggtacggcgcagaggccagcggtgaggaggatagttgcaataagactctaggagaattgaaattttgagcgtcaatcttcgcctgctcttcatcgccattcgttgcaataagactctaggagaattgaaatgaatctggacatcagacatcggctttcacctccatcacgttgcaataagactctaggagaattgaaatcgccttcttgatgtctgcgggcttctctatatctatgtgttgcaataagactctaggagaattgaaatcaatcctcctctcggcctcaggagtgaacttcggaaaagttgcaataagactctaggagaattgaaatccgtgctttggctggtggtgtttgcaggggtggtgccgtgttgcaataagactctaggagaattgaaattaggtgttaggtgcctcggtgacgtcacggagcgcccgttgcaataagactctaagagaattgaaagtacgtcatggccacggcttccctgaatgcatcccgcacagttgcaataaaaactctgagaaaaattcaaaatgaattcagaaagagaaagtccgagaaaaagatcctcagaccttgatcctcttccaaacagttccctgcggcgtgtcctcaagctggattccgaggtttctcagctcgtcccttatcttatcggcgaggtcgaacttcctctccttcctgagctgggcgcgaacatcgatgaggagctttatcagggcctcttcttctccagccttctgctccctgaagtagtcctcaaagatgccgaagacctcgctcaccatcttaaagaactcccaggccttcctgagaatgctctccttgggcttttcgacctgcgttaggtagcggttaatcgcgttgctgacctcgaagaccgctttgagtgcctcggccgtgttgaagtcgtcgtccattgcatcgtagaacttcttcctgccgtcccttatggcctcgtaggcctcaaactcctcctcgccccacttgaaggatatctccgctctctccatcgccacgcggatgttctcgagggtgttgtagagcctctcaaggttgttcttggcgtgctcgaggccctcctcggtgtagtcgagcggcgacctgtagtgtctctgcaggacgaagagccttattacctccgggtcgtagcgctccagtgcttccctaatcgtcacgaagttgccgaggctcttgctcatcttctcgccattcaccatgagaaagcccgtgtgcatccagtagcgaacccactcgtggccggtgcacgcttccgtctgggctatttcgttctcgtggtgagggaagatgaggtcgcttcccccgccgtggatgtcaaaactctcgccgaggtacttggtgctcatcgtggagcactctatatgccagccgggccttccctcgccccagggactctcccatttgggctcccctggcttggccttcttccagagggcaaagtcttcggggttcttcttgccctctcctggctcaacgcgcgcgcccttgacgaggtcttccagctttaccttgctgagctttccgtagtctttgaacttcctgacttcaaaatagacgccatcgctcccctcgtaggcgtagcctttctcctggagcttccttatgaagtctatgatgtcctggatgtgctcggtgacgcgcgggtagatgtccgccggcttgaccttcaaagctttcatgtcctcaaggaagtatttcaggaatttttcggccagctccttcgggtcttcgccggtctcattggccctcttgatgattttatcgtctatgtctgtgaagttcatgaccatgagaacggtataccccttgtgctcaaggtagcgccttataacgtcgaaggcgatgtaagtcctcgcgtgaccgatgtgtgtgtaatcgtaaaccgttggcccgcagacgtacatcctgacctcgccttctctcaggggcttgaactcctccttctgcctcgtcagggtgttgtagattttgatccccattcctaccaccgggcgcttttgggagtggctttttattagcttatcgccgcaggtgtcggtggagtgccataaccgccatactaactatgagcgcaaccaggaagaactcttttaagagctcagtgttctcattgaattgcgatcctttggagaccatggacgatgccgtcagtgaggaatgtgtgccctcggagacgttgaacgtcgggctcgttgaggatgctttatctttgaggatgtagacgtccgccaggttctcaaaaccgtactctggagaaagctcgaagtcttttagcaccatgtctggcgtcactttcagaatgggtagcggaattattgatgtctcattgaagtaaaagacgtagaggggtttctcaaacatatccttgagcttctcccagggtatctggtcatagtccattgaggtgtttgcccattcgataatacctgtagtggagccatttagaaggaagggataccccaggtagagcttataggtgaaattgagctcaatccgagtcgtccctgttttttcccctggaactgcgttcagggtaaaattgttctctatcacgtccatctcaatggctggaactatgacgatgtcgtttccgcgggagaacgcgatcaggttgcttagctccttctcatcccacagatacggagctatctctcttatttttatagcgtaagtccgatttttaaattggaacaccacactgtccccttctaccttccctcgcactgggttggtcgtcttccgttctgagatcgaattcaggattttggtgaggctctcgttttggccttcgtactcgtagtagccgccgatgtagtgggctccgctcgagttcacgaggtagaacctgtcgtactgggttgtcgggtcatactcaacggtgcactgtcccaatgagtggggttttaatccgtagtatccagttgatacgtagatgaaaccttcactggtgggcattatgattattctgaagcccgaggagcagaaactaatggttagagtggggtctgcctttgaggaagggataaaaatcaggaaaaacaaagaaagcactagcatcaattcaataaaatttgagtgagtatttctgggataacttttcactgcctatagcacccccattctttttagatagtaatcaaatacgatatcaactacatctagagttatcccgaaatagtatgctaaattggtgtccagtctacgaagaacttctctttgaacgaggtaataatcactggcaagtttaagacattgctcatgattgccgcaggtcctacaatttccattgccctttgttaatatacattcatcggcttccatcaccatgtgtactttagaggaactcatattttttaaagtccttaaccactctttaaattcgtaaaatgagaaaggataccttcctgaattgttcatatagtaatttggttgcacgaaaatgagatcaaaggcgtcaagagattgaggtgaccaaatgtcagtattgcttaacgcgtatgtatgtgctgatggtatccagatgaattttaatccgtgatcgtgaattttttcggctattctcaaaagtgcctctggatttatcactgagttctgtttccccttccagtaatctttgaacatccatgcatattctagatcccagtaaaaccccaaaaggttatcttcttccactgatagaaccccatcaacccaactaagccaataatccccagtctgaatattccctcttcccagtagaatatcctttgagggcatgtaatatggtattgaaacgtaatattctatctcccttttggccattaactttgtgaaacttgcaagctcttttccatccctatatccattaccgctgtaatttgcatctagtccctctcgagttgtaaagattgcaatatcgaatctctctttaaaatcataaactgttgcaggattcttgcttagtgttcgtatccttgagatgtacttgccagtcgaactatcccacttgatataccataatccgaatttcatgtagcatcatcattattcaatatcaatattctacttataaactttttgatattatttatataacttcttagtattaaaattcttcagtaggcactatttctgaaaatctgcaaaagcttaaaaaccgaccacccaactgggtctggaaaaggaaaggaggtcacgaaaatgaccaaggttcagaagggtgacgttatcaggctcaagtacaccggaaggataaaggagaccggtgagatattcgacacaaccgatgaagagatcgcgaagcaggctggaatctacaaggagaacggcgtttacgggcccgtcccgatagccgtcggtgctggtcacgtgattcagggccttgacgagcagcttgagggtcttgaagtcggaaagaagtacgagatcgaggttccacccgagaagggcttcggaaagcgcgatcccaagctcatcaagaccttcaccctcggccagttcaggaggcaggggctcatacccttccctgggatgcccgtcgagatagagaccgagggtggcaggaaactcaggggcagggttctcaccgttagcggaggccgtgtcagggttgacttcaaccacccctacgcaggcaagcacctcgtttacgaggtcgaggtcgttgagaagattgacgacccgattgagaaggttaaggccctcatcgagcttcgcctgcccaggcttgacgcgaacaaggtcgtcatagaggtcggcgagaaggacgtcgtcgttgacttcaccccggttagggaggaggttgacaagggcaccctcgttctcggcgagctcctcctcgagggcgacctcaagttccttggttacgaggaagtcaagttcaggcccagcgttgacgagcttctcaagccgccggaagccgaggagggcgaggcctctgaggaggaggccagtgagacaaccgaagctcctgaggaaactgaaaccgaaaaggcagctgaacaggaagcaatcaaggaggcccctgaggaagagagcgaggagaaaggggagaccgaggagagtgcggaggagtcggaagctgaggaggcctcagaaaaggctgaagagactgaggagaaaaagcccaagaagagcaccaagagcaggaagactaggagaaccacaaggaagaagagcacaaccaagaagaaagccaaagcagccgaagagaatggtgaagccgaggctgaaaacgccgaggcctctgagtgaggtttttaacccccgttctttttattatactgtggggagaggttatgaagtctcgctttgacgttctccttgaagacctcggcggaaggttcacgaaagatgacgtgcctaagatacgcgacgccgtactcgctctcagacaagtgatggagctccccgtttcgtatctaaatccctcgagcggctaccatcctgttgtcgtgttcaaaaagcgctttgggcgggtagtcaaggaagtcccggtttccctgcttgagctgaagatcctcaaccgctacaacatgcccggctggaagagggtcgtggagttctggctggacaacgatatagccgtccacgaaagccttctcggggttgatgccgtgcttatcggcgacccgagaaccctgaacagaatgggggacgccctcaggagaatagcccagtacatgagcgttaggccgagaaagctcgtcctgttttacagctccgtctatctggactacggcggcggcaggtatatactcgtaacccttagaggcaacgacattgagctcgggcttatcagaatgaagctcagcgaggctgctagctaccttggaaaggccgttgaatacatggactcggcctttgggaacaagaacatcgagttttacaaggttctcttcacgtatgcaacgagcacgtatggctccttcgactggttcttccacaaatacgtctatcccaatctgaaccccgagcagagggagttcttcgaggagatgcaggactaccgcaatttcctcaggcttctatactcccacgtgaacagactcaacaaggacagacttggtgattttgtcggaatcagggttgtcagaaggggaaacccccaccggccgcttgagatagagatagcgttcacaaaccgcggcattcagattggaaggtacgtcagaacggcgcacataagcttcatggtgtgagccttgagggaagttttgctcttcatacttttactgccccttagcttcgtcccatggcttattcatacctctttctgggaccacgttgccatagtcggcctcttttacctcctaattccggcggtagtctcaagacttatgggcttccagtggggagaagtcggcataagcctaccaaacaggactggtctaaagctctttgccgttctctttctggcttcaattccactgagcatctacgggagaagcatccccgagatgaggtcttactatccggtttttccgtattcaagcgcctttgacttcgttctgggtgagcttgccatggggattacaatgctggcccacgaggctttttatcgaggctttcttcttttccctctggcaaaaaagaacgagtggctggccgtaatccttcaggacatcccctatacaatagtccacatcggaaagcccggaatagaagttccctacgctttcatagccgggatagtctttgcaaaaatggacttaaaaggagagagcttcgtcccaagcttcctccttcactggctcggttcggctttcttcgacgtgctctgcgcgctctaaatcccaacagaatatagtttgacgagcgactctccacaacaaagctttataacactcctaagcaaaattataaacggtgaggattatggatttaacatcgtgggctcgtgaaaaagcactatggaacagaaagaactggggagaatacaccaaccagctttctgagctctatgtggctctttatcagttcgagaacttctggaagtggacgaaaactgaacttcatggaaaaagaatagcctttcttgatgatcacctaaagaattccgcaagaatgcttctaataggtggagaagactctccaaatgccataggaagatttatgtattctttgttcggggttcgcgcccttggggcgaacgactatgatgatacactaaccctctacaaaagaagaggtgatagagtggcgttcgtcgttggtgatctagtactgggtacctcgcatgataactttgaacaaatcctaaaccagcttaaggatcttattctcagtctcgggggccaagtaccagagattcccaaggaagagtttctctcatgggtctctccagatgagccgaagcttgtggagaaattcaatcatcttctaagaaccggatgcgctctgctgcccatgtttaacccatactccgcaatttcgtactatcttgacaccgctcccttgttacacattgaggagatactcaatggagacatccacagcctaagagaactctcctcgttatggcgcattgggtacatttacaactcaaagctcgaaaaggttgatcttgagaaggccagtgaagaagatgtggatgatttcttctggctaagtcattttaacccttccccaccgagcattccagccttaataaacgctctctttggggagtttggagatgtctctgcgattctttcaaggctctcaagagatgtaaggagcgcctttaaagagtggtggaaggacaagtacaactttgtaacaaggacgtataacttggaaggttgggacatatcggaagataccagggggatattaagatacattcaaaatggtgatgaatacagtttagtccccacttcaggcacttcatttgtacttgtggacaatgctggttataagacctatacagccactattcctctctcaaggttcatcgaggagatattccccctcatctccgcggggtacatcaggacacccaattgggtgggcaatgagtcggggactcctttagagaagagatatctcaagataaaggtcaacagaaccgaaagcaggtatggaaagcagttttattacgatggtgggtcttgggtcatcaaagggcttctttaggtgggaatatgaggagaattcaaaagaaaaagccgctgatccaagaggcccctgaggaagatgaaaaactcaaagtcaagaaaattccaagcactataaaacaaccaagctctagtgggaatgttcctcgctcaatggatacccgcaaaacgtcaaaaaatgaggaacaaattgccagaacaccaatttctccaaagagaaaaacttctgagagaaagtttagcgagattaaactgatctctccttattcagcaatggagggtatttcactggaaagcgatgtaaatcctgtaacggctccacacgagatttctctactcttccaagaagagaactttccacgagatttaagtatagacattagaacatccgaaaccggggaagaaccttcttttaggtttaccctttcgcccccacaggagcttagaatcactgttcattcaaaaattcccagcaaacactctaatccacccccgtttggacgtggagtccccgccgatatggtctcacatagtctttccctgtccctcgaatttactcaacatcaagttaggacaattacagagattcctctatccaatacagaggttccaaaggagcttaaagtctctttgagagtgtccaagagctcaaatgttggtagaatggagttccccttaaaatccgagacttttccaaaagctgaattcaaagtctctttgccttattatgatcaaaggtcaatacagctcattgacctaaaaagaaacgctattgcccccttacagctggatttgaattttgaaataaatccctacttggcagatatctccggattcgttgagtgggaggtacgaaagatgagcaacgttttagataccctgcttggagtgaggggaaaattcccccatggggcagacgaaatcactgacaaacccgttttcattctactcggtcaagaactaggagagtggcaatggccactcctgcgcattctttcggagatatacctcgagtataagggagaaagacctagaccgacatatagaaccctcaaggaatacatggacggtattgagagagttgattccactaaggatgtttatctaatgacatccttttcacccgcatcaaagatagaggtcattgactcaagaggagtttcacttaataagctcaagacgttcatatacaaagttgcaggcaggctccagaccagttatttaacaggtctcggctttttagtaacgataactgataggcttagtgtggagaacttggaagatgtaatgtccagctttagagggataatgcatacgataatccttccagaaacggaaagctcagagattttgccgagatatagggcacttgtttatggggtaactggaattcgggacgaagatttcctaaaagctgaggaaaagatggacgagtatttaatcgagaccaccaaagtgttctctccactggtgccaaaaacttcctcggagggaacccactataagctgaagtgtgcagttctctcttatattctttctcaggagatcgaagagtacgcagagtcggagatactagacaaggctattgaacttatctcaaaccaaattgtcaagatagaagaacctctagaaacaggcataattcctgatattcaatgggcagaccactcagtgattgaaatcgagactctgatcggaacagagaatcccttaaagaaaattgaccacaccgttgaaaagtacgtagtcagtggaaagttgcaacttcctgaaaatgaactctggatagtccttagaccggtgtccgcactcatacaccaccataaaatcaaattacgccagaagatatggcataagctgtttggggaagtcccgataaagttcaaagttctcgtgtgggaaaatggctggaaccttgtggatcttggtgaattcgttgaagatataaaaaatatagccaaaattaagctttgaaacaccttggaactaactcttttctttaccttgaaccctcgcggttccgtagccgacgaagagcaccctgtccggatcaagggcctttaggacctccggccggtgggttattatgagcgcggtaatccctgcctcgcggattatctcggcaacctttctggcgaccctcatggccgttagagtgtcaaggtgtgccgcgaactcgtctatgaggagcagatttggtttctcagcgaggagcgaggctatcctggccctctccttctgacccgtgctgagctccgagtactttgccctgtaaaggactgcgtcactcagtccagccctgttgagaacttcaactgccgcgttaaggtcgcctatcttcctgtaaacgtgctcaagtatgctctcagtcccaaagctcggctcgaactcgccgggtatcataacggagaccttaacgttcttgggaacttctatctctccagtcgtcggcctgaagcgctcctcccaccagccgttggccgcccccaaaattagcctcaggagggtggtcttcccagctccgctcgcacccacgaccgctatgagctcgccgggttttatctcgaagttgaggttcctaaggacgggcctctggatgacgcggtgcctgacgccgaacgcctccaggagttcccttatctcatccggaaggcccttcacgtcgagctcgctttcgaagaccttgctcacatccttgaatactatcggcccgctgagaggctcgacctttccgtagctcgggcgccagagccttccgtcctttggggcgtacggatcctccttaaggaagcgctctatgtactccttcgcctcctcggtcagagggtagaagagaacgggcctcccgcttgcagtctcccagaggaacttgaagcccaccttctcgaagaacgggttgtagcgggccatctgggctatggtctctactatgtgctttctcttcctcatctccggaattctgcgctcggctatccactcgagcgcggccttaacgctcagctgaccgaggccgtcggagcggtagtcggggtgaaccacaaccctggctatcctcgccccagctgtgttcgtctcctttagggccttccacttggcctcctcccagaggtacgagcgggcaaccctcttcttgtacttcttcttcagctcctcgtaaagctcgcgcattatcctctccggccagaatgcggggtggaaccagtcctctgggaagactttctcgcggatgttcttctcgatttctccgttcggcagtctgcggtgcatcaggggtataggcgggtcaacgcggacgtagctgagaatcctcggctcgtactcctccctctcaactagctcaaggatcaggaagcgcgaggccggagttgagcccttgatttcgagtatgtggacgtcctcgctcccgcagacgggacaggcccccttcgtgttggcctcgaagatgtggccgttctcacagcgccacagcgccaccttctccttctggctcgcgtaatggtactgctcaagctccgctatcgcctcgaagtcggactcgtatttggcctccctcgcctggattttgtatgtgtagaggagctcacccgtcagcggagagtagcgctttgcctcaagctccttttcccagaggggccagaccgggatcttttcaccgttgtagaacttccacaggcggtagtcatcaaagtcgagaaccttaaagccgttcttctcctttggcttgctcagaatctcaatctcaacctcgtccccagtcagaaaccactgggccgcgttgcccgtcatatagagcctgtacttttccccggcatcaacctcaagaacgccgaaccaccggtgcttgaaccgcgggatttcgtttcctgtcacttttccccgcactatcatgagagccaccaataaaaatagggaggagaggttataacgttagctaatgaggagcctcaccctttcgacgacttcttctgcattactgccaaacacgagtatcatcggttcctttccccagtctccgaggtggtaaactatgtctggcctctctccaagccttttgactgcggtctcaatgccccactccatcgtgcccctctcggccctcttgacttcctccggctcctccctgcggtcgtagaaggaaaccttgagcccgagctttttcgccttctcgacgagttcttctgaatagcggagattgagtactgctttgacctctgggtagaactccctcatcttcaggagggcccttctcagatggtcgctggcgttgagctcaactggacctactggcttcaccgttttatcgtagcggactatccggcccttaactgcaaagacctcgttgaaatccgttgctagggcgaagttcgtgcctacttcagccacatgccgattcagaagctcgcccattttcacaagcctgttcactgcatctccaagctcttccttagatctccatctctgagcatccctctgaagctcccagataggattgattgcttttccttctcccctcgagaaccttatcgccccctcgacgaagcgttttgccttctcgacggcctctggaagccttaggcctttggcaatgaaagcggcaagggccgtcgagaaggcacaaccagtcccgtgtgtgaagccctcagcgtgctctcccggaatctcgaagacctctccattccagtagaggacgtcggtaaagttcaagtgcccgcccttgacgaccgccgcttccgcgctcagctcttccacgagaaccctcgcggcttttctcatgtcctctaccgagtttatcttaattcccgttagaacctctgcctcagggacgttcggggtgactatcgagcccggaacgagccttttcttcagcctcccaacatcttccgggcttaaaaactggaagccagaggtagaagccataaccggatcgagaatcttcctcagccctttcgtctcctcggctatggcctctatcgcaccgccatggatgaggccgattttaacggccctgatgtcaaaggcatccctgacggcccttatctgctctctgatagtttctggtggtgctataaagacgcccctaacctcgttggggttctgatatgttatcgcggaaactactgggagcgggtgctcgttcaaagcggaaaccgtctcgatgtccgccttcagccccgccccaccgcccgtgtcgaggcccgctattataagcacggccatgggcatcactttccgagcttctggagaatctcaagtgccgccttcctcccgctcaggagcatgccgccgaatatcggacccatcctcggagctccagccagggcgttggccgccattccagttgcgtacagccccggaaagacctccctcgtgtgctcaacggtaagctcctcacccttttcggcccacatcggcccttctccggggatggcctttatgagtccacgctttaggaggtgctggctgatttgcgccccgtggcccgttgaatccaccacgaacttcgcctcgaccgtgagcggatcaacatgaaggccggtcatcataactggagtccagtttattacgagtcccgagaccctgccgtccttaaccacgaggtcttccacttccaccatgttgaatatctttgcccctgctttcaccgccttgctcgcgagcgtcgaggcaagctctatcgagtcgagaacgtagaggccgtttccaacctggctgtagtccaccccaaattcgtcgaggatctccctcgcgctctcctggacgacgacgcggttgaatcccatcgccccgccccagattcctcctcccacggagagcttcttctcaaagatggccaccttagcgccgcccttggcgaggtagtagccagctaccattcccgaaggaccggcaccgactatggcaatatcaagctgaaggttctggaggaggtcgttgaagtaggcttcaactatcgccctgcttatctcgatctccctcatgcccaccacctaaaaccttttaaaccgcgctcaaaactaagttttgagatttaaaaactttgttatgaaatgggttataaaaccgggtgatggacatgacccagcttgaggaagctcggaagggcgtcgtaacggaagaaatgaagttcatagccgagagggaagggatagacgccgagaagctgaggaggaacgtcgccaagggatacaccgtcatcttccgcaacgtccgccacgactgggttaagccggttgccgtgggtgcgggagttagagtcaaggtgaacgctaacataggcacctcaagggacatcgttgacgttaaggccgagatagaaaaggcgaaggtggcagtaaagtacggcgccgacacgataatggatctctccacaggaggagacctcgacgagataaggaagaccataatgcacgccgtggacgtcccagtgggtacggttcccatctaccaggccgcggaggagatgctcgctaagggcaaggccatcatcgagatgagcgaggaggacatgtggagggcagttgagaagcacttcaaggacggcgttgactacacgaccatccacgtcggcgtcaccaaagaagtcgtcgaaaaaatgaagagaactaagagggccgtcggaatggtctcgcgcggcgggacgtttctggcagcttggatactccactggggcgaggagaatccgttctacaaggactacgactaccttcttgagctggccagggagtacgacgttgtcctgagcctcggcgacggacttaggcccggcggccttcctgacgctggggacgaactccagatagctgaactttacacgctcggaaggctcgtgaggagagctagagaggctggagttcaaaccatggttgaggggcctggccacgtccccatagaccagatagcggcccaggtgaagctggccaaagtcgcaacggacaacgcgcccttctacgtgctcggcccgatagttacggacatcttcccgggctacgaccacataacggccgcgataggtggggcaatagcggccctcaatggggctgacttcctctgctacgtgacccccgctgaacacctcggccttccagacgtggagcacgttaggcagggggtaatagcggcgaagattgcagcccacgcggtcaacctgacccgcttcgaggccgacttcaagaaggattatctcatggcgctggcgagggggaagctcaactgggccaggcagttcgagctttcgatggacaaggaacgctttgttgagataaggaaggagaggccgacgaagaccgaggcctgctcgatgtgcggtgacctctgcgcgataaagctcatcaacgacatgctcgcgggtgagcggaagtgaggcccatctaccgcggaaagaccaaagatgtgtacgaggacgggccttaccttgtcttttacttcaaagactcagtccttggcgaggatggaagggaagacactggaggcaacgagatcgtaggtgagaggaggggtaaggggagtatcgttcttgatgagactgagttcttctttcgcctcctcgaagagaagggaataaggacgcacttcgtcgagcggattgacgagaggagggcgcgcttcctgagggcggagaggataccgctagaggtcatctaccgcgagcttgcctacgggagctttctgaggcgctatcaaggttgggtaaaggagctgaagccgctcgggatagtggagttcacgctgaaggacgactcccttaaagacccgctgataacggaagaagccgtagtaaaactcgggatagcaagcgaaggggaagttagagagatgaaggagaaaaccaggaaggtcgccgagattttaagggagttcttctcctcgaagggccttcagctcgttgatttcaagctggagttcggccggagaaacggcgagctcatcgtcatagacgagctgagcggcgacacgatgcgcgttataaaggacgggaagctcctgagccaggaggagcttagggaggtgataaaatgatcgtttcaaccatagcgtcccactcctcgctccagatactcctcggggcgaagaaagaaggatttaagacgaggctctacgtttcgcctaagagaaggcccttctactcttcacttccgattgttgatgatctcgtagttgcagaggagatgacctccatcctgaacgatgacggaatagttgttcctcatggctctttcgtcgcctacctcggaattgaggcaatagaaaaggcaaaagctaggttcttcggcaacaggcgcttcctcaagtgggagacgacctttgagctccaggataaggcccttgagggggctggaattccgagggttgaggttgtcgagcccgaggatgccaagccggacgagctatacttcgtcaggattgaagggcctaggggagggagcggccacttcattgtagagggcagtgagctcgaggagaggctttcaacgcttgaagaaccttacagagttgagcgcttcatcccgggcgtttacctctacgtccacttcttctactcgcccatcctggagaggcttgagctcctcggcgttgacgagagggttctaatagccgacggcaacgcccgctggccagtgaagcctctcccgtacacaatagttggcaacagggcgattgcccttagagaatcgctcctcccgcagctctacgactacgggctggctttcgtcaggaccatgagggagcttgagccgccgggggttatcgggccgttcgccctccacttcgcctacgacggttctttcaaagctatcggcatagcttcgcgcatagacgggggaagtaacgctgaccactggtactcggagctctactggggcgagagactcagcatggggaggagaatagcgagggagctcaggcttgccgaggaggaagacaggcttgaggaggtggtaacgtgaggtacgtgggaaggacgctcggaatagggctgaacaatgggaagccattcgccttctacctcctctgctccagatccttcccaaacaggagggcagtggtgaagggaaacggggtctacatcctcaatcagacggagacggagaacccctacgtgagctatcccgtcgtgaggctgatggaagactacgcggtcgtcaccaacggcctccacacggacttcatagcccaggcccttgagtgggagaggccaaggaaggccctcgttcatgtcctggatgccctcgattacgaaagggacgattacagcactccgaggatagcggggataatccagcacgggggaaggaggggctggctcggctttgtgggaagagatatgctctggatgagggaacttgagcttgaggagggcaaagccttcctgacggcgacgtacaacatggagggctttgagagcattgagctggccttctctactccagaagagctcgctgaaaaagttatggaacttcccttcgagcacaaggtgctcgcgattgggatagtggaaaatgagaaagggtgggagctttctttcactccttctctctgagttttttcatcagattcgccatctccagcgcggccatcgcgtactcaaagcccttgttgctcttaacccctgccctgttgaagccctggagctcgtcctcgactgttatcacgccgaagataaccggaacgccgctgtcgagggagacctttgcgacaccctttgcgacctcgttggcaaccaggtcaaagtgctttgtctcacccctgacgactgctccgagggcaagaaccgcgtcgtacttcccgctctcggcgagctttttggcgaccagaggtatctcaaagcttccgggcacctttacgacgtcaacctcctcaacgctgtgcctctcgaagcagtcgagggcaccgctgaggagctcgttggttaagaggtcgttgaacctggcgacgacgacgccaatctttacaccttctcccttaaattcgccctcaatcacgcgaacctccataccattcaccccgttttctgtaattatttaattgtgtaattcatcaatagaacaattaaacaattccctaaactttaaaggggagcttgtgaccgagcttctcggctttgaccttcaggtagggcttgttgtgttcagtaacctcccccggagccggaaccgtctcaacgacctctatcccgaactcctcaagggcctttgccttcctcgggttgttggttatcagcctgatctttgaaactcccagagcacgaagcatctggaaggcggcctcgtaagtcctctcgtcctcaccgcggccgagggctttgttggcctcaacggtgtcaaagcctttgtcctggagctcgtaggcctttatcttctccttcaggccgattcccctgccttcctggtccatgtagaggagtatcccgccctcctgggctatcatcctgagggcgttggcgagctggctcccgcagtcgcacttgagtgaagcgaatgtgtctcctgtgaggcactttgagtgaaccctgacaagtgggacctcaccatagggctccttgactattgccacatgctccttaaagtccagctcgttgtcgaaggctattattctaaagtcgccgtacctcgtcgggagcctcgcgctggcgtagattctcatcagctgttttctcctcacgaattccttccagacatcgtccgtggtgaggactggaaggccgtgctcctccgcgagcttcaaggcgtactccctgttgtgagagtcgcccttttcgtcgagtatctcaaccatcagggcgtacctcttgaagccgagtatctccatcagctcaagagagctctccgtgtgccccctcctcctgttgaggccgatgccgccaaggaggtggagatgtccaggatagcggaaggcccccacaccaagcccttcagcaatcttccgggccgttaaggccctctcttcagcggttattcccgtgaaagtttctttgtaatcaacgggaaccaagaagttcgtctctccttccttgctgggaagcgggaagaagcccctcttcaacgcctcgtccatgtccatcgtgaggcagaggaggcctttcatggagagcatgaagttgacgatctcgggagaagctatctcggctggataaattagatcagcctcgaactcccttcgattgtctatgagaacaactggctttccttcaaggactagacccctaactctgtcccagttcatttatcctccccaccaaagaaatgttctaaatttttaaaaaatttgttccaaaaatggaatcaaagaaacgcctaaggctcggttgttatgtcgagggtaatatacccggctgaatcaacggccagcggcccctcaccttccccattgtaaacggacatgttcccgaagacaccaaacacggcccttgaatgatcattaacctcaacgcggtcgctcgatccctctagaagtccgttaaaaacaacccacacagccggcttgcagccggttgagttaaagttggtctctatagttcttgatgtgcctccctggtaatccctgatgtagtagttcccatttccatataggcatgaaccgcccagaagtctcgttgaggatatcctctctccatttgctttcagttcggaacagtatttctctggggggatgggttccgcaggaatcttgagtccagagagttcttcgagtgtcagcactcttttcttcacgaaggaaaagagactctctctgtattcttggcacgccttgagaaattcgttgtctcttcccagcttttctggtactagaacggaggcgttccaggctctaaagccttcgggaaccttaagggtgaagacccactgttcatcggaaatttttgtcattttagactcgaactccatgggggttccgttacgtagataaataactcttggagatcttttgaagacccctttaacagacagacctgtacattggcctgccgcaagttctggttcgtacgtgaacttcctgctggagctgtgaaccgcctttgggttgggtgcaaccaactttagatcttgaacgttgtagagtccctccgtggagttgaggatgttttcctttatccccctccactgcaggttgaagtagtccagctcaggatagattatgtagaaggagacgtttgagtcaatccagtctggaacctctagctcaatgtgcaacctctgctctgctaaggagcagactaggaactccgctgaatacccagtgttatcaagccgttcaacagagaagaccctcatgttgccgttgaacgttgcgaacctggctgtgtcagggggtgtttggttcctgtgggggttatgggaaagaatgagcactccaagaactaaaaaaagtagaaacgcggaaataaaaccggcccgattaccgtcgggcatgtcagagcctccagttcttgtccccatcgatttggaggttggcccaatatctatgggttagcttttcccagaagcttggttggatgctctccatggcctgataagcggttttgccctcatcaagcttcttccagaaagttgttcctttgtcttttatcagtctaacgtctatcggcctgtctgttcctatgtaggtcctgtatgttgctcccaccctgagtctgaacgaatcacatcccagtacaaatattagcgcgtcgtgcatgtctgcatctcccgttatcctgccccagaacaccttggccgtatccccaaagttggggttctggagtatcataaaaccgttcacctcagtggacggcaggattttagctgtatggccgtagtagtagaacaccttaatcttctttccgcggaacaggttgtaatagctctgaatcggatccccgtgcgatccatggtaataggcgtcccagtaatacactgaatacccatgtttggccaggatgcccattactaagtcagaatgataataattctcgtctgagtccctgacatagtgtatcaccgcggagtcggagccaccaccataccctggccaaaccgctgttggatgaatcattttgctgtggtagggaaatccatggggagcggtccacgagggtagtgcaacatcttcggcaattttttcaggggaaccgagggcgtactggctgctgaaaagcaaaataagaaacaggccaaacaaggcgtatccagtcttggccattcaatcaccgctaatatagtacacagttattttaaaaactttttggattttataaccaattactatgatttatctagaatcatcttcatgtacctcgctaggacgtctatctcgtagttgactttttccccaggccgaaggagacccaggttcgtcttttcaagggtataggggataacctgaatccagaagcgggttgcctcgaccttagcgacggtaagggagacaccgttgagggctattgaacccttctccgcaattccccatttctccctcggcatctcaaaggccatccaggtcgtgtttccactctttctcttcgctatgaaccttatcgtcccgtcaacgtgaccggtaactatgtgcccgtcgaagcggccgttggcgggtagggctctctccaggttgacaaccttcgcctccctcaggtttgtcctcgcgagagtctcctcaccaacgtcgaagactgccgtcttcccgtcgaaggagacgacggtaaggcaggccccgtttactgccacgctgtccccttccttcacttcgaagggaagctccacgtagagctttccagctgaatagcgggccttcccggttccctcaactatccccgtgaacatactcaccaccctgggtaagcggtaacgaggaagctctcgccgagcctctcgatcgactcaattctcagcaggggagcctccttggtgttctcgaccttgaggcactcgaagggctttatccctctcccgaagagctttggcccgtagaagaggtataacttgtcggccagggacaggaactggcaggctattctgccgccctcgaccaggacactgtctatccccagctcgccgagcttcttcaggatcttggctggctcggttatcgggtatgcctctgctattcccttgaacttctccggcttttccgtgaagaagataacccttccgtcctcgaagaggcggaacttccgtccctttctcatctcatctgccaccctgccggagcggtcgaggataaccttaaccttctcgggacagttctcaagcctgcagttgagcctcgggttgtcagctaaaaccgtcccagaaccgaccattatcgccatatgctttcttctgagctcctgaaccctctggcgggctttttcaccagttatccactttgaggaaccagtttcagtggctatgaagccgtcgagcgtgagggcgagttttatcgagacgaaggggagtttagttgtgatgtatttgaggaagatttcattgagcttcctcgcttcctcctccagaagaccaacttctacttctattccagcctttctcatcttctctattccttggccagcaacaagcgggtttgggtcctccatggccacgacaacccttttaaagccctcttggattattctatccgcgcagggcggctgcttcccccagtgggagcagggttcgagcgttacgtacatcgtggcccctctaacgtcgtaaccctttgcctttgcatcctctatggcgtttatctcggcgtgcttctcgccgaacttcctgtgccagcccacgcctattatcttcccatccttgactataaccgcccctaccatcgggttcgggtttgtccaaccttctccgcgcttcgccagctcgagggcgagcctcatgaacttctcgtcttcgtccctcatgttcgcagatttataccgaattttataagaatttgttccaaggttggaacaacgggcatttgccgactttggataacctttttattgctggaaactcaacgttaaaatggtgatttttcatggaagacccctacatctggatggagaaccttcaggatgagcgcgttctgaagctcgtcgaggaagaaaacaggcgttttagggaattcatcgggaagctgagcgacgagctgttcccggaggtatgggggctgtattcacttccaactcttcacagtgccagactcacggagaaaggcatcattgcggtgttcaaggagagggataggcaggtaataaggtggcttaatggcgatgtcatagttgactcgaaggcccttgaggctgaaatcggcgatgaagttcttcttcagggatttactgccgacgggaagggcaaaaggctcgcatacagcttctcaatcggcggggcggacgagggcgtcacgaggataattgacctcgagagtggcgagctcatagatgaactcaggccctctgtgtggaacgtgaccttcctagagaacggctactacttctcgcgcttttacaggcacggggagactccagacggagtcaaagctccagctgtaaggcttttctggaaggacgaatcaggagagagaatggtttttggccagggtctcggttcgggctacttcatggggctcagaaagagcaccgacgggaagtgggcgatgctaacagtgacctttggctggaacagggccgatatctacatagggccaattgaagccccagaccgctgggagaaggtttactccgcggacgttccggcggagcccattgacgtcgtaaacggcagactctacatcctaacgagggaagggaaaggtttaggcaaggttattgcgatagagggcgagaaaaccatcgaagtcgttccagagggcgagttcccgctcgagtgggccgttattgttggtgacagaatcctcgcgggtaggctcgtccacgcgagccacaggcttgaagtttattcgctcaacggtgagaagctcgatgagatagcctttgatcttcccgggagtgtatatcccctcgattctgatggcaaaaaagccctcctccgctacgagagctttacggttccctacagactctatcagtttgacggcgagctgaagctcattgggacgcaagaggtcgaagggaagttcacggttgaagaggactttgcaacctcaaaggacgggacgaagattcactacttccacgtcaagggtgagaaggacgataaaaaggtctgggtcttcggatacggcggattcaacatctcgcttacaccccgcttcttcccgcaggcgattcctttcataaggcgcggcggaacctttgcaatggccaacctgcgtgggggtagtgaatacggcgaggagtggcacagggcgggaatgagggagaacaagcagaacgtcttcgatgatttcatagccgtccttgagaagctcaagaaagagggctaccgtatcgccgcatggggtaggagcaacggcggtctgctcgtctcagctactctcactcagaggccagacgtaatggacgcggccctgattgggtatcccgtcattgacatgctccgtttccacaagctctacatcggcagcgtttggatcccagaatacggaaacccagacgacccgaaggacagggagttcctgctgaagtactctccctaccacaacgttgacccgaacaagcgctacccgccaacgctcatctacacaggtttacacgacgacagagtccatcctgctcacgccctcaagttcttcatgaagctgagagaagttggagcaccggtctatctcagagttgagacgaagagcgggcacatgggcgcatcgccggagacgagggcgagggagcttacggatttgctggcctttgtcgttaagacgctcagatgaactgcggtgcaaacttaagttgcctgatctttgtttttcttttccacttctaaagtgctgtaaaacagtggaaaaacttgtaaaaactatcctaatgcaacgttcagcagttgtagcagagcattgccgccctcttcagcagtatgacacggtggagcttgccgttgattatcctggcattggatattttattcaggtgatgaatccgcttcctctcaagcgccaccagatcgagctcgcggagaaccttcacgaagtcctcccagcggatttttaaccattttgagtactcgtcgaaaagctccttctcgactaccctgtaaactttcccttccaccatgtagcgggtggccctcttcggcagttccttcctcaggcgccagcgggcgtggagaggctcctgcatctcatagacggcctcgtccatggacttgccctccaccatcatcttgaggattatcccgaggattctgtttatcctgtcggggacaccaacgacgtctcccctcaggactattttccttctcctaaccttaatgccagcactctccagctcttcgccgatttttggggtcgtcttcttcttgttcccgccggtatcgacgatgccaccgattatgaacgccttaacgtcaaagtccttctcgctcaggacttcttccgcccagggatcgagcagaacaacttcattgatgccattctccttgagaaactccgaagtagggcccccataggtcgttatcctgtccagcgggccgtggaacatctccctgaactcttcgttcgcccaggtgacggccagttcacttcccgtgaagtagtccctcaaaaggccgtagctctggttcacctggaggcagattttgcccttttccttctgggtgtgcttgtcccagtggtagaggtcgattatgaagtacggccagtccgggagcttttccctcagctcctcgggtgtgagaacgggttcaaacttctccctcatgcagaggggggcgtaggcatagtaagagccatcaaccctgtttccgtttaaatcccatgcaacggctgtcttctccggaaccctgaagacggcacccttcccgtggactatctcaatcgctatatcctggagcttgttttttgatttcctgaagcgctttgacagcgttcctatgctggatatgcctttttccttaagcgcctctctgaaaacatctgcgagggtcttcatgggcatcgctttcggcttatgagaacggttaaaaagatttccgtccagcttgggattactgcctctaatgcagtggtgctcaatcagtggtaccagacccgaaagatttttaaacggtcttccttccctaatatcgagccccggtggtgtagcccggtcaaacatgcgggcctttcgagcccgcgccccgggttcaaatcccggccggggcaccagaattctaccgcacgcttttctaaaagcaatttcacgactacagtcggctcatctccaaagagagccgcccttagcaggctgttgataaaacgagacctcacgacgtccaatctgtccagttcttgaaggacgtcctggtcaagagtaatgtgcacatctgtctttttatggcgctttcctccatatttatccataaaactccaccaattctgacctgcgccccaccaagttattgctgttgcggtcatattcctcaccataagtccttcaggtcgccaatctggaacttccagagcttggcgattgtctccatgcggttagaaaagccatcgctgaggatgtatgacttgtcagagctgacacggagcattttgagggcgagcattttcttgatgacgcggaagtagagcacctggtcggtcttctcagggaataactctttgtagtcgtcaggataaaggcgaccgtgctctttgatatactcaagaaccttgagggccacttcaaggcttctgccatcgaagattagctcgagtggattgtctgcaggctcgtaagttgggatcttcagggcaacatagtcaggaagcttccttctcctcggcataacaacacctccatttagttggccaacatgccaaaaatattattctcagagttcccctcgcggagttgagggttatagtaacagtttttgttattattcggggtttggtggtgattgaccttggttgttggtgaaagatagtttggaaagaatgatactatacgggaagtgttagtattcttcaagaccagcattctctttcacctcgtctcttgccctcatgactgcagcatacacctcatccagaggaacccacacgcaaccattctcatcctcctgagcgatactgaagtacttctcatagtgagcctcaatctcggccctagcaaggtcgtcaagcctctcgagaaccatctgagcctcccgagcccaatctttccaatcctcgataataccccatgcctcctcgaggagtagcctggcgccctctggcattgttttataacgagctatcatatagcacagtttccatacttctaccatatcttcatgcaagtcttggaaagacctagcctcaaccatgttcctcacccctctcagcagtacggagagacagctaattcatagagctcaggctctgtgattttcttgccttcaaggggtctcgcaaatttgacgggacgtggtttctccttagttaggacctcttcaacccactcacctatctcatcacagtagaggtcttgtacctccttgcgaagagtttcaatggcttcctcttcagttcttgccaagacaatagcccacccatcacgaaggtcaatatcccaataataccactcctcgctcatcgcccctcacgctccttcaaagctttggcaagcctcgggatgtcctccatattaactataatgagcgccgcgttcttgtaattgtaatactctctaaatccaaacaaggagagcatgcccatgacaatcgagaccaaccccgaaactttcatgagagcaccagtcccataattcacaatcactgcccctaatatgaaccacgtcagaactggtgctatcatcgccgaaaaagcatacaatgagatgagagatttcatcgccccgtcacctccctccaacggcgtaggctggcacctgagccggcttcgacaagttcacaccgagcaggaggccgaggtcatccgcgaactcctcaaagctcctgctgacgatcacgtcctccagtgggatgacggcgtaataatccctcgctgaaccgccgcgccggtactcaaaagaaggctcaacatgctgcacgttgaacatcacgaaccgctcctggcccacttgaatgaagtaatagagcgggagagtgaggacttctgaaagcgccctgagccgctgaaactgccagccattcacgagaagctccccctttgcccatgaatccttagccacgcgccaactgatgaatttgagttcaaaagccgctaaaggaacctcagaatgcttcctgaacacaagggcatcgaggtcatagagcgagaactgaccaggaagggccccttctatcagagtgctgaacaaatacttgttctccgcgctcctaatttctctttgcatatagtcaaagaaaggcttgtaaacgtggcggccgtatttggccgcctggcggatcatttcagcccgggctgcgaccatcacgccctcaccccgacgaactgctcaagcgtcgcctgaccctcgtgcggcctcaccctgcggagctcatccctcaagctctcgaccttctgaaggacctcaagcctgttcaggcgctttgggaagatgacgggaaccccctcgcgctttgcctcgcgctctgagaaaacatagatttcgacatcttccgagcggagccgaccctcatggagcatcagagcggcctgagctatcgcgaccccccaagcggccaagacgtgaggagcctcgaccatgaactgctcgccgtcgatgatgatgagatagttcatcccctcacccccctaagctcaaagacatactcgtccttcacaaccgcgcccttgcgcccgagctcgtccagggctgaagcgacctccttggctggaaggccggttttcctgaccagctctgaaaaagtggccgggctgtcttccaaagcctgctgaacgaggaaagcagaaggaactcgcgcgatcatgagcgaccctcctcggaaggtgatgaagaagctgaatcggcctcctcgaagtaggccttcgtgtcctcgtcaaaggggtcggtgtccttgtataggaagactgcaaagcctgcggccttcatgaggtttgtgagatcgtccttcgcgaaaacacctctcgatatggcgaaattggcttggtagtacttctttttccctgatggggccctccacccaccaataggatccatcgcaattatggcgtacttgaagcccttctttttgtgcttcttgagaaagtctatcaactcatcaacggtcgcaatcatcgtagtcatgccctcacctcctcagcgcctccgcggcgatgcggatcttctcctcagcatccttccaattctctgcctcgactttcagctcgaaagagtcctcaaccatgtccacgtaactcatgccatactcctctatcgcatcgtcctcatctatccattccccatctatcttcacgaaaacaaacgaatactctctcatgccctcacctcccttctttcaatcttcttcagcaggtcttccaaggcatcggcgtaccctgtccagtatgccgcgttctccttctcaccgcgagcggagagtgagaacgccgtgtcgcgagctacctggagctcgcgctcgatgtactccagcagggtcggcacttcctcgacctgctcaagcaccgcgtcaaggcggcgcttctccgaagcgacccaagaccagaagtcggcctcactcatggtctttcccctgtgctggtagtagaacctcagaaggaacaagatcgcctcatccacggtctcaacttccttcctgtggcttctgacgaactccaggaggtactccttggtcttcttggaaatcgggagtctctcacttagtcggggcttagatgccctccagtcaatctcccttccagaaaactcagacatcggccttcacctcggcaggttttgcgtaaaactcgttcagggcgcgcagaacaacgcgccgcaggttagaaacgaaaacttcatacctctcatccccttcagccctggcctcaagctcatcgagcactgccagcactgcgcggcgccagtctgctggatcaatgtcctggaggacctgctcaagcttctccggcacggcctcttccaggtacttcaccgcgtccttgccgcgcttctggttgatcaagtccatgtaattgcggtggacgacctcgaagaacatctcaagccagcgctcggccgcctttccggtcttcaaaggcttgacctcaggaaccttctcggccgcggcctcccccacagcgaggcccttagccgccttgagggtgtcttccttgtagaggacgtagtcgaccagcagaaccgggccgtcgcgctccggacgcttgagaacccaacccttgaactctggagctgtcctcttcgggtagaaaatgctcttgtagttgttcttgtccgacttctcgatgttgaaggcaaggctcatgagccggcgcatcttcttctcatctcttaggtcaagaacctcagcgcagaggtcggcccacgagacgtcttccttcgcgttctcagcaagctggcggaggagcttgccctcgttgtaggtgtgggctggcttctcgcccttaagctcgtagtacttttgcttccaggcttcggcctctttctcggccctttcacgggcctgacgctctttttcaagaagtttcaccagctcctcaatgtagcggtctttctcttcgagaagctcgtctttctttttattttctgcatgaagctctaccacactccagttggtgtggtgtaagagagcatggaagaattctgcccgcgagaggcccaattcagtccttttctcctcagcaaattcaaaatcctctaaaggtacatcgcttctccattgtattagcgggctcttccattttcttggtcggcctggacctctcgcgggtattctcataagattcaccttctcgtagctttgtatacttcccacatgctctgaacaagttctgaccaagaagcacctaaccgctgttttacagcctccatctccttgtagacttcatatggtatccacgcttcgaagcgtttgacaggtccatcatacttcccccgccttcccactgccatcaccttacgagattttttctcatacgagaatatttctcgtaagatagtacggaagatttccttaaaaagatttcgtggacaacagtgtataagggtctccaaaagagttcaacttatgacgctttatagtagtaattagaaatatttttcctgcatattaatttgagaggttctaaagaagccatgagaatacgccaaaagaccaacactcttctctattcttctcttttctctttctttaattttaagtacttaatattaaactcaaacaaaaacataagtgaaatgtttcattactttatcctctggaatgagttcatcctgcttgacctcaatccatttgcccgatgtttgaacctttgagagcagttttttgcctttttcactgaccaattcgtcaaatttgtgatatccaagcagcaaaacttcaatgatatctttctcgtggaggtcgaaatcacgtttgagatcggctggaaggaaaattaaccctttagctcctaccctggctaccaaatacccttgcttaagaactttgattattgatttctcaggattgatctcaattttacgaacaataacctcaacgtaatcgttcttctctatgttcaacgcttctctaattgtcttggggatagctatcctcccttccttatcgagccgtgcgtggaattttgctagtggttctttggtttctttcattggctcaccctcttttggattttagttaatggtgtattgcttgttttttgtatgccctcgggcatacataaggtttaccgttaggtgactgattcacaagacagtgcgaagtaatctttccatccgtaatttacttaaagcctgcatcgggacttgggtttggtgtcgggatgataaaaccctacgaagttacattggatactcttggagagaaggttcgggtagaatttttgagagaggataatgcagagtaatgaggggtgttgattgtggtgagggtggagaagagcagacgaagtttgctaggcgagaagcgtgggatgttcataggagatgcctttcaacggtttttgttgttcttggtgaggaaggtcaactcatctcttattttactctttctccgtttatagttagccttaaaatccgtaaggatatggaagaatctaaaaaggaacttattgaagacttgaggaagaagctcgtaaagttggtgggaatggacatcaagtattcttctgtgcccactattcttcttggccagttctgtcttcagaaggaatatcggggaaagagaattggcggagaactactagcaaaggtaattaagccttatgcggttctttatgcggctcaaattggtggtgtagggttgtctcttcacgctgataagaaagtggcaaagaggttttatttgaatcctgaaagagaccctctagcaagtggattccaggttgtttctaagggtggcacatatgaattattctatccgtttgttaatgaagcgatggaagttagaagggctttaataaaacatttgggaggtaaagaactcagataaggccggcgatagccagggctctcttaacggtgtcttctacttcttttgggttgcgtttgttggctttttcgaatgccatgacaaagttttggagctcttctggagtttctagggtcagttcgtacccattaaattttgccatcttctctcaccataattccgtacggaagaaactatataagtgttatgcatcttgcataatcattatgcacagtgcacaacgagtataatgggaccagcccgtcgtatgttgattcgggaactggagattggaacttctttaagtcttccccgtattttcgtggccgtccagggcctgctgaacgtcgctggtatctcttcgctggcattcataacaccttcaagatgtttcagggtggtgaagcttccagaactcccaaagtttccaaacgaagtcgccccaagagagctttcccttagcctgctcaagctcatccgccttctccggcggaagctgaacctcgatccttctcacagccctccacttcctcctcttcggcatcccatcaccaccttattgtggatatttcacttaagtggaatttccacataaatcgtacggatggaaagtttataagttttgtgtggctggagaagttcaacgttgggcagagttgttacgtctaatttttggatacaaaaattctgctgaaataccacaataagtaataatttagaggtctcaattttgcaacgttcaaaagtagttaagtgcacagaagtgcaaagctctaaaaacgtcttattcatccaaagagccgttacttttcctagttgaatcagccagaatttttggatacaaaaatttaaccttcagaaaagaagccatcagcggacagaaaacatgccttatctcttctcttctttcttctttttcaagaattattatatatatgtatatattaaacgctcaaaaaagatatttgtatttgatacctatctcagacagatattgagaatcggccggaagaatccagtagttgtttcttgactgaagcttggataaaagctctttgcctttttcacttactaactcctcgaatttgtaataatccaaaatgatgacttcaaccggctcgttttctctcaactcaaactcttttacgagtttttttgggagtgttatggctccatactttccgattttcactgccagaagggcttgagcgattaccgtaactgttttgtctgatatttcgatttttctgattagaactttgacgtagtcgttttgttttaggccgaatgcttcgaggattggccgagggatagttacgcggttgtctttgttaacccttgcttgaaatttcgctagtggttctttggtttctttcatgagaccacctctgcatattttctagttccgtttggatctcctgtttctggtgaaaaaagatatttgaatcttgtagcttcagttagctttccaatgttttgaggatcggtggttgatggataataatcgaggattactatttcaacactatcatctggtttgagtttgagctgtctacgaaccttctgtggaaccacaacgtatcctctgactccaacccttaggatggcaaattcttgcccataaacatagataattccctcatctttttttgcttttatcttgcggattataacctttaggtaatcatctgattcaagttctagaacatcctttatttgctttgggaggctaacccttccatccttgttcatctttgcttgaaacttcgctagtggttctttggtttctttcattggctcacctcagtgtgctgattttacgaattattcttatggttgaaatcctcataaggtttaccgttaagcgactgattcagtagccttctcaggctttaccttgacctctctggattctaagcggtatgagaagggtaaaactgaaacactaaggtagggcgtaaggattacgtacggaaattatttaagtgggtgtgtaaacttagatgggggactaatatgaaagagtatctggagcgtaagatatacttttacagattaattccaggggacgctattttgaagaattacaagcaggggaaaatactcgacccaaggtttcgaaaaaagtttgaagatttcctaaatgatccatttgattttcttgatagtaacctatccatgaatagcattttagaaactcggtatacaccagggcaagatctaatcctaattagggacgatccatcgagattcaatctgattccatgggtgggtgggcctgagagagggcttatcacagcgagaattgggtatgggaaggagagagatcttcccacaaaaattgatgaagctggtcatgaagatggtatacagttagataaaagccgaaaggagagactgtattatccgacccactttgttgtttttcctaatggcatagttgggatggagagatataaagaggggcctacagtatatcagttaaaatatttccttagcaagtatctatttggacagccaaatataattgatctcgatgaggtatactatagagagtttattgaggaacttttaagatcgcctcgcgtagtttcaatgcatataaaaatggcagcaacaaagtatgcctattatatgaaacatgaaaagaaaatggaagaagacataacagatttgttaggagattatatttatctcttagagcctgacttagttgaaataaaagcagtagtggatggacggtataaaaagaagagactctcaaaagacaccgtaatttcgcttttgaatgacttgatgaggataaacgataaattaggggttgtggagaatatcattataaaatacgaagatcctaaaacgcacgaactaaaagaaaagcatatttttgaggacaaactgatttctactaaaaaggttatccgtgctaaggaagagctatcaagagtggacacagaatatatgtataataaaatcattgaggcttacaatgacctatatgacaaaattgaaaagtctttaaaaggttaaaattgtagctctaaatcatgagtgtaatgcttcccaagatacttcgcaggggcattgttggggggcttattgcatttatatgtgtgatagttctaaccattcatggacctctgaaagtgttagatcctactcccgatttctactggacaatggcatcaatctcaggcgccctcgcgggattcgtattagtgggagttacaatattacatgccctccccgatgtagagatatatagagaactacaacagtttaagtcctttaaacagagttataccatatattatgttacgttcatgtttctgcttgttgtcttaacactttcaataattggtggggcaagcttaccgcacaacagaatttttgggtacttagttcttgccagttttatggtatctttgggtatggtctattcttgcttttggattctcaaaaagcttacagagctaagattcaagtgagaatcttgtattttttgagggctaattgacgtataaacttggctttgtctcccaataagtctttcagccggtatgccctgacaactatgacttctataatcgaattctggtcaattttcatctcgctcctaaggcccttgggtattgtaatattgcccttatcaacgagtctggctatgaacatccctctgagcacttcgccatccactttggttcttatgattaattcaacgtagtccccaacgtcgaggttatgataaagccgggtgtataatggaaatgtgaactgaccacccctagtgactttcgcatgaaacttggctagtggctcgactacccttgcttcgctggcgtcctggtcgggcattggcctcaactcctagtataattatcgtaattattgaggtcatatattttataactatgtcggacgttgtccgaccttgtttatttttcgagaattaatgcctatgggtttaccattaaacggtcgtctcattgagaggtgttgacagatgagtaggatatgaaaaattattttcatttggtttttagtatgctttcaattttttctggagcttcttctgagtttagtgcgctatgtattggaaatcttttttcttgcaaccatttctctatctttgcgatatcgcgccgtatcattacaagttcttcacgttggaattttatagttatttcttctccacggagtttggtttctattggtgtttttaagtgataatctgcaaaattgcgacgccatctgagtctatacaaggcatccgctacggttaagtctgcgaattcatccaggaacagttggataacttggtggacactggtttttgatgacttgctagtgccaggtaaaacaggctctatagcttttttcagctgagtgagtgaaactacatatttgggattttcctttttatacacgtctattgtattgtctattgcatcaataatctcatttctgagtttcagaaaaatgtaataatagtatcttccaattgtagttcttacgatggcctcatttgagatctcttttgtaatattgcgttcgttaaggagtccctctaaatatcttgcaagttccttgaattcttcgggttccattgcgggggatccctccaggatttaagcactttggagtgtatagagaatgcgtatatctttatcagggtacttagaaaggatgttctcctctagcttatcaaaagcatcagcggcttcttctatcttgtccttccgtagagatacgataatatagaagaagttcgtgttgtaatcttcgtttaagtctatagcaactttaatcataggcactagtctctttaagtgaggaacttcttttattgtttttaatataccctcagcaatggccttgattttgtcttcacgttttgctttattctcagagatatcctctgtgtatactgattcatggaatacgtgtccataatgttctctgagttcattgataatgtcatctaataaggtttccttttcagctatgatgaggtcagagcgtacctcacgaacgttactgtaagagaataccttttcaaagggatggtaaaaggttttattctttttcactattcttgcgggcatcatcagagatcacctcgctgatgtaattaacaatctcttggagagtgccttttgtcgtttcgaggaatacctcgtcaaaatctctgtctcctgatttatctattagtattcttaccccatagctttcaaggggcccttcaggagtatctttaacaaatttaatgacttcaaattcttccaagatagggttcgtcatgaattttctggtaaggaacatttccttaatctgtggggtatataatttttcgataatgtacttttctagctcatcagatggttcgttcccctctatttttgaaagtatggtcattgagattacaaatgaagcaatacttagataatcaactgcttggactatatctagatcaaattcatcgactaacatcatctctgcaattgctcgtatcttgacttcgacaccgctcctatatacttctatgcttttaggagttactaattccttttctataatgtattcaacgatccttttgaagagttctttgtcgaattctccagatctaaactttattttttcagcaaagctctcataggacatcctagtcaccatgatctatttcttggctctaatatggaacatgtcaggggcccttaaatatattacggtacggttattattgctcatctaaatattaaaggtaacgactggacttattagggaaaaggaaagggttatctgctcacccaaccgctgtatgttgctgtgtagtttgctggtgggttgttgaagtcaaagtcagtctccggaccgaggagcagtactctacaattctgaagatctttggcgatttcctggtttgagatcattagagtgtataagatttctgtgtacctctgtttgaatggaacgttgtagaataggattccatatggaaacactactttgatattttttacatcttcttggttcgaggatattgccgagaggtttgtagtgtacttacagccggggaagtctctactaagcaacctgttcatagtctctgagtcagggaatccgaaaagaacccactccataatattaaacttgaattcactggctggatatgtcccaactttctcaactttatatttgcctgagttataggatactgtgtatacagttacatttttaggggtctctccagagaggtttaagagctttaaagccgctgagaggcgcattggtattctaaatggccagaatattactagcgggtcgttgttcggcacccatggatgattaactataagcttaaagccaggtagtactccaaagccgtttgttgttgctatttcaaagaggtacgtctcaaagccgttcttggctagagcataagccccgaacagagccatatctgcataagttccttgtctcgtctggaaaagctcgtagggcgttttaatgttgtaataatggcctttcttcatgctcaggttctctacaaactcatctagatgcacatagttaacgaggaagtctgtaatgatgagagcgtctttggtcttgttgcccgttagggagagggaatatactggatcaaaattgtggttgatcttgggatcaagtgcgcaggtcaaggcttggctaaagttatctctccaagagtcgtcattgcagtttatcttgggtgttttctgtgaggatgtagtttgtgtgaactgtgatgccgtgttcggtgaggcacttgtagtcgctggagcattactttccttttctggcctgactgttttagtgactgtcactgtctttggttctccgttgttgatacatccgctgataaatgcggctaggaagatcactactaggcttaggactagggccttcctccgcatgtaatcaccagaaaaagtaaaaagtacagcaatataaagtttaatttgacagatactgagactgccccttgtaggagggaataagattggagagcaatagaaaagtaatgattgtaatggttattataatggcttttgttttaattgccggatttggtgccttagttggagctaatacacaaaattctatactcctacaatttacagaggttctagcgaatattgttatggccggtattatagcagtccaagcaattactactgcagaggcagctgagcaaactaaaaagcaagctgaacttatgaacaagagcctgatagaaatgaaaaaagaacgtatgaacattgaatatatgaaaaatgaagtgattggatacattaagaaacttgaagatatgcttaatgatgctctacataacgaggtgcctatttattatgagcttcctcaatattctaacttaactcccgagactccggagactccaggatgggcgaagagttaccaagaacgaggtttggaagagaggctcaaaagaaaaatcaaaaggctgttgaaggagtatgatattaatttggagaaatataactcacttgttacggatacgaataggttgagaagagaggtcatagacgcactaaagggagaatttaagctcgtagaatctctacagcggatatcccaagaagaggctgagagattctacataaaagaagcacatattattaaagccgatactcttttagaggagctcgttacactatccaatacagaaactagagaatctaaccaattgtctgcccccccttatggtagattaggactgaatacagagcaaaaacgcctttatggactagaagtgtggaataaggcaaaaaaagtattctacgagtttctccttgagaaaaagccggagatatacaataaactcgtagaaagggaaaagaagctaaaggaattaaaaacactgacaagagagttattagagaagattaaaaggatagaagatgaactctttcaagacgaagaaaaattagagaaaaaactattggagctatgaaggggtagttaaggcagatcattgattatgcacagcttcttcacctcgaccgccacgtcttctattaattttctcccgtattcagttcccatgagctcccacgcttctgcgagcttcttctggatctccttcagtatctcttcgttcagttccttctttttcttcagtccccatgctgaagacttctcttccttcttctgctttggcttcgcctgcggttcctctgcaatgtccttgctggcgaggtcctttagaatgtcctctggaatccctacgtcttcgaccacttccatcatccctcaccgaggacgctcttcagctcccgctttacgggattctcttcgaaagccatctctgtgccgccgaagcgctcttcctgcttcttgccctgctgttctttctccttccagtataccttgacgcgcgggttgatctgtagggcgagctcgacttctcttttggcctcgtggagcaggtcaaagtatttctggcggtacttgtcccgctcggccttgacggcctcgtaggcctcccaaccgcgggagatcgctggatgaacgaccatagggatggcttcttgctggccggtgccgacgatctcttcaatcgtcttgcagtacacggttattgtttcgttgttgaactggacgatcttcttgtttgccttgaggactttgtgtggtggcctcttgccgaagaacctggcgagactccaccagactgaatcaagccagctcggcgggcgctcctgatagtaaatccagtactcatcgtagtttatgaggtaagcctcggggaagccaagtataatgctcccctcctcgggcgtgactgcgacaaggagtttctgataggtttccttaatctggctcattctctgcgcgagtattctctgttgcctcaggcgctcctcgactctctgctctactttctcctcaaggctgaagtcgtccaggcggacgagttcggcgaactggtcatctgtcattactatcccgggcctcggttcggccttcttctttttccttccaaacggccacaccatcttcatcacctctcaaaagctttgattagggcgaaaatacatcttgacggtaaactcgcggtcaaacgagaaccagccgcggcctttcttcttgcggcgcttcagaaactcctcaaagctgtcgtgctcgactggaatcctcagccgctcgccgtccattatcgcaacgcgaagaatgtcgagatcctttggactggctagggctccgattaccgcaatgtgggcggcacccattatgaggctcattggcagcttgtagaggtactgtgtgcccgcgacgacgttcaccgagagggagcggcccttcctatagatttcctccattgccttccaggcaaggttgtggcggctggcctcgcctgccgtgcctatgaggtcctgaatctcgtcgaagaagagccacacatcaacgcgcttcctgccagcgatgagcttaatcttctgccagagcaggtacatgattaggcgctgctcctcgaggtctagctcggagttatctgaaaaatcaatgatgttgatggctttggtcgtgaggtagtccgtgaagggcttaggctcatcatagatgccatttccgcttctagtgacctgctcagccttcggcttgaggactgagcctttcaggtagagcgggtcagctctgatctcgtcgaggatgctcttgaggctctcgtaagtgctctcgcgcattgagggctcttcagctttgactctcctcagaatctcgtcagggtcgtggatcttgtacactttccagtacttcctcaggatcctgccgtaggccgtgccctttgggatgtcaaacttccgcgcgagcatctcaaagctgatgtctctcaggtgaatcctgccgattgcaacctcgacctttccaccaccgttgtcgagcttgattgcttctggtgccctggtcggcctgaagactatcctcctggtcgggaagctgtcgggttgtaggccgtgccaggtaaagacgtcaattggatacggctttctagtcacgtacgtctcggcgaggatgtagttgggaatgctcattgcaaagtcgccgggaaagccgagctggcttttgagctgtgggtacttctcaagggttccgaagtatgccgcgaggtacgggtgcactctggtggcttcttctttcccgagctcttcaacgcgcttgttccaaaacgccttcaggcgctggaactttgagtagtcatattttctctcaaagatcacaatgaggacttcctgtcccctgctggtgtagtactcccacagggcctcggcgagggctttcatgaagctggtcttcccgtagcctgtctttccgaggatgaagatgtggtttgcctcaccgaccttgagcggcaggtagagcttctctttcctgttcgtgctcatgagcctgccgaggtacggcccgctggctgggttgaagtggggaatgttcacctctgcaggggacgcggctcgcgtcgagactgccatctatcccgaacctccttttttgttcccgattttctttgattacaacaaaaaactactatctcccgtaaaagctcaactcagcgagctttatttttccatcagccccccatacttccttttacaattgagtgagttagaggcctgcaaagtcatgcctcctctttgccctgtacaggccataccccaccagcccgacgattatcccgccgaagaggagcgttttcaagagaactgaaccgattagcttctcttttttcgccttctctatgtagctctgctcgctcttctgcgaggccccctcaagaagggtctgaatcatcttcctgtactcgtcgttctgctgttcgagaaaatcagccctggcctttacggtgttgtattgatttgtcaggttcgctaactgtgccttgagctcgcgattttccctcgtcaggttcagaatctttgcgttcagctcggctgtgttgggctggttcttgagcttgctctgaagctctgaaacctgctgcttgagctgttcgttttctttcgcgagcttgttgttctgaacggtaaggttcgccagcttttctctcaattctatattctctttcctcagttcagcggccttatccggtccgttgaaactcaccgagaagggatcactcccctgaacctgaatgtatgccctgtcgttgaaggtcgtaaaaataacctccaggccctcagcggtatagttctcaccattgtggagaaccttcagtatctgacgggcctgtttaacaacgagaacgatctcgttcgtcttggcgtgttggtcaacgaacagggtgaggtcattgacgtaaacggcctggccaacttcgaggctcccgctccagtcgtagagagtccctgctgacgcgaggctggcagtcagcaggaacaggataaaggcgaaaaccagccgcttcatatcactgtccctccgggttgtttacgatgaccgtcaacttttcaggactcagaatcgtgatgttggcgatgtagtacgtcgtgcccgtgaagtagccagtcccaattattgttatgttgttgatagtgacgttcatcggctcccaatagatcgtatccgggaatatgaagaagaacttgcccttgttggggtcgtagtcgggcctaattgtcaggttcagctcctggatcgtcaggtttccgccaacgtaaaccagctcctcgtacctgtgtatggtgagttccgaagttgggattgtggagtttgtgctgttagaggtgttaagtgggattgtgtaggtctcgttgccaaagccgattatgattccaccgccaccccaaccaatgcaccctgcggtactcacaaccgccgcgaggactactatcatatataatatatgaatatatgacttcatacccatgaacttcattcttctcaccccaagaggcccttcactgaaaccgctcccgtcttccggttcacccaaatgaagccagcaaagagcttagaaccaccagtatcgagcttcagctcgaaaacccaatatttttgaccgttcttttccttctctgtcagcgtcttcttgtcagggtagagcttgtagttgtacttctccagcttcttgttgtagctggctagatactgccgagcgatctcgtacgcctgctcggcagtgattggatagtcctcaacataggccccctggactatcgtgaggtgtccgtcagcccaccgtattgtgttgttgctgaagatgaatccctcagtcggataacctagcttatacagtctttcttttagtgggtcgtgctcggcgaacgtcgaatagctgaaataagccaaaaaaattaggctaaccactgcgaagagtctcaaaacgacttttgaaaaagatggggaagagtggtgggcgtacatttcagcccacctcaactagagctctgctcggtcacaacaaccggccaagtagcggtcgcattggcctggacgatgtacgggctggtctcgttgtagagcatggccttgttgccgctgatgtcctcgaccacgaagtagaacgcatagtagttgttcgccgtgacgttgctgatgacaactggaaggctggtcgcgttgactgcggtgaaggtggtagtattgctcacggtgctgctagtaccgagatcagcataatagacgtagtaggtcgctatggcgtcgttatcggtcgcgttgaagtcaatgctgaaagttccagccgtactgttatagttgatgctaactgaattcagagttggagcggccgtgtccttgacagttatgctcttgacatcgctttcgagggtctttccagcgttgtaggaaactttgatcttgtagtaaaccacatctccgaacttagaggggatttctgccttgtaagtgccgttctcggctgtagcgttcagggcagtgtaggtcgcgttatttggatcggcgacgttgagcgcgtagaggatctgaacgctggatatgttgaagtgctcctcgtttgctaactggaagctcacgaggacgtggccggtcgcctggtcaactgtagccagaaggttgctgacggcgagctcataggtcgtggtgctggtactgttgccactcagagcgttggttatgtcaacgaagccgcctccgccgccgtgataggcccaccagccgatggcggcgaagagtagtatcaggccaacggttatgatctgtctctctttctttctcatttctcaaacacctccaaacgacttaacaagttctggaatctgtttcaggaaagaaaagaaagtgtccacgaggccaaactctttgaggagcgcgagagcgccgagagcgtagaacaccaggctcaccttgccttttgtcagtacgccgatgaggatgaggattaggccgagcgcgaggtatgggtggcttcctgcaaggttgtggagctgatcaatgatgctgttcgcgtccatgtcaatccctcctgttctttgctgctaatcctgccagaacgccagctaagccgaagcccgtgactcccttaatgaattccagggccgttgctgttggatcgccggtaatcgccagcatgaagattccgccgaggataaggaatgccgccgcgtcccaaagtccccaactgtctaggtcgctgattctgtacactgcgagccctatgagggccgagggaatgaagagcgcccaaaagccactgaggccgaggaggttgcctgctgtaaccatgctgttctggaagtggaaaatgcaaaggaggtaagcgatgagagctgctgcaaccctgccgagcattgtcagtcacctcagatcagcccggggatgtgtggaagtattgaaatgaatgcaccttttgtggcgatcgttgcggcggtccagaaccaaagtatcagctcattgttgccagtctctggagcgaagatgtataggccgatcaatccggagacgaaaagatttgctggcccgacatcgccgatgttgagcgtcatggttcctgtgattgcccacatgacccctagcattccgagcgctgcgaagagcaaactgatgaggattgcacctactctgctcttctttttgcctattgagccgtagattcccgcgtagagcttgttgtagtagtcgttcttatctgcgagcttatcgaagagttcaacgagcactacgaatgccagcggcaccgatgccattgcttctgttgtctgctgtactgttatgctgtgttgtcctgcataccacaaaagtaaaccaagaaagcccgaggctagggccgtctttaaggcccattgcccggccttcagtttttttggttgttgttcctcccccatcttcaatcaccacctcaaagcagttttctccaaaccacgaaagcgccaactaacacgaacactattgcgagaagcgcccaaagtggaattccgagaatcttcttactcagcatgctctttgcagttgttaggatgtcaatgtgtggcttgtactcatcggcaagctgactcagctcatcacccttctgtgcgtcaagttcggcctgttcgtactcgccgtagagcgccttctcagccgcgctcatgtagaagtctccggcctgctcaagctttttggcaacgtttagccagttgaggtactcttggacagcatcggtctgtgtaattttgttgagagcctcaatggcatcctggtatgcctgtatcgctttctcagcgtagagggaagccttttcattgccctcggcgtctgccttcttcttgagatcctcggcggcagtgatcttctcctggagaccgttaatgaggctggctgcgatcgctttagtctgattgatctcactcgcttcgagcttgccatcgtcagtaaactgaacgagctggtctatctgattatccgccaacactgtccttgtgttcgggataacagagaccttcggattgacaacaagccagagcggtattgtgatattgtcatctctcgtgatcgtgaagtaagccagtccatagaccttataggttaacgtgctcaggtcttcagtgtagtgggctgtcaggagcttttgagttggagtgtccggactcatcgtgccgaggtttccaaatattgaatctgcaactgtccagcttagatccttgtactctctcactgctacgaacctgaagtcgtcattgaaggacggattaagaggctcaaaatagcctggattaggcacaatatagaacttgtagtctgctgttgaaccaatgacatgaactggagtcgcaaaggtcagtataatgaagtttgagagcgctccagcgtacttctcctgataaagcgcccatttcgttgaggcttcagtattgaggaacttaactggtagagatgcatagaaaccatctgcaagatcggcgatgtcgtgggccatgctcacgtgccgccaggcgctggtggtgtaagcagtatacttaatgtcatcattcctaacgaagacgtagcacgtagaggtgtttgagtcccacttatggttaggttgagcagtacaggatgactgatcagtgtactgcgggtcgttctgccagacctcacggtaagcgtcaaccttaacgaagatctcccacgttgaagtgttcgcgctgaatatctgttcgatcaagtctctagtgacctgaccggtttgaatagcgttctgcacctggtagacccaatcgtccggaaccttgagaattgttgaataaaccacactttggccgtttaggccctcgctaccagttccgtaatcccaaacgcgcttccagagcgggacgctactgttctccttctgaagatagatctcaacactgcgaaggtgtatgacgttaaatggtatgttgctctcttttgtgtagagtttagcctggacggggaaagctgaaaagccatagatctttgagggagcatagatctcaatccagaggtcgccagttgctccatcttccttagtgtcatacctcaccagatcagagcggagcttcgcggtaagctctgcaatcccttcatatgtctgctggttagcgtcgtctatgactttattgagttcatcgtcatcgtttttgacggtagttccatttgcttggcgctcgtaagttattgttgcaccactgtcactatctccaccccgagaccctccaaacgctagttctagcgctgaatatgtcaaacctgcggctgccattcccattgcaacgcatgcacctgtaccgaaacccatggtccctgccatgcatgctccgccaacgacaacacccactactgtcgagacgaccattttgccggtgttgctcgccctctctttgacaccattccaccagctgccgaagtcaaacgctagggctggctgtgcatagatgcttgtggtaaaaatgaggagtaacagtaaccctgacaggcgcttttttctattacaggttttcctttcctgctcttcttcctcgcctcctttctgctcaaaaagtgaaaagaagagcctcattacctcacctcctcctggcaagtccaactaaggcgagaagcccaagcccgccaacaccgagccagagccaggtgttcccacttgagccgccgaagagcgtgaaccctccagaatctccaatgctaacggcaaccttgtcctggaagaccgtcgcgttgccctgaagaacctgcacctggagctcgtaggcgtcgtaagtcaggtcttctggcacggcgaaggctatgctaacatccttctcggtgagcgggccgaccgaaatgctctggttgatctcgctcggcaggaagccgcccgagaccttgatcgtgtaatactgcacatcgctcgacgggttcttgaagtggaggacaatcgtgccctcgccacccttctcgactgtcagctgcttcgtggtgagcgtgattgcaggattcacggtgacgtcataggtcgcgacctggccgttccactggagttcgagcgtgtactggccctcactcggcacgttgacgctgaaggagtacgcctcgtaggggctgaaggcgtgggaatcactccaaacctcgttgccctggctgtccttcagaaccgccgtgatgaggtaactctggccactgctttccgagatgcgaagctcattctggccgacctgccattcagagggcatctgaaccgaaaacgggagcggctcgacggtgtaggtgacactctttgtcgtcgtgtaggtcttgctcattattgcgtcatgactctcaaagctcagagtgaacccgtgctggccgaccgcgcccgccttgaacttgatggaaatctgtgtcgggcctgaaatgtcgccgagatagtacttgcccgactcgggagagacggcctggccgtctttctggacttcgaggacgttggagaggccgctcaggctcaggtaagtgttgtaagccgcgtcggtgctgatcggcgagagagtgaaagtgagcgtgtaaatcgtgttctcgggaatgctgatgtcagacgggaagttttcaaacttgaaggcggcgctgtcagggtacatctcgacactgacagtcatgtcaccctggacgtctatcgtcttcgtgacgctccagtacccgcttttctcgaaagtgagtgtatgagtgcccttagttaaatctaaacttccaccatcgaccagcgtgccgataacgttaccgttctccttcaccgtaacgcccgtgaggggttgattactcagagcatccttgagcgagagctgaatatgatactcaacctcataaatctgtatattattaaactcgaccttcccctgccagcccaagttattaccaatgcctacagccggaacaccaaaaactaccttctcgattgacaacgggtcaatatgctgctgaacattcgtcagattatacaataagaaaccgtccttatataccagtaaatcccactccgtgcccctctgctgaaactcaattctaaaatgtacgtacttattcctaaagctcgtccctgcatcaatagaaccacctatagtgtcgctactcccatcatactgaggataattagcccctgagattttcctaacctcgattgaacccgtatcatactcaatgaaagttaagccaacccctgaactccctgacataaaagacacaccagataaaacgttatttgcgtacgcctgataatcaaactcgatagcctgaaactcagtaacattaagccaagccctgacgtactcagaccccgtagcatctaagaccaaccgaccgtccgatattgttacattagacgaagacccaaagatatacaccccgaaatctccactagacggaatataaacagccccaaccgtgcccgttgccagcgttccgaacagcaccaacagagcgagcaaaacaccgagtttcttcatctcttcatccctccactccgtagtcaacaccaatgccgccgagcaaggccagcagaagcgcgaggttctcaacagagtccttgagcgcgtcgagaagagctgcaccgttcgcctgccagagtgccgccaggaagctcaagagcatcatgtcatagaggagcacgcgccagcttgatgtaaagggctcgatgattactaaagccttgtttcccttgttcgtgagcgcccaatgcatgagcacgccgccaacagctccgaccgctagagcctcctttgtcatcatgggccaagcgatgtagtaccacgctcccgcgagcacaaagaagatgattagctggatgaggctctttgtcttcatactgccatcaccttgcgcgcctttttgagcttagaaacctctgcgaggagctgttgcttcttcctcgtgactcgcgcgagctccctctgcgctgcctcaatctgtctcctcaaacgctcagcgtaccgatcgagagtttcaatctcccgagaaatcccatctaggtcgtccatactaccgcctccggagggctttgccaatttgacgagaactgatttaagcggaggaaggcccaaaggcgccagagaaaagtcgcaggaggagtttaaaagcaaataagaacattttaagcttaaattaagcgtaaaaaagaagtcagccctcaagaatttcctccggccttgtgttacctagttccagccgatagagtttcagaaccgcctctctgaatacctggttgatgctcgttcccttggccttggcaagggcttttgcccttttctcaacctccgaatcaatatatattccacgaacaaacttagattgggccattcctccgctcacctcctacattttttcaaatagatcagcacgaacacgagggcaaccataacaagtgtcagcacgaaaaagaaagtcaatgtgagacaaatcgtgtagcaacttgcttgatagagggccttgtcgagggcaggcatgaggtcaatcactacctcatcctcctttcatttcttcatgactttgctgtaccgctcggcccatttccgagcctcccgccactccataaaggcttcataggcaaatgcggagagcactactacgaacgctccgccgaaaaacagccagataagttgaatcgggttcattctccaccccccttcagcttttcaaaaagctccaactcggcccgcttcagagcgagcttgtgagaaacgaaagtgcgcgtccgctccacgtcaccccaaagccaaggagcgatgatgaacgagcgtaggcgcgcaaagcgaccgtccaagagcttgagttgcctctccaagtcattgatgccttctctgacaagcttccatggcctgaagagtatgtcatagagtattgagagtatcgctccgagcaggagaaacccaagaagccagccccaaacgctcattctccaccctccagaaccctctttaaatcgtccacgactgcagaataccactcgtcggccaaaacagccttatttaggtagtgtgtcgctccaacgctcccgctcacacggccctgaataaagtctgcaatctccgacggcatgcctttctgaatgaggaacgtataatgccacttcctgatactgttagccgagacttttccaaaagctacgagatcctttgcagtgttgtactttacctccaggggttcgagtctctcgaaaaagtctcgcggcccgtaagcccaaaaggccttcttcttgcctttgcttgttgaaaaaattgggtaccgcgccgctttgtcatcaatgaggtaaagctttgtcggatcgtaggttctcagcaattcaacagcctgcttgagcctgatgccagagaacaccagcaagaggaagagtgtttcagcgggctttccgcgtttttgtacctcattgtaagctgtcctcacatcctcgttcgtgatgaagacttccctaactcccgtcgccttgagcttcgcgatgttcttgatcttctcataactgttggagtcgatgatgtcgcgctcaacgaggtattttgcgagccttctgagtgcttttgaaacattccgcttgtatccttcagcgcggagggccttctctagatcttcgagtgttcttatcacgtgccgaccaaacagcctgtcgagcgctctaacgtagtctttccttgtttcttcgccaacttcagcagagagccattctgcaaaattggccctttcagcagcccacaattcattaagggaacggccttctaagccggaggtcgcgggttcgaatcccgccgggcccgccagcaatacaaacttctcctgcgcgaagtttgatcaaggctcgtggttccttctaaaattgctcttctaagaggattttcatgataaattagccacaatttagtgaatcccctaagtttcgacctgtaaaaaggagtttcttccccttgacgccctacgggcgtctattacaaagcaaactcacacagatcgggcaaattaaaaatagaattcacaaccatgacagtattcaaaaagaaaatcctaatcaaaacagccctctaatcaagaaccacaaactttgatgaaactttgctggcaaagtttcagcgctggcggaagaaaagtatgcaattctaacaagctagcttttaagcgggtttactcgccaatctgccaaacttacgggattttctcaccgtatagtgtccaaaggacactaaaaaaggaagttaaaatctcaattagcgaggaaatcttggagttaaacccgtgcgagcttgccttctataggagcatatacttccctaacaggcaagctcgaggagaagggaacccttttggtcaagctttttccaaaagcttgaagggcaaagtttcatcaaagagggaatgtccttttgagcatcttgcttttcaatgattctcaatgcccaattagcggttttagagggtttattcgtagtataacgcccttcgggcgttaaaaaaggagaaacacaatctacaaggattccacgtatcacgagttaaaaagtggatgaattccttgcaattgctcaattggaaagtagtttctcttaccttgacacacttcggacgtcgattacaaagcaaactcatggataacgagtgaataaaaatgggtttctctgggaagctttttccagaaagaggctctttcccagtagggatgacagttccgatatacacaaaaaatttaatcctcctggacaaaatgcggggggtgggaaaatgaagatccactacgagtgctttgcctgcgccgccaaccagtgccagaggatagtcgagatggggaccgatgacctcgaactcagaaagaagggcgtggtcgaggcggccaggctgatggcaaccatcagtgaagactctattccagcaatcttcgggagcgatgtcttcctcggggtttatagggttataggcaatgacgacccgtttagagagtacaaggagctctccaacaggctcgcggagagagtagttagtgatcttgaaaaggaggagatagacctcagaacggccctaaagctcgccatcattgggaacgtgatagacttcgcggtcggctactctccagagaaaatagaggaggacgttagggagatgctcggggaggagctctacatcgaccattcggaagagcttttcaaggtcctcaaaagcgcaaagacccttctctatctaaccgacaactgcggggagatttactttgacaggctgttcctgaaaaagcttaaggaggccttcccgcgccttgaaatctacatagcgggtaaggaaggtccaataataaacgacgcaaccgttgaagatctacagaatgctggctttgagaagcttgggagggttgtctcaacgggcacgaggatcgtgggggttccttttgatagagtttcggatgagttcagggcaatctttgagaaagtcgacgtgataatcgctaagggtcagggcaactttgaaaccctgagcgagataaacgatgaaagggtcttctacctgctcaaggcgaagtgcaggccgatagcgagggagctggaggtcccgcagggagctatggtttgtctgcgggctaggtaggtctcttctcccacttcgggaacttccagttcttagttatctttgtcacgttcctcacgagggccttttctttgggatgcttcgacacgagctcctcgaggaatgaaatcagctcgtcgtaggcgggcttgtctattggaaatggaatcttatctttgccaccgacagcgtaggtgaacttgaacggatcaggtggatgggttaccggatccttccagctcggatggacgtcgtagacgagctcaagaaccagcgagagcgcccttaaagtgctcggcccgaggcccttcaaaagcagaaactcctcatagttgctgacgctcagctcccttgcaaattcaagggctctcttgttaagctcaaactttccaaggctctcgtagcgctttataacgtccttctcccacggctccctcggcttgtagtagacgagcggacggtagccattcgctattgccttcaggctttcaagctctctctcgattttcatgggactctcctgaacaacgtcgaggagcgtcttctggtactccttcgcctcccttgagacggtgttaagtgcgaactccttctccagaccggcgatggccttatgggggttgagggtgaaggtttcgctgttgaaccagtggaagcgccttgccattctctccctcttgttcattccctgctggatgaccgcccagttgccctcctcgtcgaggaggaagacgtggtgatagagctggtagcccgtttggagggcaacggtgtcgaccttggccaccagacgggaagtcctcacgtatggctctggatcaaggtcgtaaagagaggctatcctcttcagctcctccggtgttgccctgcttttcttccccttccccccagccactttaactccgagttcctccttccagagggcttcttttatcattcccgcagttaccgtcgtcgaaccggaggagtcccagtccataccgatgacgttgttgaaggcttgaaaccacactggatcggagagcctctcgaggagacctcttgttccgtactcttcaacagcgagcttgagaactagccttgttagcttccccattcttcgtgcgagccattgagggacgtgcccgccgtggaggggcaaatcagcaacgttcctcatcacctccgctttgtacgtttggtgttttaacctttgctaggatgagctgaagtgttcaccaatggccgtaaatttccccatgttctcgatggaaagccttttatcccctcgtttcgattcccgtctgcaggttaaggttacggagggtcaggaatgggagttgagaaggttccgaagtacgatatacccacgaagaaggttgactacgtttttatcgagctggacaagatgaagccccacgaacagctcgttcagaaggagcttgaagcttttattgagagcgtcactggctccggaatcttctggaagccgatgctcctcgcgaaggttcccggtgaggacatgtacctcatcgttgacggccaccaccgctgggccggcctccagaagctcggcgcgaagagggctccctcggttatcctcgactacttcagtgacgacgtcaaggtgtacacctggtaccctgccttcaagggcgacctcaacgaggtggttgagaggctcaagaaggaaggccttgaggtcatcgaggatccagaggctgaagagaaggccgagaggggcgagatagcctttgccctcgtcggcgagaagagcttcgccattcctggtggccttgaggagcagaagaaagtcagcaaggttctcgacgagatgagcgttgaggggaagatagagctcatttactacggcctcaaagaggacgcgagagaggacatggccaaaggtgagatagactacgtattcatcaggaaggccccgacgaaggaggaagtcatggagctcgtcaagcgcggtgaggtttattcaccgaagacaaccagacacgtccttccgttcaaccccgacaagatcgacgtgaagctcgaagagctgttctgatgtctctttcttccatcttattaacagaaagtctataaacccacacccttaggtatatgccgtccgatgatgacggatcaaccggccgaacggtgacgacatcggtcttgtctgagggacacctacacaggtacttacaaaaaagggatttaaagcccgccgcaaagactgtgataggggatagggatgttcagtgtgtttaaacacagagcattgctctcgaatgaggacgcgtcttcccccggagaaaagtaccacttcaggatagtccaatcgattagggatatccctgaaaagagggccgtggtaataggcagggcgggcacagaggtcccaagaagatggaagctgatacccgttagctcggttaagggctattttgggccgagggaactgcacagaatccttgaaggaatagtcgagcacctcaaacacaacccagacgtgcccgtgataatcgactgccttgaataccttaccgtttacaatggttttgagagtgtcctcaagttcctccatcttgttagggattatgccatactaaccagcggacgggtttatctggtaacagatccaatggcatgggatcccaagcaaatggccctcctccgcgggctagaagcctaaacgaacaaacaaaaacctgaaaagaaaatcagagctcacctttttccttaagcatcgccaggtagctcgtgaacgctcctgttgagattgtgtcgccgaggccaacggttgagacagggttctgaacgagcctcgtcggaatgatgacgagcttgtactccttcgtcctcagcctcctcttggcctcttcgaagcggagctttacgtattcaccacgctcgttgtaaggaacgttcattccaacgcttatctggtctggggacgctatgtcgccaagagaagccctcgaagcggcgagagttgttgcaagctcaaggctctgtctgagctccgcctcgctcagcgggttgttggcgtgggcgatgtacatgatgtagtatatcgtgtgtatctggaggagctctaggttcatctcatcgatgagtatctttcctccaaggaccgtgtcctcaatgcggttgtaagtgaatatcctctccgcaagcttgtcgtagcccaaagcgctgaggacgtatgctatctctgcctcgtccattccaacgctgtccacgagcgggaagagattgtatattaccttctttctcagctcgcggttttgaatcgatgcgaactcaaggtgaactttgacgtccttctcgcgcttgagcaggagtatgtcctttttcgcttccctgaggtagtagttggcgtctttcccgtccgaatagcggagctttataccctgatagcccgacagaatcgcaccgtcaacgcgctggccgatctcggggaggaatggcttcagctcgggctcggtgtatatccttatgctctcgaagcgggccgaaacaatgaacctgcccgagaaggggacggttatcgtctcgtttccgagcctgaaagtcgtcccggccctgaactcaaaaattctgtttaccttaacagggtcgttctcgcggtaggcctcccacgggtgcttaagaaccagctttccaccctcaacgacggggtagaaaaggtttggcttcttaacaaacatctcggcctgcctcttggccaggtggggagtatagacgagaacctccctgaagtcgaggttggccagaaggttggctataattcccgcctggccgcccatcctctcaacgtcgtacttgaagtgagaatcaaaccatgcctggagctcctcgtttacgaggggcactgccatcggttttcctgtcttaagtgcgtgaacaagcctcgcgacgaagtccagggctcgtttatctccctcggatactcttccatccttctcttcacggcttcggcgccgaactcgtctatcagcctctggactgtctcgccgttcagataaactatcgcgtcaacgtttgtgttgtaggctgtgaacatcgaaagtccccttgccttctccaggagctccctgaccatgtgtatcaccctcagtgactaacgttgttgaaatggtggtaggtcttaaaaggatttcgggaagtatggggagaaatggaaaagtcagtactccgtgaaaagccttcccagctctggaatcttctccatgatgtccatctctctcagggcgagccagagggatgcctggttgctggtcacaactgggacgccgaggtcttcctcaagggcctcaattatttcgaaggttctccagttggtgcagctgataaagattgcatcggcctcgtctatgaagctcgccttggccaggcggtatgcctcgtagggctcaagcctgccgatttttaggttgtcctctatgccgagacctctgatgtccagaacctcaaactcgttggcctccaggaactccttttctctggcgtttatctcgtcggtgtagggggttatgacgagtattgactgcgcatcgaggattttgagcgcctcgatcaccgcggtgctcgtgcttatgactggaaccttgacttcatcctctatcttcgcttcaagctccttctcgtagtcctttccgccgatgaacgagccgctcgtgcacccgtataggatgagctcaacgtctgcatccctcaacagcttcgcgctctccacggcgagggagctcatcttgacgagctcctcttccgtgacgttcctcaagggcatcctcgatgtgtgaagtgaaacaccctcaggcaggtaattatgaagctccatctccatcgtcgtgttggatgatggaactataaggccgagccttccgcgccatccgtacatgtctttcaccttagggagttcagaaatggagctattaaacctttgggataaaaagaaatacataaatccatacaaggcacaatctcttccacatttctaatcagccaatatagacagcttccagtccaagtacctttgcgacttcagcttgccttttatcactcgtggcgagtttcgccctgaggctttttgcttgggctatgaaaaggctgtcgtaaataggaatgtcgtatctcatcgcgatttccaacgcttcccccaggtattttccgctagactccaggattatcacttcctcccttacgagcttcatcatgccttcgtagagcccaaaagcctgctcctctgttatcaacccgtactttctggcgtacttccatatcacgttcgcagtctcaagggccagcatgtcaacggcgtgaggctcaaggtctggctccaagtaaggaatcacgttctcccagccctcctcctttagaagaaactttgagaatgctgaggagtcaatgactatcacggtcatccctcacgagcttttgtgccgtcccctttggagcctctggaagggtttggatgtaggaaacaacctcctgaagggcttttttctttctgtactctttgattttcttctttatgaactcccgaatctcctcgctccagttgatctcgccttttaactcgtccatttcccgcttgacatctggcgggacgcggacactaacaacgcttcccacgtaattcacccagggaaaaatttgtagtacaaacatataaacattttgtatacaccccctccaattcgtagaaagcgggctaaaagcaacggctttcaagtggttgaagtatcagggatgattccaaaatgttttaatgtttttaggacgatatccattcagagagcaaggaggtttatggatggctgaggccgtagattacacctacttcctcaagaaaatagaggagatcgagagagaactgaaggagataaagcttgaacttcagaatcccaagaagctaatccatttcattcccagagtcattgagataaggggcgagtttgggggttataagcttagaaaacccctcacgctgaacgtggagagagaggctggaacctggtgtgtcgagaacagggagcttgaagtttacggatgcggccccacgctgaacgatgcccttcatgatgccgagaaagttttcgaagccctgatcgaggaatacgtcttggaagacgaagaaattctcgacgagagcgccaaagaactgagaaaagctctccttcagctcgtggaggtttagggacatgaaggcaagagatgtccagcgggcactggaaaagaagggcttccagaaaaaggagggtgggaggcacacgaagtacattctttacgttgaagggaagaagaccagggtaataacggtgttcagcagaggtagggataagaaagagctcgggaacgaccttttaaggagaataaagaaacagctgcatcttgaagaggatgatatgtttcaagacttcgtggagtgtccattgacctatgaggactacttgagtgttctgaggcagaaaggggttatataatccccttgatttccaaagcaaaatcctctcaaagatactggaggattaacgcttataggtcgctctcttggctctattttagttagtgtagataacctttttattccaatcgaccccataaaggagtctcatgagagtgaaaaatttaggcaaaaacaaataagccccccacccatttctccttaggggaagaacaatgaagctcgacgaagctattatgaagcgtgcatccgtgaggtacttcaaagatgacccagtaagcgacgaggagataagggcgctcatagaggccgcgataagggcgcccacggccagcggactcgagaactggcttttcgttgtattcaagagcgaggaagtgcggaaggaaatctacgaccttatcggagagggcatggtagagtactaccgcgcagtgaacttgccggaggagaagattaagaagcttatgaagagaatttatgaggagggaatgtaccgggcgccggcctacatcgcggtcttcatagacaggagggttcgcttcctcaaggggcgggagttcgacgaggtcgagttcatctggagcgtggagagcgcggcgatggccatccagaacctcatgcttaaggcagtggagctcggcctcgggacggtgtacatcggcgtgacgaacttcagagggatcgaggagaaggtcagagagctcgccggtctggatgagaactactacctcgtgggcctcattcccgttggaaggccgagggatgaggtgaaaccgcggagaagaaagaagggcgtggaagaggttacgcggatactctgaatgaacaagcaaacttttttatcctctttttcttctacgtctccaggtgaaaggatgatagagttcgtcatagccctcggtctcgtaggcggctggctaacaatgacttcaacgctcttcctgatgctcggatttgggaagatgtgggggttagctggtgttctgattctcgtgggcttcatcctgatcaatcaaaaactgaagagaaagtacatgcagacgatagttaatgccacgccgagggccaaggagctcgccaggcacatattcgagatgaacgagctgatactgctctcatcctacgtcctcggcctcgtcctctatgaggtcatccagaagtacgttgagatagtgataaaggctccagtggggtgaggttatgttcaacgtggtcatagttaggtacggcgagattggaacgaagtcccggcagacgagaaggtggtttgagaacatactcatgaacaacatcagggaggctctcgtgagcgaggggatcgacttcaagaaagtggaggcaaagcacggcagagtccttgtgaggacaaacagggccagggaagcaacggaagtcctcacgagggtctttggaatagtatcgctttcaccggcgatggaagtcgatgcagagcttgagaagattaacaagaccgccctcaaactcttcaggaagaaaaagagggagctcaaccttgaaaaaccgaagttcagggtcaccgcgaggaggataaccaaggagttcccgctgaagagccccgaaatccaggccaaggtaggtgagtacatcctcgaaaacgaggagagcgaggtcaatctgcacgaatacgacatcgaggtcggcgttgagctgatggaggggaaggcctacatcttcgttgacaaaatcagggcctggggaggactcccgatagggacgcagggcaaggtcgttgcactgctcagcggcggtatagattcgccagttgcagccttcctgatgatgaagcgcggggtcgaggtcatcccggttcacatatacatgggcgaaaagacccttgaaaaggtgcgcaagatatggaaccagctcaagaagtaccactatggcggaaaggctgagcttattgtcgtaaaaccgcagaacagagaggagatgctaaagaagatcaaagagctcgggaaggagaagtacacctgcgtactgtgcaagttcatgatggttaagcacgcggacaggatagcgaaggagttcggggcgaagggaatagtcatgggcgactcgctcggacaggtggcaagccagaccctcgagaacatgtacatcgtcagccaggcgagcgacctgcccatctaccgtccgctcatagggctcgacaaggaggaaatagtcgacatagcgaagaagataggcacgtttgagctttcaactctccctgaggacgagataccgttcatccccaagcatcccgtgattagaggttcatgggaagagttcaggaagatttacatggcgatattcggggaggagccgagaaagcgggattgctgaggagggaagagcacgtgaacttgcgaagtttgggggttacgtcgcgctttctcttcccatcatctttgcagtcggactttcaatagtgatacatcagaacccctggttctccttcaccgacaacgccctcagcgacatgggctctctcaaaaatcctgcccggtggtggttcaacggcttcctgatggtttacgcgctgataacactggttccatcgatagcggcattcagaaacgggctcagctacttgatgccagcggcggcgatcttcctgttccttgtcggcgtctttcccgaggaaaaggcgctccacgcgccatcggcggttctcttctacctgctggcgctgactgacatagcgataataggtatcaagctctggcgctccggagtgaagtttggctacctgtggagcgctctagccgtcctaactttcttcgcgatgctctacctcacgagggtcttcaagggactcgcaatccctgagctggttggggctgccacgatattagcgtggttcgcttacattggcctcttactccttaaaggtttcaaactttaggttctggaaagagccttaaaggggtctccagagaggatagaccatgaaagccgtcgccctgctcagctctggtattgattcgcccgtggccatttacctaatgcttaggaggggcgtagagataacgcccatccacttcaggcaggactccatcaaggaagaaaaggcctcggagatagtcgagatcctgaagcgctacgggaagctcagcgacccaatcattgtgaacttctccgaggaacacgttccagcctttgagaaacttagagaactcgggaaaatcaaatacacctgcgtcctgtgcaagtggctgatgctgagaaaagcctgcaggatcggccacgaaatcggggcgagtgcaataataacgggcgactctctgggacaggtcgcttcccagaccctcgacaacctgatggttgtgagcactgccagcgacctgccaatcttaaggccactcataggactggacaaggaggagatagtgagaatagcaaaagaaatagggacgttcgagataagttcaaggaaagagcccccatgtccgtttacgcccaaatacccggttgtccgtgcctctttgggggagttccaaaagatcctccaggacttgatctgagttagtttcaacttttgacgtggatactaccaaaaaattttataagccaatgtccaaaatctggggatgatactactgaaagttaaatcattgactcctggtgatgagaagtgaacggccatctttgtgatgacatcaaatcaaggatcgcaaaagacgtcctagttagactaaacgcgtttcttttgagttactttgggtggatgtttttcagtattctgtacatatacatcgggcggtggagtgttgacgtaacggagcaatttatcaagctcccgttcaactctcgtgatttcattctaacactgttaaacacaactaaaagcattcctcccgtataccatctcctaaacgcagtttattacattggattcgctggatccatagcgttcatggttctctacgtccttatctacctcaaggacttccaaacgtcggatgaactgctcgccagatacttcatcgcctatgccacggcgggagcgatatatttaacgttccacatttatgcgccgcactacgtttacaacgttccaggatacgacactgacaacctttttacgaggcaggagttcgtactcccttcactccacaacacgtttgcggcgattcacataattaccatatggaaataccggaaaaggcttggtggaaaggtgcttttgactatcaacaccctgatcccctttgcaacggtcttactaatacaccactggatatacgatgtcctggctgggttcctccttgcgtgggcaatttcatcgctgaccgatgggtggatggcaaaaataccaagaaccctgtaccagctggagattagatccctgagtgccgtcaccttactgaattttctgctggcggctcttttgctgctgttttcgctagaaccccagaagtggatactgctgttcagggcgctactgaaccagccatgaggaaaaagcttataaatcgctctccccccacttttaaacgtgccggggtagcctagctcggcagggcggcggactcgtaatccgcaggtcccgggttcaaatcccggtcccggctccattattattatcggaaggccattctcacttccaacacctgctcatcattgccgctgagtagctcccttttgatgtctggactatttctcaccagttatctacaatgtgtgccctaacgctaaaagggtcaaaaatttagtagaaaagccactgcaaacactgatacaatccctgtcacccgggagcacaactgcaacaagccgctcgtatccccttgcaccaatgaatccgttgagtattatgcaacccttattatagggattgcaaaaacttcttataaacctttggattttgggtagaaaatccaatgagttctcaaaagagctgaagagtttgatggaccactgctgaacaataagagacacaacaaacgctaattcaagagcccctaaaaaggcaatcaccctctcaacagggccagcaggaatctgaatacatcctcagccctaaaatgtcctgtctccacaccgtatatcatactgacaggaacctcgactattttcgcccccatttttgcagcttttatcagcatctcggtttctacctcgtagcggtcgctctctatctcgggtagaaacccccgcctgtaagctctaaagccgctctgggtgtcgtagacgtaagtcccaagcttcagcctgatgagcctcgtcgttattatgttgctcagcctcctgtggagtggtctcttaccctgcacctcgaccttccttgcaccgattacgaggtctgccctcccctcaactattggcctcacaagctttccaatctcttctggaaggtgttggccgtcggcgtccatgaagaccacgatgtctcctgtggtgtgctttatgccctctctcatagcacagcccttgccgcagttcttttcaagcctgaaggccttaacccgaggatctttttcggaaaaggagagggcagaggaataagtattatcagacgagccgtcatcaacgacaataacctcgtcaacgaactcaggaatcctctcaaggacttttggaagccgcttctcctcgttgtatgcaggaattaccacgcttatcctcataccaccgagcatcattcgtcctccaggcgttcaagggccttcatcttctttctctcgaagtcgtccttgtcgaggaactcccagtagtgctctttagccgggaatctaccctctttgacttccccgcggtagttctcgagggcgagctgaattatgctggctaaatcggcatacttcttgacaaatgggggaacgttctcgtagattccgaggaggtcgtgccacaccaagacctggccgtcaacgtgaggccccgccccgatgcctatggtcgggattgaaacctcctccgtcacgagctttgccacatctgcaagaacgaactcaagaaccacagcgaaggcgccggccttttcaagggccttggcatcgcgcagaatctcctcgatctcttcctcagtctcacccatcagtctgtagcccccaaggcggaggtagcgctgtggagtaagccccgtatggcccatgactgggattcccatgcggacgagctttttaacgagctttttgtgatcgtagccgccttctatctttaccgcatcagctccagcccgaattagcctcatcgcgttcttaacgccttcttcgacgctgacctcgtagcttccgaagggcatgtccgcgagaactagagccctctttacggccttggcaactgcccgcgtgtggaagaccatctgttccatgctgacgttgagagtgttaggctcgccgtagacaaccatcccgagcgagtctccgacgaagactatgtccatgccagccttgtcggcgagaagagcggagggataatcgtaagccgttaccatcgctatcttttccttccccttcatctcgattatcttcctcggcgttatctccctcatgtcaccacccctaccatttagacggcggtctaattaacggtttcgattagtgggatttataaaaactcactcgaattctcttcaggtggaaacgtggaagaggaatgggagttctttaaacctctggatgttccaagagaggacagcggaaagctcgtgagggagatgcgagacgatagagaaaagagaataatgggtgagggggtgagagtatgaggaaatgggaacactacgagcacactgctgatataggcgttcgcggttacggctcaacgctggaggaggcctttgaggccgttgcactcggtctcttcgacgtcatggtgaacgttaagaaagtcgagcctaaggagtgcagggaagttgaagttgaggaggaagaccttgaggcacttctatacagcttccttgaggagcttttggttctccacgacatggaagggctggttttcggggacgttaaggttcggatagagaagaccgagaacggctacaaactcaaagccaaggcctgtggagaagttctcaacccagaaaagcacgagccgaaggaagaagtcaaggcaataacgtaccacgacatgaagattgaaaagctccccgatggaagatggatggcgcagttcgttccagacctgtgagggatcaccatgagcgcgagggacgttgttaaggaggcgaatccagccttttacgagaggtattcgaagttagaggacagcgacgagttctgggagttcctgataaggccgctcaggcagagcatcagggtaaataccctaaaggcacctctagaggtcatcgttgagaggcttaaagaggagtttgagcttgagccgatcccctgggttcgcgagggcttcttcataaacgtggacaacctcgctagggttccggagcacggcctcggcctggtcttcggccaggaggccagctcgatgatacctccggtcgttctcgacccgaagccgggagaactcgttctagacatggctgcggcaccggggtcaaaaactggacagatagcgcaatacatgcagaacgagggttgcataatagcaaacgacccaaacagggacagagcgaacgttctgatagccaacctcaacaggatgggagttctcatagcgagggtaacaaccagagacggggcaagctttgcccgcttcgaaaacacctttgacagggttctcctcgatgctccctgctcctcggtggggatgataaggaagagctggcgcttcctgagggagtggcgcgagaaagccgtggttaagtacatgaacgttcagaagaggctcatcttggccggctacagggccttaaagcccgggggagttatggtgtactcaacctgcacgatagaccccctagaaaacgaggaggtcgtggattatctcctcaggaagacggacgcgaggcttgagagaatagacctccccgttaagaccagcgagccggtgcttgaatgggaggggaaggagtactcggaggagctgaagaaagctttgaggatccacccgaacgacaacgacaccgaggcgttcttcatagctaagatagtcaagccgggtgatggcggtgagtgaggagaaggcgaacccgaggaatgagatagggaagacgaacgatgcagagcttgtaaagagacttctcatcgagaactacggctacgctctagacctgatatacctcatcaggggcaaccaccagaaggtctatgcgaggaagccctgccccctagacgtcggcaggaacgacggctggctctacttcggaaggatcgagagcgacgggataaggctgaccatcgagggaagctttcttgtcgggccgaaggcgacgaagaacgtggtagagctggacgacgaacgggcgagaaggtatctggccggtgagagcatcgaggtcgatgaaaatctctacggctggttcatcctgaagtggcgttcctactacctcggttcagcgaaggctaaagacgggagactcctaaactacgtcccgaaggagaggaggcttagggcggagtaacggttttgttcctcgaaaccttaaaataactttagggctacctaaggggtggggtgagagagatggtgccactgaagaggatagacaagattcgctgggagataccgaagttcgacaagagaatgagagtaccgggcagggtctacgctgatgaccagctcatcgagaagatgaagcaggacaggacgcttgagcaggccgcgaacgttgccatgctcccgggcatctacaagtactccatcgtaatgccagatggacaccagggttacggcttcccaatcggtggagtggctgcctttgacgcaaaggagggcgtaataagcccagggggtgttggatacgacattaactgtggtgtcaggctcatcagaactaacttgacaaaggatgaagttagaccgaaaatcaaggagctcgttgacaccctcttcaagaacgtcccgagcggacttggaagcaagggccgcgtgaggcttcactggacacagcttgacgatgtattggccgacggtgccaagtgggcggttgacaacggctacggctgggagagagaccttgagcatctcgaagaaggaggaaggatggaaggggcggatccagatgccgtcagccagaaggcgaagcagaggggtgcaccacagctcggttcccttggctccggaaaccacttccttgaggttcagtacgttgacaaggtatacaacgaggagatagccaaggcctacggcctcttcgagggccaagttgtggtcatggtacacacgggaagcagaggactcggccaccaggttgcgagcgactacctgaggataatggagaaggccaacaggaagtatggagtcccgtggccggacagggagcttgtgagcgtcccgttccagagcgaggaaggacagcagtatttcagcgcgatgaaagcggccgccaacttcgcctgggccaacaggcagatgataacccactgggtcagggagagctttgaggaagtcttcaagaggaaagcagaagacatggagatggagatcgtctatgacgtcgcccacaacatagctaagcttgaggagcacgaggttgacgggaagaaggtgaaggtcgtcgtgcacaggaagggcgctacgagggccttccccgctggccacccggatgttccgagggcatacagggacgtcggccagccggttctaattccaggctcgatgggtaccgccagctacgtcctcgctggagcggagggctcgatgagagagaccttcggaagctcctgccacggcgctggaaggctcctgagcaggaaagctgccaccagacagtaccgcggcgacagactcaggaacgaactcctccagaggggcatctacgtgagggccgcttccctccgcgtcgttgccgaggaggccccaggtgcgtacaagagcgtggacaacgtcgtccaggtcgtccatgaggccggaatagcgaacctcgttgcgagaatgaggccgatgggcgttgcgaagggatgatgtaacttctctgttttttgttcttctgattcttcgacattaaaaagagaggagtcagttcagatcgcttgtgaggaacctggcataagccagggcaaagggcaggagcagcattacaagcagggctgcgaggttgttgaagccgtagatgagtgaatcgctcagcgggatgtagtagttgaagaacctgtcgcctgcgaagatgtagctgaccagctgaacatagtggtgggcggggtttatggagtgaagcctgttcatccagacgtggagctcatcggcccatatctggtaggcacttgtgcctattggaggttcggggccagcgagctttggagcgactatgcctactactatgccatagaacaccgtcaggaagatggcaagaccgactcccgccagcattgaggtttcgggcttctttgagagcgtagagaggaggattcccagggataagaagaccatcgtgtagagcattgtcaccagaatcgccaggaagctcctaaaaagtgattctccgtcgaggggtattccaaggatgagcattacggctatcatgactatgtaagagaccatgtaagtcacggctatcagcaaacccatgccgaggaactttccgtttatgatctcgtcgcggtagacggggtggccgagcagtaccctcactgtaccgctctcgacttccctgtttatcgcgtccgcgccgagggcaacacctaagacggcaccgaggacggttattatcgtcatgttgacggtgaaaagcatcgcgaggggtgttgtgtaaatctcggcgctgacaccccagaggccaagctcgttggagtcgacgctcggaacgcccatctgcacaaggtaatccttgatagagtagacggccagtccaaaaatgataaagtagaggacaacgataacgatgaaccttctgctctttacagagacgtagagctccttgagagccaggttccagatggggttcatctcctgcctaccctcctcataagccatatcaccacgccgaacgccaccacaaggaggaggatgccgatccaggtgccgcttgagctctgagcaaccctgacggttaccacggtctcggcctttgcctgatcacccgcagccgtcacggttatagtgtacgtacctgcgggagctgattttggaacgcggatcctgagttcggcctgggccggccccgttgaccagtaaacaccgcctcttccccccatcccaacgcggggaatcgttgatgggacaacttcaacgtcccagccgctcggggcctgtactgtgaacttgacgttggtaactgttcccatcgcatccagccagagtgcagtggcggtgcttccacccgctttaaccgtcagggttggattgtccacgtttacgcggagggacgcagggttctcgacatgaatcttgaggggaagctcaactcttgagtttgagcctgaaacgaccaccgtggcgtttaagtccccggattctacgttgaacggcggaaggatgactagatatgcgcttccactttctccgctcgggactttaatgctcgctattggaacggtgcctttggggtcctggctgaggatgtagctccagccctcggggagcccttcaacagtgaccctgtaatcgtcgtccttggatccgaggttcttgatagttatcgcgacgctccccccacttcctgatgttacggttaggacatccctctctagggaagccttgaagtagtactccgcgcgcctgagctttatggtcagggttctctcctccccatcggagagcttaacgtcctcttcgactggggaacagccctctgcgccagccagcacggtgtactcccctggcttgagctcaaagtttgcggatcccgcgggggaaactgtaacgttctcaccgccgaccgaaacccatccccgaatggggtttccgctctcatcagtgaggattacagtgagctttgcaggctctccgaggtacgtcttgtacacgtaaacgttcagagcatagctctgcccgttaacctcgaactctatcctgtggtctccaagggtcgcgtttctcggtatctccaccaccagctccgcggtgaagcttccatcgacatcgaagctcctcagcctgtacctgccgtccgttaaatataccccccacccctgtggaacgcttccaggggtgaactcaacccttcccgtccctgcgaaggcaaccggcacgctcaggctggttcccgcttccgcttccaggcttaggtagggaattgaaacttcgattccagcactctcaacttccaggctgcctgtgaaattcccaacggtaaacttcaccacgccgcttccagtcggctcaatgtggagggtcaggctgaccgttcccttcggtggaaccgatatttcacccacctcaacgcccccgtagatgaagttcgccttccagccagagggcagggagagaatgccgagcttcaggttcagctcaacgtcgctggagctggtaatagtgatcggcacgtcaacgggtccagaagctctaaccttccgatacgggtagaagaccgcgtactccaggttcacgatctccgaggcggggtcagcgacgtaaacccttatctcctttccattgtattcgagtgccactagatcaaccacagcgcttccgttgacttcaagcgttttggtcaccccgtttactgaaacatcaacggtttcagcgccaaccgaggtaacttcgaccgttgtgccgttgaacgagaccctctccccaaccttcggtttaagggaagctactaactttggcttaacggagacaaccacaaaaccgccctgtggggtgtagcttcccataaccactctgatgccatcgcgctctatttcgcgcccgaagtcaaagggcatgagttcaagaatttcagctcctttcttcagcatgagatacggtgtccccactgctgatttgaccaccgtaacggtgtagtcgcccacggttatcgcatgttccggtgcaatccgtccttcaaagaccgtcacgtacggctgggcgctcgctaggggcaaaagaaggagcatggacagcaaaaggagaaaggctttcctcattcctcatccctcccgtagatcgtcttcatgaaaacatcctcaaggcttggttcttcaacctcaaggctcaagatagtgactcccttcgaagtgaggtactgggagagccactcccttatatccgagcgggcaaaaaggataatcctatttggggcgaggcgctcaaccctggtgatttcctcatgccgaagctcaggtatgggctctttcgtctccacctttatctcgtagccctcaagctccatgaactgacgctttatttcccgtatagggccaactgcttttagccttccgcggacgattatgccgacgcggtcgctcagctcctcgacctcgctgaggatgtggcttgagaagaagacggtccttccctcagccttcgcctcccgaattacttccttaaccaaatgcgctccctctggatcgagcccgctcgttggttcgtcgagtatcaacagctccgggtcgttgataagagcctgtgcaaggagaaggcgctgcttcatgccctttgaaaacgtcttggccttccgatagcgggcatcccagagaccaaccctcttgagaagttcagttatccgcttttccctctcggaattgctcatcctgtaaaagttggcaaagaactccaggtttttccaggcggtaagttcgccgtagatagtggcgttttcagggaggtagccgatgcgctccttgatttttatcggctccctcgacatgtccattcccagtatctctattctcccatcgtcggggatgatgatgccgagcatgctgagaatcgttgtggtctttccagctccattcggtcccagaaatccaaaaacttcccccactttcacgtcgaaagtaaggccgtccacggccctgaacgtaccgtatgattttgtaaggttttcgatcaggatagcctgtgatgacataataacaccccatttaatagtaaaaatcttgccgcttctaagtgtggctaagggtcagggttttaaactttgctcttccacttgaaatggggattgaaatgaaggatttgacacacgttgacgaaaagggtgttaagatggtggaagttgggcacaaggacgttgttttcagaaaagccgttgccaaaggcaggataaggctgaagcccgagacaatagagctgattaaagctggaaagaccaagaagggcaacgttatagcggctgcccagatagctggcatcctggccgtgaaaaagacccccgagctgatcccgctctgccacccaataccactcacgggtgttgacataacctttgagtttggagacgactacatagaggccacctgcgaggtcagggcctactacaagaccggcgttgagatggaggccctcacgggcgtcagcgtcgccctcctgacgatatgggacatggtgaaggccgtcgagaaggatgagaacggacagtaccccttcacaaggattgaggacataagagtcgtggagaaagtcaagggagaagaatgaattggacaactctgcccagaaagggctataagcgtccccaaagatagggtagtggtgagtaaaaatgtactcggttaagaagagcaaatctggctacatcttcgataagccgcgggagaggattgccttcatgttcctgaaggacggcacctacttcatgtaccacgatgggagaattctctgctactcactgaaacccgttgatgtatcgagagaggaacttgaggagtttgaaagaacgggagaaccgccggagctcatcaagagagtgaaggctgggaaatatcctgaaaactgcgtcgtcaaagaactgccccccattgataagggccttgcccaactgaacccgaatagaaagtgcgtgataatctttacaggcttccaggatacggtgatagactacgtggagtgcaacggcgaaactttagcggttgcgaggctgatagacgaacccgggaaggtctgccgcttcgcagggaaaggaaactacaaggtggcggcggtcaagctgaagaggaatgaaccgtgccttaccagggaagaattcctgaaaaaggtagaagaatgcagaaagtgatcagatgttgccgattcgctggagaaccattccttctattcttatcggttcagtccttctggcgaggactatcgcctggtcgagcctcgcctcgtgctcggcgtgtatcgtgaagagcgggtcgccctccttgaccttttccccgaccttgacgtagagctcgattccagctcccttgtcctcaggcgctccagcggccctcgctatggcagttatcgccctgttgtctattgctgtgacgtaaccgctcgtggcggcggtgaaggtgtaggtcttgtcgccgatgggtatctcctcgggcttgatgttcgggtctccgccctgggcctcgatgatttccttcatcttttcccaggccttgccgctctcgaggatttctttggccattttcttgccagttccggcgggtgcaacgccacccatctcaaggagtattccggccagtcctgtggccttttctattaggcttccagggcctttgccagtcatgagagcggagagggcctccctggcttcgagggcagggccgacggtgtgtcctattggctgaccaccgtaggttattgcaacctcaacgtactggccgagcctctttccaagctctatgaagtccctggcaaggctcctggcctcctcgacagtctccaccttaacaccctttccagtcgggatgtcaatgagaacgtactgactgcccatagcgtacttctttgacattatgctggccagcatcaggccagtggggtcgatgctcagcgcacgctcggcctttatcgttatgtcatccgcgggtgccaggttgagcgcaccgccccagaccagacatgccccgaccttctcgacgatgcgctttatctcgtcgagggagaagctgacgtccgcaaaaacctcgacaacgtcggcagttcccgcggcgctggtgatagcccttgagctggtctttggaatagttaaacctgccgccgccactatcgggacgacgagaatgttggttttgtttcccgggacgccgccgatgctgtggacgtccattatcggcttccgatcaatatcgagcatgtcccccgtctctgccatcgctatggtcagagccgctatctcgtccatgtcgaggccgtttatctcaagggccgtcacgaaggagcttatctcgatgtccctgagcttcctgtcaacgatgtccctcacgatggcctctatctcgaccttcctgagcttctcgccgtgcatcttcttcttgatgtagcggacgctctctggagtcccggcagggataacgctgacggtttcgccctccgagaagttgtgaaggtcaagtacgtccctgcttataccgacctcaccctttccgacgaggttgctgagggcaacgctgccatagacggccttcttacctgcctctatcttaacgaggtcgtccgggtgaagctttgcctccttggcatcttcctcgtttattagaacagtgtacctcccactgaacatatcgagtatgcggatcttggctttcactctaccaccccctgggattggtatattaaagaaaaacagttcttaagatttttgaatattcccctggaaaaatccacttaaaaaaagctaggattgaggctcgttcctgtatatcagctggctgtcgtctcgccgtaccgcccacctgaattggtcaacatttccctaacgaggttttctccaagaagaacgcgataaaggtcgctggcgatttcccgaattggccccgggatagccccctggccctcccggtagtattcaacaaccctctcgagtggggcgctccagagctttccatcgaacaggtatacaacgccattcctaacctcaacaagcttgtttttgtatcccaacctggccaccatggcgccccacccaactaaagtatccaaaaagagattttaaaatttaacgccacagaaatgtttaataacagaagtgaaagaaaagttcaaaggtttttaacttcctcgtctattgactcttccagggctttctcccagtcttcaacgtcgaactgctcaagctcgccctccagctcctccttgaggttgagaacacgacgtttgagggccgtcttcgtttcctcgtcgtaaacaacgtaatagggattgttcttagctgagaggtagagcattgtgaggactatcactaggatgaggagaatcaccagcaggacgtacaacactgccgccgccattacctcttccctccgaagattgctttgaagaccctctttatcgggctctccggctcgggcggctgccacttgattcccgcaagtttggcggccagctgcttgatagctatagcggcggggctggttgggttcttgatgacgagcgggacgccgtatgcacttgcacgcttgacctcagggtcttctgggatcatagccagaactggaacctcaaggatggcctcaatctcatcctgcgtaagttctgtcttttcattggtgactctgttgaggatgacaccgagcgggagcgttccgagcttctccgctatgagctttgtcttcagggagtcagtgatagctgaaatctcagggttggtgacgactatgagctcctttccaatgaggagcgccgtaacggacgtcatctcaaggcccgccggagcgtcgatgagaatgaaatctgcgagctggcttatctccctcatgagctccctgagcctctcgggcttggccttcttgaccttctccaggctgagcccacctgggatgaccttaactcccgccggaccttcgtatattgcatccttgaggtctgcttccctcgcaagtacatcgtgcagtgtaactgggatgtcttccattccgagaacaagacttaggtttgccatcgtcaggtctgcgtccagcagaatcacttctttgccaaactgtgctagggccacacccaggttggcgactgtggtggtcttaccggttccaccctttccagatgcaaagactattgatctgccttccaaactcagcacccccgatcaaaactatggcatctgaatttgattatgcctatcggaacctacataaaagtctttttagcctttgtggtgatatccaaaaaaataaaatgtgtccaaggacacatctaatcattctgattgttcctctgcttcaagtttcttctttactgcttgacccgcttcagcgaagctcttgaaaagcttgagcatctccatcgggagcgggaggacgatgacgttgctcttgtcgctggcgacgtcgcttatggtctgaagggttctgagctggagcgccatcgggtgctcgcttatgatctccgcggcctccctgagcttctcagcagcctgcctctccgcctccgccagggtaatcctagcccttctctcacgctcggcctctgcctgcttggccatcgccctctgcataccagctgggagttcgacgtcctttatctcgacggtagtgacctttattccccatgggtctgttgcttcgtcaattatcttctggagctccctgttgagcttctccctctcgctcaagagctcgtcgagatgagcctgaccgatgacgctcctcagcgtggtctgggctatctggctcgtggccactatgtagttggcgacctgagtaacagcctttacagggtcaacgacgcggaagtaaacaacggcgttgaccttaactggaacgttgtccttcgttatggtctcctgaactggaacgtcaagaaccctcgtacggaggtcaacgataacggccttttcgaatatcgggattatgaagaacagtccgggacctctagctccaacgaccctaccaagcctgaagatcactgccctttcgtactccttcactatctttatggcacttgccagcagaatcaaaacaaaaagcaaaacgattcccaagactaaggtgccaaaacctgccatcggatatcatacctccttttcatcgactttttcaactatgagcgtcagcccgtccattccaactacccttactttttctccgaccttaatcagacttccgtctttggagacggctttccagagctctccgcggacttttatgaggccctcgggatcaaggtcttcaacaactttaccaacggcaccgatcatctcctctttaccagtttctggccttctgcggtgcgcccgtatcacagcggccatcccgaagaggaagaacagtgccagcaggactcctgttactattatgatgactctcaaggtagagaaagtttcgctgttaacgaggtatacctccccaccctttccgaacattatcagacctcccagtatgaagctgaccagtccggctatcgtgaagaggccgaacgtcggggtcagagcctccgctatgaagaatatcacgccaagtatcatgagcacgagcccagcagcgtcgtagccgaagtagcccatgcctataaccccaaggacgagcagtatagctcccagagtctccggaacgtgccagcctggggtgaggaaaccgaagaccagcccgagcatcccaacagttaagagaatgtacgctatccccggatttgcaaggaacgttactatctggtagctcagggatggactgagccttttcacctccacattggtaaagttgaacgtaacgtaaccctttccagccacaggaactttcgtcctcatcccgttggcctttttgagcagatctggaaggtcattcgcgatgacctcaataacgttggccttcagggcctcttctggggtgaggctgaggtcttcgaggacaaacttaacggccgccgtctcgtttcttccgctcgcctcagccagggagcgcatgtaggcggcgtagaagtttcgaatcttgtcgggtgctcttactatgctcccgttggcggaatagcccaagatcggctcacaggcgccgatgctagttccgggagccatagctatcaggtgggaggccatcgctatgtaggtaccagcagaagccgctatggcgcctcttggatatacatagattataaccggtacagtggagttctgaattaatgaaactatctccatcatcgcgtctccctgaccgccgggcgtgttcagttcgatgataagcgcttccgcgctgttcttttctgcagtccggatatagctctcaaactggtcgaccgtatactgagtgatagtgccctcgatagttccaacgtagacgactctcttctccgcgcttaccgaagggagaaggatgagaacaactaggagtattgtcaagaccatcggtcgcttcataggcttcatcaattagtgctacaactttcatggtttaaaccttttgctcggacgttggttaagggacgggaaatgtctatatataacttggtggtatcctagcccatgctgggagagctcgtgaagaagtacaaggttgcccgcggagagaagaaaagaaaggttgcctggacaatcgtaagggaggcggcacgcttctcaacggtggaaccatactgggaattcattcgcggtgaattcggggtaaatcccagccacatcaaagatgccatgaggttcctcgaagagattggagagctcgagataaagcgctccgcagacggaaagagactgtgggtaatgaccctaagggatataaagaggaacccagtaaagctcgaccgatggctgtcgacatcagaaagaccgcccacgaaatggtaaagaacggcacctggaagctcaaaggggatactttctaccaggcactccgactgaaaagcggcgtagtcggaattgtggcctacaacggggacttcctctttccagagacatggggaaggaaggagaaaaaagaggctagggaaaagctctccttcattctcggcctcgacactgacctcgactctttctattcagagataagtgattcgccgttctctttccttgtggaggagttcaaaggcttgaccgttcccgccgcaccctcaccctatcaagccctcgttgaggtgatagcacaacagcaggttaacttcgagttcgctcagaggacgataagaaacctcgtagaaatggccggagaaaaagctgggaacatatacgtctttcctacggccgagaaaatagcctctctatctcctgacgagcttaaaagagcgaagctcggctaccgcgcagaatatataaaacacgttacggagctttacctgaagggcgagctgaagcttgacctgtgggagatggacgagaaagaggccataaagtatcttacggccttccgcgggatagggaagtggactgcagagctcttccttgcctatgggctgaggaaaaatacctatccagcgggagatcttggactgaggagaggtatagctaagatattcgggaagagcgtgaaagaggttaaagagaaagacgtcagggaaatccttgagccgtacgggaagtggaagggtctgctggccttttacatcacctgctacgacaggaagaccgagctggagaggagaaggattaaatagtgttcaaagttactcgttggtggtgggagaatgcttgttgacatgcggacgttaaacaccctaatcgggatgaagggaaagagaaaatccgttcctggaacagctgagaggatgctcggccgtcttgagggtctgttgaagggggaagacagcgtttccttactcaaaagactgcgggaggagggttatgattagagcgtttatagacaccaacgttctcctcaatgtgtggttcaaggaaatcgatcctagaacatcaagaccactctggaaggcctcacttcgggttcttaaactcgtcgaggaaggtaacattaagggtatagtttccatctttacaatcatggagtcggtgcacgtttttaggaggaaaggtgcagacccaaaaatagcccagagcgatattcaagaccttggtcttgaggtgtacatccctgaaattcctgcattgctagacgcccttacataccagcttgagctcggggttgacccttacgatgccgttgctctttcctcggcagttaattccaactgtgacgttctgattgccagagacgaagaatttaaaaagaggggaaagggtgtgatcaaaatagtgagtcccgaggaatttctctcttatctcgaggagcgtgggcttctgtgagtgaagaaatagtgatctcccttccgaaaggaaagttcaaagccctaaaagggcgagatatagaggaacttatcagagaaaacctcccgaaggccgaggaaactctcaaggcggagagggaagagcatctgcgtgagaagatcaaaaagctcgaagagaagctgtccgagatagagggccagctggatgaactgagagagttctacgaaaaggcaaaagcagataaggagaagttcctgaccgtgagaaacgagcttagagaggagaacgagaggctgagaagggagctggaggaaaagaaagttcacaaaacgtgaacgaatcgttcatggagcgtgaacgaaaagttcataaatcatgaacgagaggcactatcatgcacgagctgctctcaacacccgaacgtgtgaggatcctcgaagaagttctgccgaagagtacggtgggggtagaagaagtcgcgagaaaactcgacgtcagcaagggtctggtctcaaagacccttcaccttctcgtaaagcacgggatcgccgcgaaaaaagggagaaagttccacatccttgacactcctaaaactcgggagcttaagaggtttctgaacttcattgtgctttcggaaaggctcaaaggactcaaagaagactggatgctcggtcttggtgtttacggaagctttgcctccggagagaacagggaagacagtgatattgacgtttgggtgttcgctaggaaggaggaactattaaagtccgcgaggctaaagagaaaaatctccgagctgacggacagagaagttgatctgatagttttaacgccgtcgaggctatcaaggctccaaaaagaagaccctatcttttactattccctcgtctacggctcgattgttatatggggtgagagacttgacaggattcagtctttgcttagagcggggtctgctgagaagagttccgccttccagagagaaagcgttgctgagcattaagagggccgaagagtggctggaagaggccaagaggaacagagagttcggctcatacaggacttccctaatggcctcctacctcgcgatgtttcatgctgccagagcagtgcttttccgcgacgggtggcgggagaaaagccactactgcgtcgcaaggtaccttgaggagttctacgttaaaactggaaagcttgaggggtactgggtagagctcctcgacaggatgagagaactcaggcatgaagatcaatacgacgtctcgtacactcccgagcccgatgaagttaaagatgccctgaaagtcgctgagaagtttattgaagtcataaagtctctcattggtgaggaacaatgaagctcataatcaaacccgaaaaaggcctaggaaagatagaggtcgagctttctgaagaggtttggagagagatagagcaacttagcgagcgctacggagtccctccagagaagattatcgagattaccctcaccagcgagttcaggaagccgaggggagaccttgaagagcttgagggaaaggttaaggaactcgaagaaaaagtctgggagctggagaaggagtatgcaccgcttcgtttcaaggcctacggactgagcgaggacaacaaaatcctcgccattgaactcaccggcttgatggccgagaacaaccagctaaggcgttttttgaagcttccactgaggcgagacctggagctgagaaagcttatatcctattatatgagatgaaaacctgcggatgatgacagcgaattgcaccgagcgtttgtgatgacgaggactggccctgacgccgtcccgggcgggcagtgaagaatccaagacgggctgagcaggggcgatgacgtaccctatgagcgccgagcccgtccggggcgtgattttaaattcatatgggggtgtgataatgataatagcggtaaccggaacaccaggtgttggaaaaacgactatatcaaagctcttggctgagaaactaggctacgagtacgtcaacctgagagactacgcccttgagaagggtataggcgagatgaaagagaatgagcttgaaatcgacgttgatgaacttagggaggcctttggaagggacttcaagggcaaaaacgtcgtcgcggatggacacctgagccacttcctcaaggctgaccttgtgatagtcctcagggcgaacccgaagctgatagcggaaaggctgaaggagaggggctacggcagggagaagcttggggagaacgtcgaggccgagctggtggatgtaatcctcgtcgaggcgcttgaggagaacgagaacgtgattgaggtggacacaacaggaaaaacgccagaggaagtcgtcgaggagatactgaacctcatacgaaggggcgttaagagaagggttggcatcgtggactggagcgaggtttacgacgaagttcttccatacctgcgcctttgaggtcttctcttccgctttctctttggtatcaacctcacgggacttccgcagtcggggcatacctctcccggcggcatctcctcgaactttttcccacagccgatgcagacgtagttccagcggatgaccttttttatcccacgctttagggttctgaactcgattctcagcgttctcgcgatgttctggaggttgtagtcgtcggtgaggagaactccatcaacctcgtaggccagcgcgaggacttcaatgtcggcctcgctcagctctccgagctcgcccgtcttctttgccgcttccctaacggcttctatgctctccctcgacggaagaaccaccttaaccttgcccgcgctgatgagcccctcaagaaagagcctagactctgggtctttgacttcctcaacgacaccaggggtggttaaaccttccacatcagccccctggatgaagaaggcagagtctatgaccgcttttttcctcccttccttttcatcgtccatgaggaaaccttggagaaaggcttttttagatttgcgtcgaaacgaagtcggtgaggaatgtgaaggtcgacctcaacgctgacctcggcgagagctttgggaggtataggctcggcctcgacgaggaagttatgaagtacatcacctcggcgaacgtcgcgacgggctggcatgcgggagaccccctcgtcatgaggaagacggtaaagctcgcgaaggagaatggtgtagccgttggcgctcatccgggctacccagaccttctcggcttcggcaggagatatatgaagctcacttacgatgaagcaaggaactacatcctctaccaggtgggggcgctctacgcctttgtaagagcagaaggcatagagctccagcacgttaaacctcacggtgctctctacaacgccctcgtgaaggaagaagagctcgcccgcggggtaatcgagggaatagcggacttcgacaaaaacctgatcttcgtgaccctctccgggtcgagacctgcggagattgctgaggagatgggcgttaaggttgcccacgaggttttcgcagacagggcctacaaccctgatggaaccctcgtcccgcgctcgaagcccggagcggtgatagaagacaaagaagaaatagccgagcgcgtgatttcgatggtcaaggacggcggcgttagggcaatcaacggtgagtgggtcgagctgaaggtagataccatctgcctccacggagacaacccgaaagctgtagagatagccgcgcacatcaggaaagtgctggaggaagaaggtgttaagatagtgccgatgaaggagataatccgttagatttatggatatgtagcgaaagtatacatggtgagaaaatgggtgtcattgaggctgtttatgaaaatggcgtgttgaagcctctgaagaaactgacacttccagaaaagaaaagggtcaagataataatactcgacgaattcatacgggacttaaacgacgtatttgggctgtttgaagaagacatcgaccttgagaagctccggaaggagtgggacagggatgtatctaatagacactgacgtaataatcgacgttcttcgaaaggtcgagggctcaagggagttcatcctcgaactggtcaaggagggggcttttatttcaacagtaacgattgcagagctgttttctggtagagacacaagagaccctataaaacgtgaaaaactccttcgctttttgtctcattttgaagctttatcggtgacaactgaaatcgcggttctagccggagaacttaggagggactacggactttccctcggagatgcgataatagcggctactgcaacagtttacggtctcacggtcgctacgggaaatgtaaaacactttggtaggattaaagaccttccagttttggtcccaccgtacaggaattccaaagggtgatactgtgaatataaagcccctcggagactccgcccttctcatttccttcggcgaggtcatagacgacgaagtgaacgcgagagtccacgccgttgcgagggcaattgagggaaaagacttcgggtggctggttgaagtcgttcctgcttactcttctctggcggtgatcttcgacccgctgaaggttacctttgaggacgttaagaaggccgttgagccgttgcttgatgtaagcactggagccttcaagggtcggaaaatcgagatacccgtcctctacggcggtgaatacggccctgatattgagttcgtagcggaatacaacgggctgggcgttgacgatgtcatcgagatacactccggaaagacctaccgcgtccatttcctcggcttcctgccgggatttgcatacttaagtcccgtcgatgaaaggatagcaaccccaaggctggagagaccgcgtctaaaagttcctgcaggttcggttgggatagctggaaggcagaccggcatctatccaatcgaaagccccggcggctggcggctcatagggaggactccgctgaggctcttcgatccaagcagagaaccgccgaccctgctccagccaggcgatgaagtgaggtttgtaccaatcagcgaggaggagttcgtggagctttacaggggcgaatggaggagtaagcaatgattgagctcctcagcgtcccatcactcttaaccgttcaggatgcgggaagaactggctaccgaaagctcggcgttccggtctcgggcttcatggacgacttctcggccagggtagccaactacctcgtcggaaaccccggcgattttccgctccttgagttccttctagcggggccaaagatgaggttcaacgcctcggtggtttttgcggtggctggggacgttgatgtaaggatcaacggaacaccaatcgaaccctggacgagctactgggcgaagaggggggatatcctcgaagttgggactttgaggagcggcctctacggctatattgcctttgcgggcggagtaaagtgcgagaaacttttggggagctgttcggcctatccaagggccggcctcgggaggccgcttaaagcgggcgataggcttagtgttggctacgctctcttaacgggcagggaaggttgctctctgcctcgaaagctgaagccggactattcgggcgatagcgtggaaatccgggtcgtcctcggcccagatttggaacacttcaccgagaacggtatcgagacctttctgagctctgcctacgtaataacgccagagagcgacaggatgggctaccggctggaggggccggttattgagcactccgaaaaagggcccgacatcgttaccagtcctttagtccccggaagcatccaggttccgggaagcggaaggccgatagttatgatgcgcgatgctcagactactggcggctacgcgaagatagcgaccgtgataacggccgaccttccgtttctggcccagagcaggcccggtactgaaatcatgttcaagagagtagctccggaggaagcacgggagatactaaaaaggcgtgagaaaacccttgaagcgattcggaagtttcttgatggagagatgagggcttactcggtgagggcgctcggaaaagaatttctcctgttcgccgggaagatctgagaaggagttgctagggggtgttaaattgaacctcgaaataagagtcgcaaccctggatgatgttaagggaatagttgatgttcacactgctggggaagagctctcgggattttccgttcgtgaaagatacctccgcggcggcccctggatgagcgtagaaacgtgcgccgtccacatcaatgccctccttcttgagggtcagtaccccatagtagccgagctggacgggaggatcgttggtgaggcggaggtctttctctcggaagagcagataaacggggagatgatgagaatagcccacctggatgtcatagaggttcaccccgactttagaggaaaaggaatcggcagggcgattatcgagtacattgagggcagcttcgcaggaaaagcggagctcctaacaacccagccggacgaggaagcaattggattttacaggaagctaggcttccacgaagttctctacgagaactggcttgtggaagtccccactgccaaatccagcggggacaatgttcggccccttaagttttttccctgggagaaggtgaaaggccttgaactggtcgccggcagatttcagagttcctatgacatgtggttctcaagctttaaagacatcttcgctggagtacacgagctcgcggaagctgggaaggtaggcaactcctactacgtcctgaagcctttgccaggtaggcctagaaaggcaagcctcttcctctggggagatgagaaagacatccccggagcgataggacgggctggagagatagggtttaagagtgtcctgacggtgctagacgagaagacagccaacgctttaagcacggaaaagaaaggaaaggtaccgataatagcgaagcggctttagttttttcagcctctaaaaccatttgagttaaaaaccgcaaaaaacttccagaagcctagagaaattaaaaagaagttcagtccctctggcagagctccaggaggacaccggtgacggacttcgggtggacgaaggctatcttggccccgccagctccgatcctcggcttctcgtctatgaggcggtagccggcttccttcagcttttcgaggtgctcctcgatgttgtcaacgccgagggctatgtggtgtatcccttcaccgcgcttctcaatgaacttggctatcggagagtcctccgaagtggcctcaagaagctcaatcctgctctccccaacgtggattatggccgtcctgaccttctggtcgggaacttcctcgatctcatcaaccttaagcccaaggccctcccagacttttatggcctcctcaaggttcttaacggcaataccaacatggtcaatcttctttatcataccttcacccccagtgccttttcaataacctgatccgcggcagagtacgggtcaatctctctcttaacaacccgttcaatcagtgtggagatttcatcctcggagagctttttgccaacggttctcgctatcctgtccgacacaattgtttttatctcctcttctgccctgaagcgcctcttcttctcaagctcgccgctcttctcaagaaaagccttgtggtcgtttattgccttccagaggtcgcggatgcccctcatcgtggtagcgacggtctcgactatcggcggccgccagccacgcttctcccagcgttccttttcgaggtcgagcatcaggttaagctcgaagtaggtggcgtcggccccctccttgtcggccttgttgatgacgaagatgtctgctatctccatgagaccggcctttattgcctggatgtcatccccgaggccgggaacggtgacaaggacaaccgtatctgctgtttttacgatgtcaacttctatctgtccgactccgacggtttcaacgaagatcacgtcacagccgtaggcgtcgaggacctttatcgcgtcgttggtggccttggccagtccacccagagaacccctcgttgccatgctccttatgaagactcccggatcagttgagtgcctctgcatccgtatcctgtccccaaggagggcaccgcctgtgaagggagaagtcgggtctatcgctataacgcctacgactttaccctcttccctggccaccctgatcagcttgtcgagtagtgttgactttcctgcccccggtggcccggttattccgactatgtaggcttttccggtgtatggataaatcttcgagacgatctcccgggccttttcctcgtcgttctcgacgagggttataagcctcgcggcggccctcttgtctcccttgagcatcctctcaataagcccgtctatcatcttcaccacgctggattaatcatccagaaaagataaaaagttatgcgttctccctgaacttcttgagctttggcacgttctcgtctatgaacttgattatctcgcttatcgggcttcccgggccgaagaccttggcgacacccatcttctcgagctgctcggcgtcgtcgggcgggattatacccccagcgagcacgagaatgtcctcgttgggctttattcccctctcctcaagaagcttgagtatcttcggtatcaggaccatgtgggccccagaaaggatgcttataccaaggacatcaacgtcttcctggataacgctctcgactatctgctccggagtctgcctgatgccggtgtagatgacctcaaaacccgcatccctgagggctctggctatgacctttgcgcccctgtcgtggccgtccagacccggcttggcgatgagaaccctaacctttgagcgttcgaccatgagcaccaccgtcctaacttaggcgcaggcctatttaaacctttgtcaaacttcaaggtcttcctttactttggatattttgtccagaagcgttttaaagcccgagtgcatttaccatgaacatgctcgaattcccgcacgatacccacacgcacaccgtatattcggacgggattggctcgatagctgacaacatagcctcagccgaggaaaaaggtctcaaacttcttggaataaccgaccacagccactacgtagttggcaaaacgttcaaccgctacatcagggagataaggcggtggggaaatgagtccgagataacggttctcactggcatagaggggaacataacccccaacggcgtcgacgttcctgatttcgttgctgaaaagctcgattacgttatagctagcgtccacgagtgggttgatactccaaatgagtacctcgaccttgtgaagctcgccctgatggatgagaacgtggacgtgataggccactttggggcaaacttcccctacgtcggatttccctcggtggaggaacttaatgaagtcctcgagctagctgaagccaaaggaaaggctttcgagataagctcccgctatcgcgttcccgagctggattttatccgggagtgcataaagagggggataaagcttaccttcgcgagcgacgctcactttcccgagggagttggaaacgtgggctggagcgaaaaggtctttaagaaggctggcggaaagaaagaagacctcctcttcgaggagttcctctgagggcgatgatgagttcaggtctccccggctgaaacgtgatgacctggacccgtgcctgagcagacataacaatcttcatatcttcatacggcaaaaaattaataaatccaaaatatgatttttcaaacgctggtgggagtttgccgaccctcctgcccgggggaggggctttccttggctcctccctcttttgaacgtcttatgcgcggtttaaagagcttctcgacatcttcctgcacttcttcggcccttccgctcaacacgagcttcccgttcccaatcacgacgacccagtccactacaggcatcaatggctcccagatgtggctgattatcacgaagcttctcttgcctttcatgccctcgatgacttcgacgactttctccatgctgtcgaagtcaatgttggccagcggctcgtcgagaaaaaccagctctggctcccccacaaaggcctgagcgagtgaaatcctcttcagcatcccagacgagtactcgcttatccttttgtccaggaaggaggtcgcatcgaagagctctgcagctttaattatggactcctcaccaactcccctgctctctgcgaagaacttcagccactcccttcccgtcacgaactgcggaaacgcaggagggtcataggcaacgctgaaacgctccttgacactcctgttgttccacggtctctctccgaacacgaggatttctcccgaggtcggcctgtaaacgcctgtggcgagcttgaggaacgtgctctttccgccaccgttgggaccgagaatgagcgttacaccttcaagaatctcaacggtaatcccgtcaagggccttgatgctcctgaagtgctttttaaggtctctggcctctattatggtcttcatctcccccacctccagatgataagggcaaggagtagcgcaaaaattgacccgctaacgtagagggcgttctggacttctctggtcggatagtttttgacgaagcggaatgaacatgagacctcgtcggtgtggttgttgatgaccaggtagtccccttcccttggaagaacgatctggtacctcgcatggccgtagacggtgtgcctgtccaccaacttccctgtgatgatgtcgtagacctcaactattccgttgccgttgcaggagacatttacgagcgaactcgtgggggtgtagatcgtaacctggctcatgtcggttcggtttccatcctttgatgtcgtgaggaaggccggcccagcggagcctatcctgccctcgtaggagctgtagacccatagtgagccgacggtgagcatcagcatggccgcaaggagggccgcccagaacctcatacgacatccctccttctgatgagaacccacgagaggaggaagatcactattgggacgacaatcccccactcaaggtaggcggccttgaacacattgaagtcggtacttccacagaggtgtaaggcgtttatgaagagcgctggtggcatgctcgagtttccgagtattttgggcgcgtatatgactgcaaaccctgccatgaaggcgaggaaggcgttggggaaggcaagggaaaccagagtggcgaccgctattaggtagagcacgaggaaagcaacgaggagcagtgcatcgctgaggaatcttgaggttatctccgggaggtagccggctatgctggcgtatgttgttatggcaacgtaagcgaagggcagaaggagcatcagggacccgtagattaacaacgagatgagcttgatgccgaatatttcgtcgttggagtacgggagggagtagacagactttgcaacgccgctgtcacggtcatagcggaaggtcagcgcgccgagcaacagtatcagaaaacctgcgagggtccagacgtcttcgagactgagcatgccttgaatggacgttgatactccactggcctgggaagctccaaagagctgtagatccgttccggagatgaaacccatagaattgctaacccccattagttcctgtttcattgacattccaacaagcagtattccaaaaaacagcagaacgacctttatcaggtcgttcatttcccatctaaaaagggtgtagagccttcccattcaatcaccccctctcttgtcactcgccttgatatttagcacgaggcctaggcccagtagtacgagggaagcgtaaaagagataggcggcttttgctattggcttgttgaatgagacctctcctttgacattttctctagcaattttgaacgatctaaggacgagaccactggcgtatgactcttcatgctcgacctccatcttatactgaccgtattcgtctgtgaactgagcgtccaagatgccgactgcccatagatcaggtccatcgttgtaagtggcgattagctttccgtcggatgcgtcgaaggtgtatattagtgtccccatcagaattgagaggatgttgtagcccttcccaaacggctgggtgatgttgagagcataggcccccgtcactacggtttttgtggggggatagaacttggtgtatcttccttttaggactctctcgttgtcaattctggcgtcttgaatctttatgcttatcgggtataagctgaagctgttccccttgtttaacgggttcgcagggtcatcaaaaagcatcgtgtgcccgtagtccatatttccctttatgacatggtaatccttcacgcggattaggtactctccactgatgacaactttcttcacatggaatcggtaccatttccagtcttcaaaccccaaatcgtggctgttttcgacctcggtctctattacctctgactcgttccagaatacgggtggcgatatatcctttgggagggtcgtgcttatgctgacgttgtaaagggttacctgtacgtttgagcgtatgtaatccctctcctttttgaggcggaactctacaatcgtgtcgttgaacgtcctcagtatgtatagaacccctgaataattgtaaaccatcagcgaggtctgaatccactccggcctgtctccctgtgaaagccggtactggatgtacggctcatatctcatagcggcatactcgatgtaaactcccggtttggtccagtagggtgctgcggagactgccggaagtgtaagtattaaaaccaaagggaaggctaagaagtctcttttcactttttcactctccgtgagcttttaattcccagaactgccccaactaagattagggaaccgtagaaaacatacttggcaggcgtccctggtttagggaaaggaacttcttcggccttttgaaactgggcgttagtatcgtaaagtagcaatgtgcctgcccatgtgaaactgttctttacaaactggtcgtaagccacatgctcgtccatgaacattgcaaagggtattcctattgccgaaagatcgggagaaatcattactgagagagttgtcggagcaagcacgagtccagtggcaggatcgtaacgtatacctccccctgttggacttgtgaattctacaatgccttttattacaagcggggggcccaccagggagagagtgtccacgggaggcccgaattctccgtagtacgtttttaaagctttgtccatggaggagattctgtttactctcatcgtccagttcaagtctgggagaacaaagaaggtctcgttttcctggggagctgtgctcgggtcgatgtccacccacaggaaggtgtggccgtaataagttccgttcatgtcaaagacggcaccgtcgatttcccttatcctgtaaactctgatgatcctaagactgcgaaggtacactttgtaataatctgtctccgagtctattgagcttggagaggtctcaatctttataaccgccccatcgccccatatcggagtcagattttttcccttggggacgctgactcccagggttacgtttctcatctcgatacgaacccctaccgttaagtagccgttcttttcttccagtaccctgaacctgacgtggacatcatcgtagaccctgattcggtataacgtgccgttgtggatataagtaatgtatgcggttctaattaactttggagaagtcccctgggaaatcttgtactggatgtacgggtcgtaccgcatggccgcgtactctatgtaaactccaggcttgacccagtagggtgctgcgctcgatagggacaggggaagcatagccagcagaaaagctgttagtagaacgaaaccttttctttttagcgtcattggtataccctccaaacgaaataaaaaacagacagacatgttagaattcaaatgcacagccatcctgcagaggctatgtcctgttccacaagattatccgtcgtggggtccacaacgttagtcacggactcaatgccatctctgtcgggaatgttgtaatggtgagagatgtacccggcactccgaccggcactagtaagtccgcctcttccgattctgtgggttatcttatagttagtgtacgggtgctgcaagtcgtacttaacatgcacctctgcataggcccagccatatcttccagcatgtctctgatgcactgaagtgactctccactgagtcgctgctgcgaaccctgctgtcactaccaagagaccgaacagcacggcaacaagcttcttcatggcgccgaccctcctgcccgggagagattatacattctaccaggcagtatcatgaatactaaacccatatttaagtattgcttggactcttagttaaaaaaaatgaaaaataaatcgatctataactggatggataaaatatcctttacagataactagacattcgcaaagttatataatccagttgtaagaactttaatttttcaaaatcaataatagtgaaagaatgctatcagaccccaaatggttaaccggctagcagagtcttgaacctcttcgcgtctttgcacatgtccgagttgttgaagaatacgaagctttcacccctattccagccaatcaccctctccctggccttttgaagctcctcgtcgctgtaggagtggctgtatattattctcccgttttcatagcgaccgtgcaggcggtagtagctgacatcccccgtgtgaagtggaatcctgacgagcgggtctgtgacatctatgacgtcgaactccctcacgaagcgcttaattcccttctcgctccatcccctcagctcgacggctatctcaaagtttcccctgtctatcatctcgaagaacttctccgcgttggcaaagctctcatcactctccctgaagctcttcggtagctggatgagaatgaaccttgcgccaagggtttcggcctccttcagcgttaccctccagaagtgaaggacgtcgctcgttggcctgagcagacccacgtcttttccgggttttacgttgctcctcctccaggtcgggctgttcgctggatgggttactccctgaaaggcctttatcgagaatgtgaagccctcgggagcttctttcctccagcgctccagcgtcttctcctggagaatccggtagaaagtctgctgcacctcgactgcgtcaaagtctctaaagtacttactccgagcctcacagaagccgcaggttccaacctttatcatgccaccaccgagagcttttagcggaaaggtctaaaatactatcgggccgatgaggagggtgggcactccccgaccggtgaggcctggggggaggatctgaggcccgatgaagaactactcccgcctgaagtgtgatgagccacctaccggcggagggcttttaaccacagcatccaacttttctccatgcctaggagaatcctcctcgtgactgggaagctggcagagccgctcgtgaggaagtacgggagaggatgtgatgttttcgtagcccctgtgagcgtcgccgccttcctcacccctgagctgatcgttagatacctgaaaaaagccgggataaaaagcgaagactacgattttatcctcatccctggccttgtaaggggctctgctcaaatcatcgaggacgaacttgggattccggccttcaaagggccgaggaacgcgatggatctgccacaggttctgaaggctcttgaagagggcttcaagctcagcaaggaagttcctgcagatgacctcttttccttcgatgcgcttaagagagttgaggacatcagaaacaggacgaagaacaagaactatattgaagaggccctgaaaaagccctggaacgccctcatcggcaaccttccagcgggaagggactttcccgcgaggattctcgctgaggtagtcgatgcccccacgctcggcgttgagaaaaccgtcgagagggccctctactacctccgtgaaggtgcggacataattgacatcggcatggttgcaggggagaggaacctcgagtttgtagacgcgatacctgaaatccgagaaaagctgaaagaggctggttttgaagctcccatcagctttgactctctcaacacgtccgaaatcgagggggcgcttgactacgccgacctctttttgagcgtcgatgagagcaaccttgaggcccttgtaacggaaaagcccgtcgttttaataccaacaaaccaaagggagggctacttccccaccaagcctgctgaaagggttaagtacctcgaaaagctcaaggagaaagccctagacctcggctacaaaactatcatccccgacctgattctcgaacacgttccccacctagcgcgctcggttacggccttccagctctaccgcgagagaaacccggacgatgtcctcctcgcgggagttgggaacgtggtagaactctacgacgccgacagcgttggaatgaacgcccttcttgcggggattgcaaaggagctttccataaacctcctcctgacaacggaggtaagcgcgaaggcgaagggttcggttagggagctgaagcgtgcggtagacatgaacctcttcgacctcccaaaagaccttggcttcgacctgctaatcctcaaggagaagaaagaagccgagtggcgcttcgagcctgccaatgaggttgtggaggcacagaatagacccgtcgagcttgagccagtttacttccgtatctgggtggagagaggcaagatatgggtgaacgcccataagggaaccgaagctgttcttacaatagtcggcgatgagccgaacgcaataatcgacacggttcttgagcgcttcgagataagcccgaggcacgctttctacctcggcagggagctggagagggcttacacggctttaaagctgaggaggagctacgtccaggaggttaagctgtttcgagagttctatacggaatgaaaatagcccaaaccttcgaactctaacaaagtcccctatatcccccagttcagggcaaagacaaaggtttggtacgattgaaaaaacttcaagttctaaccttcttcctcaaggtagggtatcctcggcttcctgaactgctcgtccagctcggccctcttcgcctttatcttctcgtagagctccttcaccctcggttcatcgtacttctctttcaaaacagtgaggaggccctcggcaaagccaaggatggagactttgatgaagtcctccccgcgcttgctctcgagccccccgttcatcctcacgaaggcatcaagcctttccagaagtccctcctcaccgagttcattcaaaagcgccttaagctcctcaacctctggaatctcaaccattcccctcacctcagagctttaagtcgaagaactggatagtgttcttctcggtcaccttctcaacctcttcaaactccagaccctttatctccgctatccttctcaccgcgtactccacgttccaagggtagttcttctcacccttgtaggggctcatgtaaggagcgtccgtttcaacgacgatgctttcaagagggagcacttcggcggcctttctcacctctggaatgaagtctatccccgtgtttatcccgatgatgtggccgttcccaactatctccagggcaagctccgcaggcccgctgtaggagtggaagtaggctttaactccagccctctggatcgcttcaaaaacctccctctcagcatccctcgcgtgcaggacgacgggtttgtcgagttcgacggcaagattcaggaagtggtggaatatctcccgctggttcttcctttcttcctcggttttagcgtagtagaagtcgaggcctatctccccaacggccactatctcatcggcgtgctcacgtatgaactcctcgacccttttaactttctcccagttgcccctcctagcttcgttgggcgcgtagccgagcgttgggaagacgaagccaaagtatggctccagcagttcccagctcttccagacgtggaacttcctgtattcagttatcgagtccacgaccgccttaaggtgctttttgctctcctcgaccacctcgcctgctctccccttgaacatctcaatgtggcagtgggcgtctatcatcttctctcccgttcccagaatcgccctccacagaaaagcttttctgttagtttgtgaatattaagaatggtaggtgtgatcaatgacttctcaccccaacccccaggttatcatgaacgagataattgagaggttaaagagactcagcccaaaggagcttctgagctatgctatcttcaatgaggaggacgaggcaaaatactatgccgaacttgccgagaaggcgaaaagaaagagtgtgagagccctgtttaaaaagatgagcagggagagcaaggggcatgaactcctcctcagaaggacgtttgagcggctctttccaggagaggagcccgttaaggtagatgttcccccagtggaggtctatccattctatcctgagtttgaaaaggttgaggactacataagggcgctggagtactgcatggagagcgagctcttcgcaaagaggacttatgaaatattggctggcgttgccgagaacgaagatgtccggggaatagccttcgagctttcacagattgagcagaaacactacgaagagataaagaaggtctacgatatcgttatctcctttgagcgcaggcacgtctttatagagaggctaggatcgggtgcttatctggtaaccgacgacgagaaagcaaagtacattctcttagatatgctgacggaaaacagggaagtgatagcagttataagggagcacccggacaagtttagagagctcactgagatagacaacgtgatatgggtctcaaaaatctcagaggaataccccgggaaggtagtgcccccaaagttcgtccccgaactcaaaggcgagctccttaagttcctcaaatctgcaaaagaaaacggaaagcagggagttgtgtttgtccagaatgttggttacctggttgttgaacttggcttcaaggatgcaatggattttctgctctacgtaaaggacgctgccatggtctacaatgggtacatcatagtaagcgccaatccggatgcctttgagaagaaggagtggggcctgctcacgtctgagtttgaagttatactatagcttcttcgtctcccagatgacttttccatcctttctaacgacgcgcaggattctgtggtagggtatctgggcttctccaacgaagaagtagccgtgtccgagctcgataagctcgaccggtattttcttttccccaccataagcccccctgtgctcgatgacaacgtagtagtcctcctccttctcccgcgggtcgtactttatcttcgccagcacttccttaacggagccctttctcatgggagccacctcaagacttcccttaagttctctttccagtcccttatgtagtcgccgtgccctgggaagccgaagtcaacgtcaaactcagccaatctctccaggctctccctgagcgcccagccatctccagtcgggagatccgtcctgccgactgtccccttgaagaccgtgtcgcccgtgaacatgaccctgtgctttccgtcgtcgaggtaaaggcaggagcttccagcggtgtggccgggagtgtggacaaccaaaagctcaagcgagctgacattcagtttgtctccatcttcaagcttgaagtctacttgatgtggctcaaaccgcctgccgtaaaagtacgacaggatcacaccttcgtcaccgcgttcgagcacgtttgctgttatcttgtgtgcggcaaaagacacctcaattccacgctcttccagccagcgttgcagaaccttgtttcccccaacgtggtcaaagtgctcgtgcgtgttgaaaatcgttacgtgctccacatcggtaaggtagccctctctctcccagatttcagtgtaaaggtgccagtttattccagtcccagtgtcaattataagggcttcctcttcgtctctgactaggtagatgttggagtcccgccctattccacggagcataacaacgtggggcggaacctcaatcgggatgagcttgctgggaaagcccctgccgggacttgcacccattatttcacctccagaaaggggctcgaggggggaccgcgtcttcatctcggggggagcgagtccccgtcaggagggatgaatctcttcatcgccctaagatgttacaaagagacgtttataaacccagccccccaatctgattaggtgacccaaatgaagactgaacgcgcgaaggagatcctccttcagctcttgaagataccctctccctccgggcaggaggacaggataatgctccacatcatggagtttctccacaggcttgactacgacgttcacatcgagagcgacggcgagataattgacctcgtcgtgaatccagatgctgagcttttctacgaggttcacgtcgacacgatcccgataagggctgagcccttcgtgaggggcaacatcatctacggaaccggcgcgagcgacatcaagggtggagcggctgcaatactcctcatgatggagagcctgaagaaagagggcaaagacctgaacgtcggcgtcgtcttcgtcagtgacgaagagctcggcggtaggggttcggctctcttcatggagaggtataggccgaagatggcggttgttctcgagcccaccgaccttgaagtccatatagcccacgcaggcaacatcgaggcctactttgaggttgacggcaaggaagcccacggtgcctgtccagagagcggtgtcaacgctattgaagagacctacaagatgctcaacgagctgaagaaccttgaacccttcaagcagaagggcaagtacttcgatccccatatcggcattcaggagctcctctgcgagaacccggtttatctcatcccggccctgtgtaaaggccgccttgaggcaaggcttttaccggatcaggaagtcgaggacgttctcgacctcatggatccaatcctcgacgagtacacgctgaagtatgagtacacggagatatgggacggctacgagcttgatccagatgaggagatagtccagctggccaaagccgcgatgaagaaggtcggcctcgatgagttcggcggcatgaggagctggaccgatgcgatcaacttcatgtacaacggaaccagaacaatagtcttcggtcccggcaacctcgacatctcccacacaaagtacgagaggatagacgtaagggacgtcgttaccgcgagcgagttcctgaaggtgctcaacgacgtttacgctgaaggactggagaaagttgaaaaagagctgagttgacctctttcccttatttttccaggaggccacgagatgaagcttgtccacgacccggttcacggctacatcgagctcgatgagttcgcgaggaagctcgtggacaccccagagtttcagaggcttaggaggataacccagctcggcttcgcttttttggcgtacccctcagcgaggcacacccgttttgagcattcacttggaaccttccacctcgcaaagaagattcgcgctcacaatccggaaatagaggaaggggcattatacgcggcgctcctccacgacataggacactacccgttctcgcacacccttgagggcctctacccgaggcacgaggaaaacacgctctgggttatagaacatggaagcgtcggagacgtaatcaaggagaactattcgacccaggagtttaagaagctcttaaagcatccaatcgtcagcggtgacatagacgcagacaggatggattatctggtcagggacgcttactacaccggggcagcctacggcgtcgttgacctcgaacggctcgtgaggaacctgaagttcgatgggaaaatgctcgtggttgaggaaaaaggaataatggcggcccagaacctcctgctttcgagggccatgatgtacccgaccgtttacttccaccatacggcgaagatagcggaggccatgctgagaaaggccgtcgagattgaagggatatccttagaggagatccgtatcatggatgagatagacctagtttcgaggctcagaagtagcgaaaagccggaagttagggagcttataagggccatagacgacaggaagctctacaagagggcttactgctcaaatagggagcttgatgaaaagacaatttcaaccctgaaaagagagcttcaagaagagtttggttattctgccctcttagactacccgccaaaacccaagtacgaggaaaggaacgccttcgtgaagattggaagcgagacgaagaggctcagtgaggtctctcccctcgtcagatccctcgtggagatgaaggacgtgtactggagatggtgcgtctacgcgagggaggacgtaagagaggacgtggaagcgttcccgaaaaagcttttttagaccagtgcctcaatactcgttcgggtgagaagtatgagtgaggtagtggttaccaaagatgagatactcatgtatgagaagctcaagctgatttctgagttggccccgatacgagagagaatatcagagttcgagagaaagtacggtgtgagttttgaagagttcgagagaaggataagagaagagaacgagagttttgaagcgtgggacgattacatagagtggaaggcttacgttagaaagttcagagagcttcaaaagaagctgcgggagattgagaatgctcagagagttagaattgcttgagaaaagcgagatggttagatcctatgagatactcgactacaaagaaggttcagatttctattttctgaagatacgcgcggagctaattgatggaagtgttctccatattcgagagttcgtatccaacgaggagtacaactactcctttcaatggcagagggacagtgagctgataataaggtgggacaatgcaccgcaccacaaggatcttcccacgttcccacaccataaacacgtcggtagtgagaagaacgtgcttccatcatcagaaatcactttagaggaagtactgggagtcatctcttcttacatccaaaacccttaagtgatccaaaatcaccacgtcactctcaattctcaactgggaaaagctttataactgggccttttaagttaagccgacaagctcattcaagagagtaggtggtgtattatgggaagaagggaagagatgattgcgaagattaaggaattgatgacccagcctgagaggatcaggaacatgggtatcgccgctcacattgaccacggtaagaccactctgagcgacaacctgctcgccggtgctggaatgatcagcgaggagctcgccggaaagcagctcgtccttgacttcgacgagcaggagcaggcgaggggtatcaccatcaacgcggcaaacgtttcgatggttcacaactacgagggcaacgactacctcatcaacctcattgacactccgggtcacgtcgactttggtggtgacgttaccagggccatgcgtgccatagacggtgcgattatagttgtcgacgccgttgagggtgtcatgccccagaccgagaccgttctcaggcaggccctcagggagtacgtcaagccggttctcttcatcaacaaggttgacagactcatcaaggagctcaagcttactccccagcagatgcaggagcgcttcgtcaaggtcatcaccgacgtgaacaggcttatcaggaggtacgctccgccagagttcaaggacaagtggctcgttaaggtcgaggacggtagtgtcgccttcggtagcgcttactacaactgggccctcagcgttccctacatgaagaagacaggtgtttctttcaaggacatcatcgacctcaccaacgccggtgacctcaagaccctcaggaagaaggccccgctccacgtcgtcgtcctggatatggtcgttaagcacctcccgaacccgctcgaggcccagaagtacaggatcccgcacctctggaggggcgacatcaacagcgacgtcggccaggccatgatgaactgcgacccgaagggcccgatgaccatggtcgttaccaagatcatcctcgacaagcacgccggtgaggtcgctaccggccgtgtctggagcggtaccgttaagaccggtcaggaggtctacctcatcaacagcaagaggaaggccaggatccagcaggtcggtatctacatgggtcccgagaggatcaacatggagccgttcccgctggaaacatcgtcgccgttactggcctccgcgatgctatggccggtgagaccgtttcagtccagcagatcgagccgtttgaggccctccactacaccagcgagccggttgttaccgttgctatcgaggccaagaacgttaaggaccttccgaagctcgttgaggccctcaggcagctcgccaaggaggacccgacgctccacgtcaagatcgacgaggagaccggccagcacctcctcagcggtatgggtgagctccaccttgaggtcaagctccacaggctcaagaccgaatggaagctcgatgtagaagtttcaccgccgatcgtcgtctaccgcgagagcgtcaccaagcagagcccgatcgtcgagggcaagtccccgaacaagcacaacaggttctacatcacagtcgagccgatgccggatgaaatctaccaggcgatcagggagggcgagattcccgagggcaggccgaaggacccgaaggccgtcgccaagaagctcgccgagctcggcatggactacgaaattgccaagggtatcgtcgacatttacaacggcaacatgttccttgacaacaccaagggtatccagtacctcaacgaggtcatggacctcctcgtcgacggtttccaccaggccatggatgagggaccgctcgccaaggagcccgtcatgaaggtcatcgtcaggctccacgacgccaagatccacgaggacaacgtccaccgcggtccggcccagatctacccggccatcagaagcgctatccactgcgccatgatgaaggctggacctgtcctctacgagccgtaccagaaggtcatcatcaacgtgccctacgagtacatgggtgccgtcagcagggagctcaaccagaggcgcggtcagctcattgacatgaggcaggagggcgaggtcatgatcatcatcggcgaggctccagttgcggagatgttcggattcgctggagccatccgtggagccaccagcggtaaggccctctggacaacggagcacgctggcttcaagcgcgttccaaacgagcttgcccagcagataatcagacagatacgccagaggaagggtctcgaccccaacccgccgaaggagcaggacgtctgcccgcagcagtgatgcgggctttcttcttgttctctctttgaccttttctcaagaactctgttttatcacgtgaaagtctaaatccgtcattagttaactttttaaaccccgttcttgagttaaacccagaactcatgaggtccccccgaaaacggcgggtttcccgcccgagggggccgaggttcgaaagatttaaaaagccatcctagtcaacgagactagaccaaaatatggaggtgtttgaaaatggctaaggagaagccacacgttaacattgtgtttataggccacgtcgaccacggaaagagcactaccatcggtaggctgctcttcgacacagcgaacatcccggagaacatcatcaagaagttcgaggagatgggtgagaagggtaagtccttcaagttcgcttgggtcatggacaggctcaaggaggagagggagcgcggtatcaccatcgacgtcgcccacaccaagttcgagaccccgcacaggtacatcaccatcatcgacgctccgggtcacagggacttcgttaagaacatgatcaccggtgccagccaggccgacgcggctgtcctcgtcgtcgccgctaccgacggtgtcatgccacagaccaaggagcacgccttccttgccaggaccctcggtatcaaccacatcatagttgccatcaacaagatggacatggtcaactacgacgagaagaagttcaagcaggtcgccgagcaggttaagaagctccttcagatgctcggctacaaggacttcccgatcatcccgatcagcgcttgggagggcgacaacgtcgttaagaagagcgacaagatgccctggtacaacggcccgaccctcctcgaggccctcgaccagatacccgagccgccgaagccggttgacaagccgctccgcatcccgatccaggacgtctactcaatcaagggtgttggtaccgttccagtcggccgtgttgagaccggtgtcctccgcgtcggtgacgttgtcatcttcgagccggccagcaccatcttccacaagccgatccagggtgaagtcaagagcatcgagatgcaccacgagccgctccaggaagcctacccaggtgacaacatcggtttcaacgtccgtggtgtcggtaagaacgacataaagcgcggtgacgttgccggacacaccaccaacccgccgaccgtcgtcaggccgaaggacaccttcaaggcccagatcatcgtcctcaaccacccgaccgctatcaccgtcggctacaccccagtcctccacgcccacaccacccaggtcgcagttaggttcgagcagctcctcgctaagctcgacccgaggaccggtaacatcgtcgaggagaacccgcagttcatcaagaccggtgactcagccatcgtcatcctcaggccgaccaaggcaatggtcatcgagccggtcaaggagatcccgcagatgggcaggttcgccatccgtgacatgggccagaccgtcgctgccggtatggtcatctccatccagaaggccgactgaaggccttctcaatctttccttcctttgaaatcttcctgaaccttttaggagggacggaaatgcagaaggcgaggattaagctggcgagcaccaacataaaggccctcaacgaggtcaccgaccagatcaagcagatagcagagagaaccggcgtcaggatgagcggtccgataccgcttccgacaaagaggatcaggatcaccaccaggaagagcccagatggagagggttccgccacctttgacaggttcgagctccgcgttcacaagaggctcgttgacatcgaggccgacgaaagggccatgcgccagatcatgcgcatccgcgttcccgaggatgttaccatcgagatcgaactcatctcttgattcctctcatttatgcgccggggtagcctagcctgggaaggcgcgggcctggagagtccgtgggcgtttgcccgccagggttcaaatccctgccccggcgccagctcttaaccttctaaccttcttagttgcttccttcttaactgcttgttttgattaagcaccacagaagcgactttagagaatttttcagaattcatactcagatataagagcaatcagaaatcaacaagagggggaaaagaaaaatcctcaatatctcctccttctctggcggggcttcattgacccccacctgccgcggtactcaccttcaagctcctcctgcctcaacctctcccggtattctttgggaataccctcgctgagttcggacttcttgacctcaacgccggcctgctttgtgatgtacctaaagcgcctcagttctcctggggcgatgaaagttatggcctttcctttcttacccattctccctgtccttccaatcctgtggatgtactgttcggggttcattgggattgaatagttgataacgtgggttatctctggaacgtcaagtcccctcgctgctacatcggtcgcaacgagtatcttagttttcctggccttaaagcgattgaacgtcttctctctagccggctggctcatatcgccgttgagggcctctgccctgaatccagccgccctaagcctcatagagagttccctcgtctcggctttagtctgacagaacactatgccgtaaaactcattagactcatctgagagtatcttggtgagaaggtcgaaccttctgtggggaacagcttcgatgtactcctgctcaacctctcctgggacaagctcgtccctgctgacgatgactacctcggggtttctcatgtacttctttgccagcaggaggacatccatcggcatcgtggctgagaacatcaggaccctcttctccttgggggttgccctgaagattgcttcgatgtcctcctggaagcccatgtccagcatcctgtcggcctcatcgaggacgaagaacctgaccccatcgaggttcagagtacctctgtttatgtggtcgagaacccgtccaggagttccaactactatgtggacgcccccctcaagggcccttatttgaggtccgatcggctgtccgccgtaaacggagtaaacgtaaatcctccttttgcccctgagcgacctgagctcatcagtgacctgtatggcaagctcccttgtgggggttagaatcaacgcttgaacttcccttatggattcatctatcgaatccagaatcggaagtccaaaagctgctgtttttccgcttcccgtttttgattgacccacaatatcgctctcagcggacagcagaagggggatgacctccctctgaatgtctgttgggattgaaaaaccctttctttcaactgcttcaactgaagcactggatagtccaagttctctaaaactcatttttcattactccttaatgtctagtaattccaacgcgctcctgctcagaacgcgctgaggagaaacgcgctttggcgggccgggggggattcgaacccccgacctgcggattaagagtccgccgctctaaccaggctaagctaccggcccacgacccgaaaccatagagatggattgcctttataaatttttcggtcttctggagtgccgagaagcaccgtaaagtttataaagcactgcactgccctatatttggcaacgcgggggttgccgagcctggtcaaaggcgcgggattgagggtcccgtcccgcaggggttccggggttcaaatccccgcccccgcaccacaacagccctttcttgcgaaagcgctggcggaagaaaagtatgcgttcttaacgagctagcttttgagtgggtttacttatcgagtagccagacttacaggatttcctcaccgtatagcgctcgtcgagcgctaaaaagaaagtttgaaatcacaattagtgtgatattttgaggttaaacccgcgtgaacttgctttctgagcaagcataccctctctaacagcaaagtcaaaagaaagggcgcacttttggtcaagcgttttctaaaagcttgctgcgcgacgttgaagcttcgcttcaacgcacgggacgatagccccgttgagtttgatcgaggctcgtggttcttcttagaattgccccactacaaggattttcaagatacacaagctagcattagtgaattccccaatttcagccctctaaaagaagtttccaacatcccgacgccctacgggtgtcgattaaaagcaaactcacaccgagaactcttactaaaatcgaattcgcactcatacagcgagctcctgaatgaaaaatctccccagaacaaccttctaatcaagaaccacgaactttgatgaaactttgcttgcaaagtttctttggtcaagcttttcccaaaagcttgctagaaaagtttcattagtgtagcctctcccaaaaagcttcaaagtctagtggcggcgggcgcgcccgggggtgggaaccctccgccgcgcccttccaccggggctcgctcacccccgctaccccgggagcgccgcacgtcccgcctaccgctgctcccttccgggcctggcggggttcggcgggcaaagggcgttagcccggccctccagccggacctcgcccaccgccggccccccgggacgagggatcaccgttgtgccccggcttccgggcgcggttttgggaaccgccccccgggcttcggccccggcatatcgacggtttccggttacaggggacgccgaaccccccggcctagcccgccgccgggaatagttaacagagctggatatataaaggtttggtaggtacgaaagccctgaagtttgccattttccagttaagaaaaggttataaaggccctccgattagcagaaggagggtcatcatgaggatagtcttcgatataggcggctctgttctcgttcccgaagatccggacatcgactttatcaaggcgatagcatacgagctcgtcaagataagcgaggaccacgaggtagcggttgttgtcggcggtggaaaggtcgccaggaagtacatacaggccgcgaaggaattcacgctcaacgagaccttcaaggactacataggaatccacatcacgagggcaaacgcgatgcttctcatcgctgcccttggagaaaaggcatatcccttcgtcgtccaggacttccgtaaggcctgggaggtcatccagctcaagaagattccgataatgggtggaacccaccccggccacacgaccgacgcggtagctgctcttctcgctgaatacctgcaggcggatcttctcgtcgttgtaaccaacgttgacggagtctatgattcagacccgaagaagaaccccaacgcgaaaaagctcgacagaatcaccgttgaccagctcgttgagatagcgatgcaggaggagagcaaggcaggaggaagcggcgtcgttgatgccctagcagcaaagttcatccagagggggaagataaagacttacatcgtcggcaagaaggacgcttaccatctctttgacgtgataaagggcaagcacagcggaaccgttgtggagccgtaatttctttgcctttacttatgtctttgtttgtccgcttactcttcgagtatttccggatttaactaaagccaactttttatacccccttccccttcttctcttggtgacacccatgaaaatcgtcgtggtcggttctggaacagccggaagcaacttcgccctcttcatgcgcaagcttgacaggaaggccgagataaccgtcataggaaaggaaccaacgatgcagtactccccctgcgccctgccgcacgtggtaagcggcactatcgagaagcctgaggacattatagtctttcccaacgagttctacgagaagcagaagataaacctcatgctgaacacggaagcaaaggcgatagacagagaaaggaaggttgtagtcacggataagggcgaagtcccgtacgacaagcttgttttggccgttggttcaaaggcattcattccgccgattaagggagttgagaacgagggggtcttcacactcaagagcctcgacgacgttaggaggataaaagcctacatagccgagagaaagccgaagaaggccgtcgttatcggagctggtctcatcggccttgagggcgccgaggcctttgcaaaacttggaatggaagttctgattgtagagctgatggacaggcttatgcccacaatgctcgacaaggacacggcaaagctcgtccaggctgagatggagaagtacggcgtttccttccgcttcggcgtcggcgtgagtgagatcatcggaagccccgtcagggctgtcaaaataggcgacgaagaagttcccgcagacctcgtcttggttgcaaccggggtgagagccaacaccgacctcgccaaacaggcagggcttgaagtgaacaggggcatagtggttaatgagcacctccagacgagcgacccggaggtctacgcaataggcgactgtgctgaagttatagacgccgtaactggaaaaagaactctcagtcagctcggaacttccgccgttaggatggccaaggtggccgcggagcacatagcgggtaaggacgtctccttcagaccagtcttcaacaccgctataaccgagctgtttggccttgaaatcggcaccttcggaatcaccgaggagagggcaaagaaggaggacatcgaggtagcggtcggaaagttcaaaggctcgaccaagccagagtactatcccggaggcaagcccataaccgtaaagctcatcttcagaaagtcagacagaaagcttatcggcggccagatagtcggcggcgagagggtctggggcaggataatgacgctttctgccctcgctcaaaaaggcgcaacggttgaggacgttgcctacctggaaacggcctacgccccgccgataagtccgaccatagacccgataacggtcgcggcagagatggcccagagaaagctccgctgaacctctatcccctttcacttttcttcccactcctgaatcaacatagatgtacactgaatttctgcacatcagaattcacgaaaatttaaataatcctccacaaccagctaaataccaactaacaaccctgtgagaggtgaatccaatgaaagacagattgaaaggacctattgctaatagagaactcttaatcgggataagtacgggtgttctcctagcttcttccatgagggttttcgtcgcgggggcatattcaagcgtcgagaagacgttcttttacaacgtcatgttcccctccgtgctcggcgtggtgctgttcataattgcatccgctgttgtgggcaaactcaacaggaggataggagctgcaatagtggcggcctacgcgctggtttctctcctcacggatgcgactgaatacacccacctgatagcggcccttgccatcccagttgcactggcactcctcagtgaactcgacataaagtacgtgacgatggggcttgtggcggatttggggctgagggttctcgccgttggcggggagccgctcgacttcccacacaccaggattatcctgagcctcgtcgttctcttcggagcatacgccctctggaaagatgaagggaaactgccaaagcctggcttcggcctctacgcttttgccgccctcctggaactcggtctcatgtatccaaacgcagtcttgaggtactccggaattaactcttattatcttcctaccttcgtcggctactctttcataatagcccttgcactcctcggggggccttacctcgccaggaagcctaagattgccccggttcttctgatcctgggcacggcgaccctcttcgttaaaccactgagtttgataggtcttcccctggccctcacatctgccgttgctctcgttgagagtgccaagaccatccgcaaaggggagctgggtgctatttatctcttcttggtggtgaccctcgccttgggcgcctacatcggcagggacattggattggccttcatggaggacaagctggaggccctaatagttgttgcctctatagtttatgcagtcgtaacttatggcaagaatgcccctatcagtactccaaacaggaaagaggtagtgagtgtgctcgctggtctcgctctcgtttcagtgatcgttctagcgctcttcaacacgggaccgagctatgcggagagcaagaaggatgtcctcatctggagctacaacatccatcagggcttcggcccgtatcggggaactttcaatgggtatgaacttgtgaaactcctgagggagcatgaacctgacatcatcgcctctcaagaagtcgttggaggaatgatagctaacggttaccaggacgttccacttatgctctctgcatatctcggctacgcctacgagtacaagcccgcagttgagggtacgtacggaatagcaatcttctcccactggcgcatgaataccgagggagagctcaacctcaagagcgtcggccaggcgaggcccgcgcagaaggtaatgattgaagagcttggaataacgcttgtgaacgtccacatggggctgagcgaagaagaacgcgctatgcaggcggaggagctcctgagcttcgccgaaagcgaaccagcagcgcacgtaattttgggggacacgaacgcagagcccgatgagaaggccatccagataataacccaggagtacaaggatgcttttgaggagaggccgccctacaccttcaactggggcgacatcgacatcgagaacatagactacatccttctgaggaggggctggccagcgaaggtaaaagactacggatgtctctgcgaggttgaggtttccgaccacagaccggtgtgggcgctgatagagctcccgtgaggtttttagcttttcttcataatttttccacatgaagccagagcggaagcgagtaagcaagcttatggcgtacatcctgcgacactcgccagaggagttcggcctccggccggacgttgaagggttcgtttctctcaacgagctcgtcaatgcactaaagacggtttatcccgaggtcacggaggaattcgttagggaaatcgtcgagaatgatccgaagggccgctacgaaatccggggagatagaataagggcccgctacggccacagctttccagtcagtctcgaccacgaagaggacaccgagagccgctttctgtaccacggtactccccggaggaacctgccctcgattctaaaagaaggcctgaagccaatgaaacgccagtacgttcacgtaagcaccgacaagatcgaggccctggaaacgggaaggcggcacggaagagaagtagtcctcctggtgatagacgccgaatgcctgaggaaaagaggctttaaaatatacaaggccgggaagaacgtgagaatagttgagagggtgccgccggattgtataaccctggcggtttaggtcagcccatgcgagtttcctcatcactcggacgaaacttccctcatcatcccggggtgagtgtgagaacagggttaaaaaggtagccctgagatagggtgcgctaatcaaagcattgttttactattatcaagttttcaataaaaacgaaagtcttatataatttaacaacaactatgagtgtgaattaatccccaggatggtgactcaatgaagaggctcgtggggcttctcgttctttcactcctcttctctccgtacctcctggcaagcccccttcaggtcaggggaatagcgcactatcgtgacggttttctcgttttgacagctggttcctcaagcaacactacccagctctggctctacgagccaggaaaaggcttcaagctcctgaacgaaaccttcccaaacctaaccttcgtccattcaagcggaaaagaagttcttctctaccagaattccccagatcatcattatttgcaacgtttccgtctatacgtgtataacagagagctggaatacctcggagattacctagagtttgacgattatggagtgggcagcagaatatactggaacggagaattctacctgctccttgagattagatggaccacgcaggaggggagcagttacagctggtatgccataatcaatggcagtatccacaggctcttgcctaatgaaaaggaaggcatgtatttttcaggggtttggcaaattccccacggatatgttataatgagctgggatcccgagagctatcgaagggagcttttctttatcacgctccaaaattctcatccctcattaatggatttaacccccagtaatctctcggtggagggattgtgttttaacggcactcacatcgcgtccctggtcagcaacagattcaggctgatctccgacaacgtttccacaattaagtactaccttcagataatcaacatgagcgaagagtctgaactggttccccttgcggcttttgatagcaaagaaaacgttacccttgagttattgggatacactgatggaaaatggatactcgagagagtttattcgtggtggaatgtttccgagcttagagctcaccacaggactctaggttacataaccgtttcttcaggaggtattgttgagttccctaatagtacaatcttcaaacccgtatgcaaaatggtcaagcctcaaaaagtcttcgactgggggcaacccgtcgagataccaatggaattgaatggaaagagagtcgtcatcaatggaacggctctccactacgggaaaatggtgattaaactgccatttagcccgaaaatgggtgattgtggcaacggctgtctgttctcggacgggagagagctagtgtattttgacggcaaaaatatcaaacccatcaaccttccagaggaaaacacaacgaaaaaattgctaactgtgggaatagtggctctaagttgtcttctcgcggtgtacacaataaaaacaatgctcgagagaagaaggaagtctggtgggaatcctgactaactgggtgatagaatgaagaggttagtgtcattgctactcataatctctctaatcacgcctcaaaccatagcataccacccccaaattgctggaatagcgcactatcgtgacggttttctcgttttaacagagggctcctcaagcaacactacccagctctggctctacgagccaggaaaaggcttcaagctcctgaacgaaaccctcccaaacctcaccttcgtccattcaagcggaaaagaagttcttctctaccgaaacgtatccgatgtttactcagctcccgacatccagttctacgtctatgacggcgcgcttcatttcgcgggtggtttcaatggggtgacagactgctgggatgagctctcgatgtactggaacgggaagttctacatgatattccagccctgggaagcctgccagatgacagggtacaactggtacgccctcgtgaacacaaccgtttatcccctcctggatgacgacaggggccgctccacagtttgcacaggctcaaaatgctacgtcgggaacatccagatgatccccaacggttatctcgttggctacaccaatttctacaccgaaataacgaatctccgcgccgttgttttcactccttcgggaattaagattgagaacataaccttcggaaacctgtccgcagaatggggtggaagctgtttcaacggaacccattttggcgttttggttgacaactacgcagatattgccttttataacgaaaccgtctggagattctacctgggaatcatcaacaccactgggggctacaccctgatccccctagattcagtaccaaaagggaagaacatctccctgtccctcctagggagctacgatggaagatggatcgttcgaaagtataggtactggtactcgtggaaccccaccacgggaagaaacagtggagaggaaacgctgggctatttaatcgtctcgcctagcggtggtattgaggtaagcaaatcactcaacgtgactcccatctgcgagcagaactggcctctcctggtcttcaggggtaggagtcctgttgataacaccccactcctaaacggctgtgaagtcaacataaacgagagcatcctgacataccaggggaggagctttgagcttcatttcagcccaaaaatgggtgattgtggcaacggttgccttttctcggacgggagagaactggtgtattttaacggtagcggcgtccaactcgttgaatttcccaaaaagaacaccattggaacgggcattattgtggtcttaggactggttttcgcggccatgctgattgtatttgccgtaaaatgggctagagattaagccaaaactaaatgaaaagaatcaaaattcagccctctctaccgacaggacaacgacgatgtcgcggtagaaggactttattgcccggaggtgcctctcttcaactctgcccgacgcggcaacgtggctgtagtacttctcaagctggtcgaggagccactggagctcttccttcgcctttggactgaagccgttgcccaaaagcttgcccctcagaaacggcatgacttccgacggacggccgagtgcggcccagaagagaccttccttaagaacctcgaacaggagttcctcggaacctgccctaacggacggtttctccctccccccttccaagctttccggggactttccttgctacttcgcctgcaccagccatggacatcaccgcaccaaaataagccttgaggtatttgactttttcggaagaaaacctgaagatatggcaaaattgggtaaaaaatgggcagactttttgaacatatgcccgctgtaagcctaaatcctgacactctatcatgcgattagcaggatacctatcaccaccaggattggggcggcgtaggagagggctatcaggagcttcctcttcatgtgatcaccgtgcacggatgtatgcatctgtttgaaagctttacgtttctgaccttctccccgccgtgaacggcgagggttccaacgagctaacccctcgccaatggcggagaggtttgaggggcttcattaaatcccaattcaaagtgggctttcagcccctctggccgggccttcggccagttacccctacttgccgacaaaactggcaagcttggggttatggttttcaccaccttcttcaaaatattgaaagcaccaaccaagtcagcgttgaagataagccccgttgcgggacacttaaacaatccacgaacgaagcgagccccttcgtggggcttcccgcaaacgggacaagtcttagaagtaaaagcctcatcaacgacgataacactaataccatactcttctgcaacctctttcaggcgttttattaccgtgttgaacctccagacgtggaagaggagataattctgccttttgcccttatcagagttcctcgctattccctttggataaccaattacaattctggaaactccaaggcggtagagcctctcaacggtttgccttactgccgtgttaatgtagtgcttagcctgaagtttagccttctggtgcattcttgtgagctttctgctcttcttggctccagacttgttgagtttcgactgatactcggcaatctgtttttgccagtagaaggctattgacttcaaaggtctgccatttactaagaaactttccccgttttccacatagacagccattaaattgttcactccgaggtctattccagcggaaaagttccccaaaggttctcttggaacttctacccattctccaccctgaagtttcttctcaacgcttatgctgatgtgagcataccatttccgccttatggggtcgtaagttatttctaaccttccctgcttgcccttcaagtgaatcctccccttgaattgaacttccagcctcttgaacttcccaaggcccttgaggattaggttgttcccttcaatcctgtattggtcgttcctgaggactattaagccctctcccttgatgtagtttggtggttctggtttgagccatttgggtagttctccgttccgtttgttcctgatgagtgagaagaaggaacgccagctttcggcgttctttctcgctatttgctgaactgttgccgagcctatctcggatttgaactcttcataaactgttttctcggttttgttgaagtctattggtttcccctcaaagaattcctgcctgcggaggtagttcaccttgttccaaactttggagctgatttgggctaactcggaaagagctttctcttgggcttttgagggttgtagtttaacggttactgcccgtttcatcttgaagtatagtatgttttttgagctttaaaatagttttgctttcctgctttcaggttgatttctcgattactgcatccccaccccaaatgatgaggctttcgaaagaaaaaagtaaacccaatgacctcaagccagatggtttgatttctgcccttccaagatgtttttaagctaacactcaaactcgattcaggtgggatcaatgacctcggttggaatcatcggcggcggtatcgcggggcttacggccgcgctttccttggcgaaactgggttacgaggtaacgctcatccacacgggtataaacacgaccaattcctacctggctcaggcagggattgccttccccctcctcgaaggggattcaataactgctcacgtgatagacacaatgagaggaggaaaatacatcaacgataaggagacagtctggaacgtgatatcaaaagccagcgaggcttacgacttcctcctctccctgggcgtgaagttcgagaccaacgagacggaaggcggacactcttttccgagggttttcacgataaaaaacgagaccggaaagcacctcaccaagatactctacctccacgcaaaggaggggggagttaacttcatcaaaggcgaagccgaagagctggcagttaagcacggaaaagcctacggggtcttcgtgaacggagagttcctaaagttcgacgcgacgattattgcctctggcgggttcacagggctttttaagtacacagcaggttcgccgacgaacctcggaacgctcatcggagacgccgtaatgaaaggtgcttttgcgagagaccttgagttcatccagttccatccaactgggttcattggagaagatggagttaagcttatcagcgaggcggttaggggagcgggtgcgaggctcgtaaccgaagatgggaagcgcttcgtaaacgagctttccacgagggacatcgtggcgagggcgatctacctgaaaatgcaggaaggagagagagtattcctcgatgctactggaatagcggacttcaaaaagaagtttccccagatttatgcctttctcagaaaggaaggaatcgacccttcaagggatttgatacccattgcgccgatagcccactacacgataggcgggatagcagttgacacatggtacagaactggaatcaagaatctctatgcaatcggtgaagcggcaagtaacggttttcacggggccaacaggctcgcgagcaactccctgcttgagtgcattgtttcaggccttgaagtagccaggacgatagtgagggacaaaccgaagggcagagaagtgaaagaacctccttatcacggatacgagactggagacattgaatcactgagggaaatcctctgggggcacgcgggcatagttaggaacgagaggacactcaaggagggcttgaaaaaactgagagatgttgaagccgacccgaggctcaagctcctggttaggggtgtccttgagtgcgctctggccagagaagagagccgtggtgcccactaccgtgaggactttccggctatgagaaaggagttcgagaggccgagcttcttcgacggcaagtgcaggctataaccaaaggtgtccaaaaacccttttaatgtccttttccatgcccccactgtaggggtgagaaaatggagaaggaaaagctcatcgaggagataaaccggctgaaggaggaacggaacgcgataattatggcccacaactaccagctgccggagatacaggacatagcggacttcctcggagacagccttgagctcgcgaggaaggcggtaaacattgacgctgacgtgatagtcttcgcgggcgttgacttcatggctgaaaccgcgaagatactcaaccccgaaaagacggttctcctgcccaccccaagggcgacctgcgcgatggccaacatgctcaccataaaacacatcattgaggccaagaaaaagtatccagatgctcccgtcgtcctctacgtgaacagttcagcggaggcgaaggcctacgccgacgttaccgttacctccgcaaacgctgctaaaatcgttgggaagcttgactccgacgttgttatcttcggcccggacaagaacctcgcccactacgtcgctaaagtcactggaaagaaagtcatccccgtccctcccaacggccactgctacgttcacaggaagtttacgctggaggacgttgaacgtgcgagaaaactttacccaaacgccaagctcatggttcaccctgagtgtgagccagaagtgcaggaacaggcggatataatcgtctccaccggcgggatgataaagagggcctgcgagcacgacgagtgggttgtcttcacggagagggagatggtttgccgtctccagaagctctatccgagcaagaagttctatcccgcaagggaagacgccacatgcattgggatgaaggcgataaccctcaaccacatttacgaatcactgagagacatgaaatacagggtagaagtcccggcggagatcgcagagaaggcgagaaaggcaatagagaggatgctggagatgagctaatctcacttctttttgatttcacatttaccaaagtggaacagtatccatgtaattaaaccacaatgttttaataatcgggagactgaggggagtattctcgaacaacgagcaaccgattgttttaaaaatacccttttagagaggttaatttataacaacaaaatgtcgggattaacgatgggggtaagactaaccacagcttacttagccatagtcgttggcgcctacatggtgggcctcgggaatatatggagatttccagctcttctcatgaaatacggtggaagcggactcatcacatatttgatttccgtggcactcttgacgatcttgatagcatcagtattgaaagtggcccacgtcgaagtcggaggtatcctggagcactacgagagactcaacttcccggcgtttacccttttcttcctcgtgctcaacgtactgtttatgagctactactccacagtgggaggattagcactatccggtctcatcaccaacagcgctccagaaaacatcctgtggaagcttctaagctcgttggcatttatcctcatagtctttgtcatcctgatagccgggaagaaaagggtattcgacatcatggcgatttcactcctcgtatttcttgcccttgcgggttttgtcatattcgagatgtactcatacctcggaagtgggggcgaaatccttggcccacttaagagtctgttcacatggaaagggtttacaattgagatgatcacggacatgatggctcaggccgcctactcgctgggagttggcctgggtttttacctcattttcgggtctttcctacccaaaaaagcatctccaggcttaatagcggttgctggtgctgttattgacaccttagcatcctttatggggcttgccctgtttcttctggtttcggccattcttccaaccgccctcatcacaagcacgggcataatatttgaactaactcccttaatcctgagctagtacctccagatgcccctcctgaagatcgggttcaatttgacggtgcttttggtggcgataaccagcatggtgcccctgggagaagtagcgggaacggtttacgcaaaaataaccgggttgcacagaatcgatgggatgatagcagtttctatcatgacgatattctttggtaccctgaacgtactcctcttgagctacaacatagacgctgttcggattcttgacaaaaccgttgcagtactcctgttcttcgggacagtgatagaagcgtttggaattatgcggagcaacgtgtccccgatctggaaatacagtggatacatcgtttcttggattgtaggattgtttggagtctattatcttgcagtatcaataaaggagcataactacgtctctatcattgttgttctggccatcttcctgctggtcatagcaagcaataagcccatcaaaaacaggatgagaataactaggaggcggcagtattttaactacagataaaccagcctggctcttccatttttttccagccactcgaggagttccttcgcgaactcgaactttttcctcttgctctcccagactggggagtgctctttgaggtgcggcttgctccatcttccgacaacgttcccaaagtcaaagccaacaagcacaacctccctagccccaagttcttcagctaaaaacgcggccctgtccccgtcggtgaagccgccaaagttgtaaactatgtcgagcggctcggtctgggtcgtgccgagcactctggaaaagagcggaacgtatgacgtcatcttatcaacgttgtctccatgggcatggacgaccatgaaggaacccctgtcgttagctattcttaggtccggaattctgccgtcgaggtcggtaactataatatcgggcacgaggtcgttttcaaggagtgcggaggtagccccgtcggccgctatcagagttccatccgagaaatcgaactctttcaaagctttttcaaggctcgggccagccccgaagacgtaggcctttttttcaacgatggcttcaagctcatcccgaaggatgtattcatcaccttcaaggagcagagcacggagtatttgggcggcttttctgtcctcctcgattgagtagcccatctcgcgaacaatccgaagatagaacggcttccagtcttcccacctcatttcaatcccctcagcttcctgtcaattctaagcatctccctccactgcctcccgggccagtaaatctgcccgcagtttttgcagacgtagaactcctcgtaccgctcataaacgctctccggaactttgccctttacctcttcctttggaatcctcactatcaggccgttacacttggggcatcgagcattggctggaaagagctctctaaactcgactccaagctttttcagctcctcaacctgaccctcaagagagttcgaggagagtagaaagaccctcgccccagcagtcctcgccctctcggcaaggccagagtcgcgggtgagtattatcctgtcatcttcaagcgctttcctaatgattacctcatcctcaactatcccgtagagggtgtcatagccgtagaggcggagccatctcgccaggcgaccgagcatcatgtcggcgatgaacttcattcaccttcccctgaaatgttagaaaggaaaaataaggagttttcgatcgggaccccctttaaaaatcacttctgaagagcgcgctttttgaatttctcctcaacctcctccagtgaggagtagcccagccttgagaaggtgtaaagatagctctccagagcgaggtttcttccagcttccttcgccctctccacatcctcaaggtatcgctccagggtttgaactgaaaacgtggagagctcacaggcgagatacctctgaaactccggcttgttttctatagcatggggatatttcccatgcagctcttcaatccaggacttttctatctggactatcctctctatcaaccccctcttatcctcggggattcccatcctgccctccatgcacgcgtatttctcgtatagcggattcctcccctctttttccgcctctattagatcgtccagataggaaagcagggtctccagggaatacgggtaaaagcgggatatgcgcatgaacttgaacgtcttctccctcttgcactcggggttcgtgggctgcagcctttcaaaaaaccggtactccctctccgctatctccttgagaacttccattttatcatccacccctcaccacctccaggcctatttcctcaaactcttcggcgatgcgtttcatggtctcctccgaaggcttctcacgggtgggcatcctgtattccatccccagtcgtctgtatttctcacttacatcatggaatgggagaaggtgaatccgctcgaatccgccaagggaggagacgaaacgggcccagccgctgacgttcctctccgtgtcagtgattccaggaatcactgggaagcgcagaagcacatctttggctcgcccgattttaacgagaaattcgaggttcctcttgatgattttgttgcttacgccagtatactttatgtgctcttcctcatcaaagagcttgaggtcgtagagaaacacatccacaagtggctcaactttctttaaaacgtccaaaggtgcatatcccgaagtatccagtgcggtgttgatgtgacgctccttagatgccttcaaggcctccaccaggaactttggctggaaaagcggctctcctcccgagaatgtaacccccccaccagaactgtcgtagaggttgacatccctctcaacttccttcatgagttcatcgacagtgattgtccttcctacgagcttcaaagcactcgttggacagaactccgcacacacaccgcatacgtcgcatttttcccggtctatgtgctgaacctcgttctcgtcgaaggtgatggctctgaggggacagacgttaacgcaagtgtggcagtggatgcatttgtactcaaggtacatcagctggggcctcggtgatatcccctcggggttatggcaccaccagcacctcaatgggcagcccttcatgaaaaccgtcgtcctgattccagggccatcgtggattgcataacgctttatgtcgaatataatcccctttaccaatttgaacacccctaatgagctgttacactcaaaaagttaaaggatcaaaggagctcctgctcggttctctgaactatctcctcctgcagcccctccggaaggttgacgaagtaatcactgtagcccgccaccctcaccatcaaatcctggaagtcctgaggcttcctctgggcctccctgaggagctcagcactcacaacgttgaactgcacatggtggccaccaagcctaaagaacgtccttatcagctgcgccagcttcttgatgttctcctcactgtcaaagatgtcgggcgtcagcttctggttgagcaacgctccccctgtcttgtcccagtcgcacttggcaacgctcctgaacactgcagctatacccttcctgtccatcccctggaccggtgagactccctctgaaaccgggaaccccgcctccctgccatcgggcgttgctcccgtgaccttcccaaagtaaacgtgaacagtcgtcgggaggaagtaagccctctttgatgctttcctaaccggagaaggtggatagctctcgatgaggtcaacaacctcatccacgactctcttggctatctcgtcgacgtagtcatcgtcgtttccaaacttgggagttttatcggggttgcggagtatttccctcataatctcatagcccttccagttgttcttcagcgccttgagaagcgcgtccattgtgaaagtcttcttgtcaaatacgtggtactttattgcagcgaggctgtccgcgatagttcccagaccaacaacctggatgtactgggtgttgtacctcgctcccccacagttgtagtccttagccttctcaacgcagtcctctatccacagagataggaacgggaccggaaggtacttggcatagagggcctctattatgtcgttgcccttcatctttatgtcgaggaagtgcttgacctgcttcatgaaggcctcccagagctcctcaaagctcttgaagtccctcgggtcgccggtttcaaggccaatcttcttgccagttcttggatcaacgccgttgttgagggttatctcgaggatttttggcaggttgaagtagccggtgagtatgtaggcttccttcccgaaggctccgctctccacgcagccgctcactcccgaagttctcgcatcctcaaggctcttaccctgcctgagcatcttcactatgacgccgtcgaagttgaagaacggcggctcgccgaatcccggcccaaccaccttcagggcttcaatgaggaggcagtcagggttcttctcgctcaccagcacggcagtgtttggctgcaaagtcctcatctcgccgaggacttcaagaatcagataggagagctcattaactccatcggagccgtcctccttcagtccgccaacgttgagctttgagaagtcgttgtatgtgaagctctcctccgcagtcaccccaaccttcggaacggcaggctggttgttgaacttgagccagaagcactggaggagctctttcgctttctccctcgtaagccttccctcctctatgtccttcttgtagaaggggtagaggtgctggtctatcctgccggggttgaatgagtcccacgggttggtctcataggtgactcccacgtgtatgaaccagtagtgctgtaaggcctcccagaaggttctggggggatgagcgggcacccacctgcatatctcggccatctgcttcagctcttcttttctcttggggtcggtctcctcctccgccattttctccagcttttcagcgtatctccgggcgtagattaaaatcgcatctgcaacgatgtccattgccttaagctcttccatcttctcgtaatactcagggtcgctcgggtcgagttcctccatcttcctcctgatctcctctttgatgtcgagaacgcccatcttgaaaattctctcgccacccgcagtgtgtcccggagccctctgctccatgaactccgtccagacgccggcttcgtaagcatcaatccactcctggggcaggttctcgaaaattatatccctcatcgcccttcctttccagaaggggattatctccctctcgtagagttctttagtctcctcatcaaccctgtatggcatgttctcccttgagttcaaaatttcaaggtcctctatgctgtgaacggtgatttcaggataagttggaacctctttaacgccagtgcccctaatcccgacgatgagctgcccgtcttcaacaggtaggctacagtgctcgaggaggtacttgaaggcaagcgccctctgaactgggatcgattttcccttcgccaggtcgctcttgtagaactcggttatcagcctcgccctctcagaagagattctcacctcagtgttcacgctttcttctctgagtttagcgaccctctcgtttatgggccttatggaggagcgcctcctctcgagctccttctctattttgccatggctgtttgtacaacatgtctcaatagcctcactcattaacaacacctcgaacaaaactgatgctcagtgttaataaaagtagtgattcacctgaagtggtactttagtgcacaaagatgtaagcaatgtttataaggaggggcaaagttttatagccataaaatatgggtgatgggagatgctagtctacttcatcggcaccggcggtagcgagggaattcctgcccatctctgcacctgctcctcctgcaacgaagctcgaaagttcggcttcgcccagagaaggccctcaacgctcgccgtagtcactgaaaatcgaaaaacagttctcttcgacgttgggacggacataagagacttcctcaacgtcccccttgaggctattttcctgacccactggcaccacgatcacatctacggcctctacaagctccgctggatggcgatggagaccgaactctacgcgcctgaggggcaggccgacgcgctgattctcaacgagccaaagaacctgaaaccaaagactctgaagcccatggacaggataaaaatcgacactctaaaaatcaccgccttgaagctcaaccaccaggtagaaaccctcggttacctaatagaagaggacggaaagagttttgccctgctctatgatactaaaggccttccggaagagacctggcaggttttgaggaagaaagcccccttgaggggagtagttgtggacgccacctatccgccgggctttaatgacccctaccacaacaacgtggatgaagcagcagaaataggccttcagctggcggagagaaccgttctgagccacatctcccataagaacctgcctttccttgagctcgttgaatatgtgagaaaaaggtgggggaacaaggttctggtagcgtacgacgggatggtgttctacgtctgagagcggaggtttttgaaatctccaagatcccaggttggatatccctctttccttagttcctcctttccagctaccttcctggcgataagcccgtagtccgtctcccagccgtccagacccaccagtgttgactttctcacaaggtctttcagaattcccttcgcttccctttccccagttccttccacttcacctcgatgaaaagcgccttcttctccctttcgttgagggcaacgaggtcaacctcctctttcttgtgccaccagcggccgattttggtgaatctgaacgggagcccgttggttttgttcagctcgagcaaaaactgccttgatatctcttcaaaggccttcccaacgtaggtgttgaaagcctcccagtccatttcaaaagttccaatctctacccttcccctgtttggttttacaaagcggaaccagaactcaaagaagcggtctttgaggtagtagcgcgcttttctgctcctctcgctctcagttactggaacttcccgcctcacaaggtcaagagaaatgagagtcctcaggtacttgggcatgtcctttgcttctatcccagcccaatgggcgatctcgctcaacctgtgcttcccgctcgccattgcttcaaggattatgtagtagcggtgtacttccctaagctcctcccggagaatgaattcaggctcttcatacaagatggaagtcgacgaaaacgcagtctctaaaagctccctcccaaagtcatcgcctcggaagagtctgaagtacattggaacgccgcctgtgacggagtaaatcttaacaactgtctcaacgggcttatccctgaagtattctgccacgtggaagaagccgaggggtttcagctttagctgggccgttcttctcccgtagagcggattggtgtaccccatcagaccctccatcagacccaggagggagccgcccagtatcagaaagaacctgtcatcgagtttctcatctattatcgcttgaaaaacggcaggagtgtttttgtctgccagtagcaggtatgaaaactcgtctatgacgaccaccagccttcggggcgccttcagctttatcaactcaaaggcccttctgaagccccccacctcaacatcggggagaccgagcatctcggcagcctctctgtagaatcgcatcgcgttagtttcgagccctcccctgtccgctaaaaaatagactgccttcttcccggcaataaaccgctttatcagttaggtctttccaacgcgcatgcgcccgtaaattatcagcacttcttttttgccggagcgagggagtctctccagaaaagccagctcttccctgcggttgacaaacattatcctcatcaggataatctttgttggcataaaatttaaaggttttaagagccctcacactaccccgcaaagcttttttgcagaacacttaagatggtatggtgatcaaatgcgcgtcctcgagctggctaaaaatagaaaaaccgtaagaaagttcctacccgataaaccgccaaaggaagacatcctcaaggccatagaagctgccaaggaagccccttcgggaatgaacgcccagccctggaagttcgtaatcatagacgaccactggctgaaggctaaaatccgcgaggtctgtgaggaggtagagaagaagttccacgagaaagtctccggtgagctgggagagtggctaaaagagaaagggtttactcccgaaaaacctttcctgagcgaggcaccgtatctgatactcgtcttcggacacactaaagctccctactggctccagtcgacgtggacagccattggatacctccttttagcgcttgaggagctcggcctgggaacggtgacttatacaccaccgaaccccaagccggtggaggagcttctaaatgtcccaaaggactacaagctccagactatactcccggtaggttatcccgccgatccaaagccaaagtacgagaggaaaaagctggaagatgtagtgagcttcaacgggttctgagtctttctcttttctccttgatatttgtaaagttagcaatttgcacaatgccaacatttctgaattttgccgaaatttaatcgactaaaacaagtttttagagaaaaatttttctattttttcgatttttgaaaaatttgttcgacaaaacttcaaaattgccgaaagatttatataccctccctcacacggctgagtgggtgatgcatattaagcggtggaataatggtgctggattcaacgctcagggaaggggagcagacacccggggtaaacttcagcccggaggacaggcttagaataggaatcgccctcgatgaggtcggagtcgattttatagaggccggccatccggcagtaagcggggagatccttgaggggatacgccttctcgcttcccatggcctcaacgcgaacattctggcgcactcaagggccctgaggagcgatatcgacctcgttctgaaggccgaagcagaatggataggtatcttcatgtgcctctctcagaggtgcctggaaaggaggttcaggacggatctcagcggagccctcaccagggtcgaggatgctattctatacgccaaggaccacgggctgaagatccgcttcacaccggaggacaccacgaggacggagtggaagaacctcacagcagctctgaacctcgccagggagctcaaggtcgacagggtgagcatagcggacacaaccggagccgctcatcccctcgagttctacgacctcgtcaagcgcgtcgtcgagttcgggattcccgtaaatgtgcactgccacaacgacctgggattggccctggcaaacgcgataatgggaatcgaggccggggctacgctggtggatgccaccgttaacggaattggggagagggcagggatagtcgacctgtcccatcttctggcggcgctctactaccactacggggtcaaaaagtacaggctggagaagctctactcgctgagcagactcgtgagcgagataaccggccttcaggtccaggtcaactaccccatagtcggccagaacgccttcacacacaaggccggcctgcacgtttcggcggtcgtcagggatccgtctttctacgagttccttccggctgaaacattcggcagggagaggaccatctacgtcgaccgcttcgcaggcagggagacgatacgcttccatctatccagattcggaatccacgacgaggagataatcgaagagctcctcaggagggtaaaggcctcaaggaggcccttcacacccgagatgctggccgaagaagcgaggaggatgatgacatgacgctcgttgaggaacttctcggagccaaaaccggtgaggtcgtcgtcagggaagttgacctcgtttacgcgcacgacggcacgatgcccctcataatagaggccttcaggaggaacttcacaagggttgtgccgagaacgtacgttttcttcgaccacgtatttccagccccaacggtcaagatagccaacctccagaaggaaatcctggagttcgcgggggagcaggggattccggtgattcaaggtcaggggatatcgcaccagcttgccgtcgagatgggcctggcagataacgccaggatagttgtgggcgccgacagccacacgcccacattgggggcccttggggttttcgccgttgggataggggccacggatacagccgtcgtcatggggctcggaaaaacctggttccgcgttcccgagagcgtttcggtggtcttcgagggaaggcccggaaaaaacgtcatggcggccgatgcgatgatacacatcatcaccgctttgagggacttcgagatgaactacaaagctatcgagttcttcaacgtccccttcagctttgacgagagactaactctcaccaacttcagcgtcgaggccaacgccaagaccggaatcatcggggaggagtacagcggggacggctacgtcctggagctcgggattgacctctcatccctcccgccgatggtggcgaaaccacaccatccctcgaacggcgttcccgttgaagaggtcgaggggacgaagatagaccaggttttcatcggctcgtgcaccaacggccgcttcgagcagattgagagggcagcagagatactcgccggggaggaagtcgcggtcaggacgataatagggccagcatcggccaacgtctaccgcaggatgatcgagacaggcattgcaaaggttctgatagatgctggggcggtcatactcccaccgggctgcggcccgtgcctcggaaggcacatgggtgttgcaggtgatggcgacgttattctgagcactacaaacaggaacttcaggggaaggatgggctcgcccaactccgagatctatcttgccagtccggtaaccgctgccctcagcgccctctatggagagataacaaccccggagggaggggcatgataacgaggggaagagtgtggcgcttcggggacaacgtttcgaccgacacgataacccccgggaggtacaacctcacgaaggatccggaggagctggcaaggatagccttcatagaggcccgccccgagttttcaagggaggtaaagccgggggacgttgttgtaggcgggaggaacttcgggataggctcctccagggaatccgctgccctctcgctcaaagcggcgggagttgcgggggttatagcggagtcattcggaaggatattctaccgcaacgccgtgaacctcggcctccccctgctcgtcggcgacacgagcgggctcagggacggagaggtagtcgaggtgaactggcggaccggtgaggtgagaaccgagaacggagttttccacttcaaaccgctcgacggcttcctgctcaggatcgtcgaggagggaggaatactgagcttcatagcgaggaggggtgacctgtgtatagagtagccgtgatccccggcgatggaatagggccagaggtcatagatggtgcggtgagggtcttgaaagccgtaacgggcagggtaaggttcgagtactacgagggcggcgtggatgttttccaggagtgcgggagcccaatcagggaggaggaccttgaggagataaggaggagcgacgcggttctatttggagctaccacgactcccttcgaccttcctggatacaggagtttaatactcaccctcaggaaggagctcggcctctacgccaacctgagaataatccccgaccttagaacgggaagggaaatcgtcatagtcagggagaacagcgagggcctctacttcggaataggcgcggttgtgaacgggagagctgtagacgtcaggctcatcacgagggaaggtgccgaaagaatagcccgctttgccgtggagcaggccaaggccagggggagcttcataaccttcgtccacaaggccaacgtcctcacaggcgacaagttcttcaggaggatagtcagggaagtggcgggggaggagggcgttgaagtcagggatgccataatcgactccttcactataaagctcgtcaggaacccctgggagcacggagtaattctcagcgagaacctctttggcgacatactgagcgacctcgccacagttcacgcgggcagtataggtatcgttcccagcgggaactatggggacggaatagcgctcttcgagccggtccacggttctgcccccgacatagctggaaaggggatagccaaccccataggggccatactgagcggtgcgatgctcctcgactacctcggacttgacggctcgctcatcagggcggctgtgaggggctacgttgtgaacggagagctaacgccggacatgggcggaagggcgaggactgaggacgtcgtcaggggaataatcggcgagatagaggaccttctgtctatggatgaggtctggcgggatgagatcaggctgagcagactggagagcgacataagccgaatggcggggtgagtgttgcatccgtaacttgagctttaaagcggatttcatttgttacgaagcctttaagttcccgatatgcggcgaagaatggaggtggggaagaatggtggaatgccctgtatgcggaagtgaaatagagatcggagaggtcgaactgcaccagatagtcgaatgcccggtttgcggagcggagcttgaggttgtgagcctcgagcccctaacattagaggagctccccgaggtcgaggaggactggggggagtaaccccttcaatttttttggtggtggtgatgaggatagggatcacctacacggttctcagaagggaggaaatggccataaaggagagggccggcgagtttggggaagtggttatgctccacgaggacgacctgctcttccccgggaactacgacctcgacgtcgtcataataaggaacgtaagccacttcaaggccctctacacagccaggctcttcgagagcgaggggattccgacagttaactcctccaggctcatcttcgaggcaggtgataaactgttcgccactctgaggctggccgggaaggttcccgttcccgagtggaaggccgctttgagcgagggaggagccctgagagttccggattccctcggctatccgctcgtttcaaagccggtttttggaagctggggaaggctcctcgcgaaggtgaacgacagggactcgctggaggccgtcctggagcacaggaagtggatgaagaaccctctctacggaatccactacttccaggagttcgtggagaagcccggaagggacataaggagctacgtcataggaggggagttcgtcggggcgatttatcgctattccaaccactggataacgaacacagcgaggggcggcaaagcggagccctgcagcgatcccgaggtcgaggagctctcggttaaggcctgggaggccttcggcgagggagctttggctatagacatcttcgagagcgaaaaaggtctccttgtgaacgaggtcaaccccaacatggagttcaagaacgccgccagggtcaccggcgctgacatggccggaaagctggtggaatacgctgtggaggtggctaagacatgataaaggccgcggttgtcggtgccagcggctacattggtggggaactagtcaggcttttggccatgcaccccgaggtcgagatcacggctataacatcgaggcgcttcgccggccagaaggtacacaaggttcatcccaacctcaggggactcgacttacgcttcaccaacaccaaggagttcgatgccgacgttatcttcttagcggtcccccacgggacctcgatggagataatagacgactacctcgggagcgcgaagatcatagacatgagcgcggacttcaggctgagggaagatctatacagggagtactacggcgagcacaagaggccggagctcatagaagagttcgtctacggtctccccgagctccacaggaaggagataaggaaggccgagctggtcgcaaacccaggctgcaacgcgaccgccacgatcctcgcgctctaccccttcagggagctcacggatgaggcgatagtcgatctcaaggttagctcgtctgcggggggaaggagggagaacgtggcgagcatacatccggagaggagccacgtcgtcagggtatacaagccctaccaccacaggcacgagggcgaggtgatccaggagaccggggttaaggcggccttcaccgtccactccgttgacatcatcaggggacttcttgccaccatctacttccgcttcgaggggagcacgagggagctcttgaggaagcttttggtgtacaaggatgaacccttcgtgaggctcgttaccgacaaaggcggcctccagcgctttccggatccgaagtacgtgatagggagcaacttcgcggacataggctttgcccacgacgaggagaactccagggcgatagtcctctcggccatagacaacctcatcaaaggtggttccgggcaggcggttcagaacatgaacctcatgttcggactcgacgagaggaccggtctgaactactacccggtctaccccgtgtgaggtggtaccatgaggatcgttaagataggtggggccgcactggtgaggtttgaggaggtctgggcaagcgacggcctctcaagctcgctgaggagccctgacacggtcgttgtgcacggtggctcgaggcacgtcgacgagctctcaaggaagctcggggtgaagatcaaaaggctcaccagcccctccggagtgaccttcaggaggacaactaaggaagtcctcgacgtttatctggcagctatgatgagggcgaacagggagctcgtggagttccttcaggtcaggggaataaacgcggtgggcgttatgggaattgagcacgagctggtgattgggaggaggaagaagctcgtaaaggcagtaatcaacggaaaaacggttgcaataagagacgactactcgggaaccgtggagaggataaacgttggggctttgatggagctcaggaagctcgggctgccagttatagcctcggtggcctacgatcccgttgagaacgtcccactgaacgtcgacggggataaagtggcctaccacatggccctggccaccaaggcgagggagctcgtcttcgtctcagattcggcctttatggcggatgggagcgtcgtagaaagggtgaacctgaacgagctcccagagctcctcggatacgctaaaggggggatgaggaagaagctcatgatggccgcaaaggcagttgagagcggcgttgaaagggtggtcatccagggcctcaacggaaggacggtgataacttgagggagatgccgctctacaggaagaggctcaggctcgtaaggggcgaaggtgtctacgtctgggacgagaagggaagacgctacctggatctcatagccggaataggcgtgaacgtccttggccatgcccacccggagtgggtactcgatatgagccgccagctggagaagatagtcgttgctggtccaatgttcgagcacgacgagagggaggagatgctcgaggagctctcccactgggtagactacgagtacgtctacatgggcaactcgggaaccgaagccgttgaagccgccataaagttcgcccgcctcgcaactgggcgttcggagatagtggccatgaccaacgccttccacggaagaacactcggttccctcagcgccacctggaagaagaagtaccgcgagggctttggacccctcgtccccggattcaagcatatacccttcaacaacgtcgaagctgctaaggaggccataacaaaggaaactgccgctgttatcttcgagcccatccagggagagggcggcatcgttccggcagatgaggagttcgttaaaaccctcagggacctcacggaggatgtgggggcccttttgatagcggatgaagtccagagcggcctcagaacggggaagttccttgcaatagagcactacggggtgaggccggacatagtgacgatgggaaagggaataggcaacggcttccccgtgagccttactctaaccgacctggagataccgaggggaaagcacggctccacctttggaggcaacccgctcgcctgcagggccgtggcgacaacgctgaggatactaaggagagacaggctcgttgagaaggccggtgaaaagttcatggagttctcgggcgaaagggtggtcaagaccaggggaagggggctcatgatcgggatagtcctcagaaggcccgcggggaactacgttaaggccctccaggagaggggaatcctcgtcaacacggcaggaaacagggtgataagactcctcccgccgctgataatcgagggggacacgctggaggaagcaaggaaagagatagagggtgttctgaatgatatcctctgaggagaaggttgaattcctgaggaagctcgtggagatttactcccccaccggaagggagagtgaggcagtaaagttcatcgtcgagtcctttgagagctttggggttgatgcttacgtcgatgaggtgggaaacgcgatagcgataagggaagggaagggtccgaggatactactcgccggccacgtcgataccgtcccggggataatcccggtcaggatagaggacggggtcctctggggcagggggagcgtcgatgccaagggcccgcttgcgactttcttcttcgccacgctggagagcaacgcaaacataatcttcgccggtttggtagacgaggagggcttttcccaagggcgccaagaacctcgacgttcccagacctgactacatcatcatcggcgagccgagcggcgtcgacggcgtcacgataggatacaagggcagtttgactgcaaaattcgttgagagcgtcgagaaagttcacgggagtttaggggttgacgccgctgagaggctgataaacagatggctcgagataaagtcctcctttggagagggcttcgacgccttgagcggcaggatagtggagctccacgcctacgagagggacttcgacttctacggcgagatggtgataaacctccgcactcccccaggctacaatccgcccaagggttgggagatcctcgacttcgttcccgcctaccaggtcgacaggaggagtccactcgtcagggccttcgtcaggggcataaggaggaacggcatgaggccgagactgaagaagaagaccggaacagccgacatgaacatcctgggcccgaggttcggcgttgatgccgtcgcctacggtccgggcgattccaggctggaccacacaccccacgagcgcatcagcctcagcgaatacctcctggcaatagacgttctggtggacgtcatcgaggaactcaaaggagccaaggaaagggccgctgaagaaagcggggagagggaagcgggaaaggccctctcagggtaaagttctcgttgagaggatcctggacttcttagttgcagcatctatggccttcattatcgccgttcttatctttccctcctcaagctcgaagatgccgtctatcgtagtccctcccggggtcgtcaccatgtcccttatctcagctggatggccctcgtagttcagcaggagctttgcagtgccgaggagggtctggagggcggctatttttgccacctccctcagaagaccgactctcaaaccgccgtagatcatcgactcaacgaacaccgaaacgtaggccggcccggagccgctgagcccggttatcgcgtccatgtgctcctcatcgacgagaagacactcgccgaaggccctgagaagggattcgaccttctccctctcatcgggctcaagatcgatcgtggcgtagcctgtaaaggcctcccccacgagtatggctatgttgggcatcgccctaactacctttaccccggggcaagcccctttagggcctttattggaacttcagcggccaaagatacgagtatcttgccgttaagtgcctctcttatctctcctagcaccttcgctaccttgttgggcttcaccgccagaaaaacaacctcggcccaatccgctgcctccaggttgttcctgatgaccttaaccccgtattccccaagccattttgccttctcaacgttcctcctcgtggcgataacttcgtggcccttctcggcgagggccctcgcgacagccccaccgatcatcccagctccaatcaccgctatccgcatttaaccaccgcgtgtcgatttttgaaccgtatgataacatttttggacgcctgtttgtcaaatcgacaaaaatacgccagttttcacactgatttttaacagattgatgagatggacgtccttttttgggaattggacaggcaaacctggcgaatagtttaaatagggttgctgattcatccgtctccggtgatcggtgatgtcccgccaatttatgaagtcttcaaaccaggtgatgtcccgccaatgggtgatgccccgccaatattagtaacccccggcggggaagaggtaatcaggaagctcgttctgagggctttgaacgagaaccagagactgatactgaggagcataagcggcagacaccgctccctgaattctctccttgaggagctcagcagaaaggaaagaaaagccctctcgacgctgaagctgaacgccagaattctgaaggaactcgggctcatagactacggcactaaggaaaaccccaggcccgttaggcttaccgagcacgggagaatgattctcagccttctggaggtggacggccatgagtgaggccctcgatccgaggacaaagctccagagcatgctccagcccgtcaacaacttccacctcgagtcctcggagacctgcctcgaaattctctcagcagtgctcgaggagaagggagagaaagacgtcgtaatactcagcaaaggccactcggctccagctttctacgtgatgctccacgaaatgggtcttctcagcgacgaggagctctacagcttcgcggacatagacggcctcccgagccacgtaatcagggggctgcccttcatagaggtctccagcggttccctcggccagggactctcggtggccaacggtatagcgatggccaagcgtatggacggggaagagggatacgtttacgtcattctcggcgacggcgagctggacgagggccaggtctgggaagctgctatgacagcatcgcaccacaggctcgatagagtgatagcgatagtcgacaggaactacttccagctcacgggaggaacagaggagatactgagcaaggaaccgctggcggacaagtggagggccttcggctgggaggttatgggggttcccaacaggaaggaggagctcaagaaggccctcgaaacggccaaaaaactcgggggaaggccgaaggtcatcatagcgaggtgggaagtgtgatagaaagcttcagggaagcctttgggagggctttggttgagctaggggaggagaacccgaacatcgttgtcctagatgcggacgtcaagagctcgacgaaaacggcctacttcgagagggcctttcccgagaggttcatccaggtgggtataagcgagcaggacatggtctcgatggctgggggtctggccatagggggcaaaatcccagttgtttcggcctttgcggctttcctgatgcgggcctgggagcagataaggaacacgatagccagggacaacctcaacgtcaagctcattccaacgcactctggcttttcagaccacatggacggctcatcacaccagtgccttgaggacatagccctcatgcgcgtcctcccgaacatgacggtagttgttccggcggacgccccctcagttcccgtcctcctcaaacaggtcatcgagctcgaggggcccgtctacatgcgcctcggcagggaccacgctccaagggtctatgatagtccaaagctgaagctgggaaaggcaagtgtcctcagaaagggaagcgacgttctccttgtggccgctggcgttatggtgtcggtggccctcgaaacggcgaggaagcttgaggagaggggaataagcgctggagtcgttgacatgcacacgataaagcccctcgacgaggaaacgctgctgagattggccgctaaggtagacctggtcgttacccttgaggagcacagcattcacggcggcctcgggggagcggtagcggaggttctctcggaaaagatgccgaagaggctcatcaggatcgggacgacggagttcggcaggtcgagcagggactacttctcactcctggagcgctatggtctgactgcggaaagcgtcgtgaagaaggttgaggtgatgctgacatgaggttcaaattcgagaagggctccaagccgaaaactgtcgttaaggtcggaggggttaaaatcggcgacggattcacggtaatagcaggtccctgcgcggtggagagccaggagcaaataatgaaggttgcagagttcctggccgagatgggcgttaaagtgctccgcggaggggctttcaagccgaggacgagtccatactccttccaggggcacggggaagaggccctgaagtggatgaggagagcagccgatgaatacggcctcgtaaccgttacggaagttatggacgtttcgcaggtggagctggttgcgaagtactccgacatgctccagatcggcgccaggaactcccagaacttcgagctgcttaaggcagtgggaaaggtcgacaaccccgtggttctgaagaggggcatggcaaacaccgtccaggagctcctctactcggccgagtacatactaagcgggggcaacgagaacgttatcctctgcgagaggggcataagaaccttcgaaacctccacaaggttcaccctggacatctcggccgtcccagtcgtcaaggagctctcacacctgccgataatagttgacccctcgcatccagcgggcaggagggagctcgtgatacccctggcaaaagcggcttatgcagtcggggccgacgggataatggtcgaggttcaccccgagccggataaggccctctcggactctgcccagcagctgaccttcgaggacttcgagaggcttttgggggagcttgaagggctcggatggaaagggacaacatcgagagaggccgcagagggcgttccgaggtacgtgctctcggagagggtcgaggagaacgactggtacaccgaggtcttcctcatggagctgggggggctcggatggagggcctgagcttcggccccctctccatccttccctccctcgcggaggagctcaacccccacagagtcgcctttctgacgaacacgacggtggagaggctctggcttgaaaaggccgccgaagggatagaggagccgataaggatagtcatcccagacggcgagaagtacaagagccttgagactgccgtagccatctggaagaggctccaggaggagggcttcacgaggaagtccctccttataggcctcggtgggggagtcgtgacagacatagcgggcttcgtggcctcgacctacatgaggggaaccctcctcggcctcgtcccaacgacgcttttggcccaggtggacgcggccatagggggcaagacaggggtgaacttcaacgggaagaacatgatagggacgttttaccttccaaacttcgtcctgatagcccatgaaaccctctccacgctcccagaggaggagataaggaacggccttggggaagttgcaaagtatgctctgctcgacaggaaggtctacgccctcgccaggaactttgaagggataagcgagaccctcatcagggaatgcgccctcttcaaggtggaggtagttgagaaggacctgggggagagcgggctgaggaggatactcaacctcgggcatacagccggacacgcgatcgagaagctgtcgaattacagaataaagcacgggcttgcggtttcgatgggactcatggtggcctcgaaggtcggggaagagctctacggcttcgattctggaaagaccgaagagctcctgaagaagctcgggctccccacggggcacccctttagggcggaggagatactggaggagatgaggctcgacaagaaggcctggtacgggaggataaccttcgtcatcccggttgaaataggcgatgtcgtcgttgaggaagtcgatgaggctgttttgaaaagggccctggaggcaacgagggatgatagcgggagtggtgactgccagaaacccgggggaagcgcttgagaagataaaaacctcgaagtttaacctctacgaggtcaggctcgactcctttgagagctttgagggactggaagtgctgggggaatattctaaaaagctcatcttcacgccgaggaggagggaagaagggggaatcaggcccctcgatgacgggacaagactgagcctctacagaagggttatggagctcaaaccggcctacgttgacgtggaattcgcctcggatatagcccaggaagttatggagcttgcgaaagagaagggggttggtgttattctctcctaccacgacttcaatggaaccccggattttgggaagctcctgacgctcctcgaggacatggaggagctggagcctgagataataaagatagtcaccacagcaaactcccccctcgacaacctgagggttctgaggctttacgagcatgctgagaacctcatcgccttctgcatggggcccctcgggagaatctccagggtcttttcggcccagctggcgccgttcacgtacgccccccttgagggggaggtggccccaggacagctccgggcggaggaactggacagactgagggtgatgctctttggctgacgcggaaacgaggctctacggggtgatcggctttccggcgagacactcgctcagcccggtaatgcacaacgcagctttcagagccctcggaatcaacgcggtatacctggccttcgaagtccccccggaggagcttggggaggctattgggggcgccaaagccctcggaatatccggattgaacgtcacaatgccccacaaggaggcggtgattcatttcctcgactcactctccgaggattcgggagaaatcgggagcgttaacacggtcgttaacaggaaagggaggctggaaggccacacaaccgacggcttgggcgcgaggagggccctcgaaagggcatcgagctggggggaaggaggatactcatcatcggagcgggcggtgcggggaaggcaatagcctacgaactttccagggacaacgaggtggtcgtcctcaacagaacccccgaaaaggcgaaggccctggagcgctttggaataacgggggacgctctgaacagagagaaccttggggagtacctggaatgggccgaggttttgataaacgccacctccgtcggaatgaactcctgggaaactcctgttcccgccgagctgctgaggagagacctcgtcgtcatggacatagtttacaagcccctgaagacgcgcctcctcaccgaggccgagctgaggggctgtaaaacagttgacggtctctggatgctcgtctatcagggcatcgagagcttcaggctttggacgggatttaagccagatgaagggcttatgaggggggctgcgcttgagggcatcagcgagtagcgccgttaccgttgtcaacgccttcgcaacgggagtaggttcagctatcgggatagacctctggacgagggcggaggtcaagctaaagggtgatggaatagagggagagatcagggttagaggggagcaggttagggatttcagactcgttaaagcggtcgctgatgttttcagggagaaaacaggcgaggagttcggtatcaagttcaggatagagtcggagataccaattgcgatgggcctcaagagcagctccgcagcggctaacgccctctcaaaggccctggccgatgccctcgggcttgatatgagcgaaatggaagtggttaaagccggggtcgaggccgctaagagggctggcgttaccctaacaggggcctttgacgacgcctgcgcctcctacttcggttcgctctgggtcaccgacaacctcgggatgagggttctccacagttccaaagtcgagccccttcccgttgtgctcttactccctggaaaaaccctcctaacagagagtctaggcggaagggacttctccccaatcagaccttacgtggaggaggccgtgaggctggcccttgagggtgagtggaggaaagcggccctcataaacggtctggtttactcgacgtatctcggccaccccatcgagcccttcaggattgccctagagaggggggccgtggttgggctgagcgggaagggaccggcggtttttgccgtcacgaatgagccagaggagcttgccgaggagtgggagcagtttgggaaagtcctgacaacagagctgaggtgatcgcgttgataatcaggcccgttgatgaagtcaggggagaactcaacgcccctccctcgaagagctacactcacagggcctacttccttgccctgctggctgagggggagagcaccatagagaaccccctggtctgcgacgacacccttgcaactatagaagccatcagatccttcggtgctggtgttgatggaaaaaccgttgtgcccccagaagagccctcccccggctttgtctacgccagggaatccgggacaacggcgaggttttcgactgctctcgctgggggtattggggggaaaaccctcatagatggggcgagaaggctgagggagagaccgatggacgggctcgtgaaagccctgaagggccttggggcggaggttgatggttttagcctcccgcttaccgtgaagggccccgtaaagtccgggagggtctcggtcgacgcatccaagtcctcccagttcgtcagcggcctgctcctcctgggggcggaggtcgggctgaaggtcgaggccaggaaccccgtttcaaagccctacatcgagatgacgctcaggacgatggaggcctttggagtggaatttgagagggagggcttctccttcgaggtatatcctggagttaaggggacaaggtataaggttccgggagattactcaactgcctccttcttcctggcagctggggccctgtacggtaaagttagggtgaacaacctcctgagggaagatgtgcaggcggatatggccttcctggatgcgcttgaggagttcggggcgagggtgaagagggggagggattacgtgaaggtcgaggggggcgagcttaaagctgttgcactcgactgctccgattttccagattcgttccccatactggccgttgttgcggcctacgcagagggcaggagcgtgataagggcgagacagctaaggttcaaggagagcgacagggtgagggcgatggcggtcaacctgtcgaggatgggggttaaggtgagggagcttgaggacgggcttgagatagagggcggacggccgaggggagctaaggtagagaccttcaacgaccacaggatagccatggcgatgagcatagcggctctcggcgctactgggccatctatcatcgaggacacggagagcgtctccaagtcgcacccggggtttttcgacgacctgaggaggctcctggaatgagggggaaactgctgagcttttccctgtttggcgagagccacggaaaagctgttggagtccttgtagaggggctcccccctggaatagaggtcagcgttgaggagctcaagcgggagcttgagaggaggaagggcatagagaggtttgcaaccaagaggaaagaaactgacgagccgaagatcctttcaggagtcttcagggggaggacaactgggacacctgtcgccgtcatcgtggagaacagggacgtggattcctcgtactacgaggagataaggaacacgccgagaccggggcatgcggactatccagcggggataaagtacttcggatacaacgactacaggggcgggggccacttctcggggaggctgacggttggggtcgttatagcgggctacttcgccaagaagctcctggaaagggaaggaatcaaggtgagagcttacctcaagcggatagggcgcgtggaggctcatgtttctcccgaggagctgttgagctctgaaaacccctactgccccgacgagggggccttcgaggccatggttgaggagatggaaagggccagaaaggccggcgatagtgttggaggaattgttgaggccgtcgccttcaacgttcctccgggcctaggcgggccttgggaggaggacatcgaggcggatatagcctcggccctcttcaggatcccggccgtcaaaggcgttgagttcggcctgggcttcgggttagcggagctcagggggagccaggccaatgaccccttcgtcctgaaggacggaaaggttgtgaccgagaccaacaaccacggcggtgttctggggggcatgacgactggaatgccgctcgtggtgagggctgccttcaagccgacaccatccatctacctcccccagagaacggttgacctggggaggatggaggaagtcacgctcaagcttaggggacgcttcgattcctgcatagtcccaaaggccctcccagttgtggaaagctctgttgccttcgtaatagccgaccacctcctgaggaggagggcctgggaggggatggttaggtgaacctgtccaaaaggttaaatcttcgaacttcaagctcaaaacggtgacggtgatgtcccgccaatatcgagtcctgatcttgtagaacttgccattctgaggagaaggatagacgagattgaccgggaaattctccagcttctccagaggaggatggaagtagcaaaggccataggggaagccaagctaaagctcgaaatgccagtttacgacccggacagggagagagaagttctatccagggcaggcgaatttaggagggttttcgaagccatccttgaggtgagcagggatgttcaacgtttacgagtttttcaacaggataaatgaggttaggcctgagtcgaggctcgacgccggtcagccggacataccggtcaggagggagataatcgaggaggctgtagagtcgctcaggaggggagaaaccggttacacgagtaccggcggaataagggagctgagggagaggatagccgagttcgagggggtttcggccgatgaagtcatcgtcgccccaggtgcgaagatcctcatagcggcggagatagcgtctgctaaaaaagtggccgtcgtttctccccgctggaacgcctattcgctgatagcccgccagttctggagggaggtagaggttataaaaacgaccctggatgagaggtggattccgagggttgaggagataaaagctgacctcatcataatcaactaccccaacaacccgacggggagggttctgtctggtaaggagatcaggggactgctcgatgtcgccgaggagaacggtgttaaggtgctctcggacgaggtttacgctgagctcagcttcacccgctttacgccagcgagagagctctacgaaaacgtcgttacagttaagggcttttcaaagctctactccatgaccggcttcaggctcggctacgcaataggagagcggaacgagatcaggaggatacagaggttcatagagagcacggtaacatgtgtccctcccttcgttcagagggctggagtaaaggcactcgaactcagggatgaactcatcaaagaagtcaggagggcataccttgagagggtcaggatggcctcaaagatgctcaggggtttcgacttcgttgagccggagggagctttctacatcttcctcagaacgccccaggacgggatggccttcgccgagaggctgctctcaaggggagttgccgtttttccaggaatggcctttggcgactaccccaacttcataaggatatccctctcagggaaggggcttgagaggggattaagggtcattagggaggagttggaatgcgcattggaatcgcgggctacggaaggatgggaaggctcttcgagaggtgtctcggcggaaggttcgaggtgatcttctactccgaacacgggcggagcgacgttggatcgctggaggaactctacctgaagtcggacgtgataatggtagcctcatccctcgacactgtcccgaaaaggctggagaggctcgcggaaatatcgagggagcacggcgggaaaaagatcgtcttcgacatagccactttcaagtcccgcgttgttgaagcctacgcgggctttggcgaggaaacaagagttgcgagcgttcacccgatgttcgggcccggggcgaagaccatcgaggggaagaggttcataacggtccccattccaggaagggagaaggatgcggaggaagtcgccgactttatacgctccatcggggggaacgtgtccttcctcgactggaagacccacgacaggctcatgggcttcgtcataggcgtcccctacttcatcggattaagctacctctcgctctccagggagctcggactggaggagtttggcggaacctcctgggccttcctggagacctacggaaaggcggtgctccacgattctcccgatttcataagggaagtcctcagcatgtccagggagcagatagaggagttcctagacttcatgaggaaaaacccgccggacccggagagactcagggaaaaactggaatgggaagaaatagaagaggcctacgaaaggttctacagagctctggagtagcccgagagctccgccacctttctcctcagctcctccacggggttctcactgcgggatattagctctataagcgcgcttccaacgacaaccccgtcggctccagccttcaaaagctcctccacctgctccctcctcgaaacaccgaagccgactgccagcttgttgttgcatatctttctggcgcgcctcacgaactcgaaagccgtctcgggaagtctgtcgcgggctccagtggtcccgtacagggagataaggtagacgaagccggtagaggctttatctatctccctaagcctttcatcgggagtgtttggggctgcaagaaatactgtctttagcccctcttccttggccgcatcgaggaattcccctgcatggctcacaggaaggtcaaccacgaggatcccgtcggccccgctggccttagcctctccgaggaacttcttaacgcccgtcctgaaaaccgggttgtagtaggtcatcagaattactggggtagaggagtgcctcctgaactcgcggaggatcctgaaggtatcatcgagtttgaagccgttcctcagggcgcggtagtgggactcctggatcgtcttcccgtccgccatcgggtcgctgaaggggattccgagctctattagaccggcgaactcttcgaccgctagtaaaaactcaagggtcttttcgacactcgggtcgccggccgtgagatagggaatcagcgagcccttctcaaacattcccgaccctcctgactatatccaggtccttgtcgcccctcccagagaggttgactatgattatctcgtctttatccatctctggggctattttcatcgcgtaggctaccgcgtgggccgattcgagcgctggaagtattccctccgtcctggaaagctcgtggaaggctctcagagcctcctcgtcggtcaccgtgacgtactcggcccttccgctatccttgaggtaggcgtgctcgggaccaactcccgggtagtcgagccccgccgaaacgctgtgggtaggagttatctggccctcctcgttctggaggaagtagctgagcatgccgtggaaaacgccgagctcgccggcgttcagcgaggccgcgtggaggcccgtttcgaggccctttcccccggcttcgacgcctatgagcctgaccctatcgttcacgaaggggtagaagatgcccattgcgttgctcccgcccccgacacatgccactaccgcatccggtagcgtcccctcggcttcgagtatctgctccctggcctccctgcctattaccgactggaagtccctcacgatgaccgggtatgggtagggcccgacaaccgagcctattaggtagtgggagtactcgaaggtggcaacccagtcgcggagggcctcgtttatggcatccttcagggttcttgagccgctttcgacgggaataaccctcgcgccgagcagccccatgcggaagacgttcatcttctgcctctcgacgtcttcggcgcccatgtaaacgtctaccttcatcccgaggagcgcccccgccatggccgtggcgacgccgtgctggcccgccccggtctcggctatgagcctctccttgcccatgaacttggcgaggagggcctgccctatgccgttgttcgtcttgtgggccccgccgtggaggaggtcctccctcttgaggtatatcttcgcccctcccagctttttgctaagcctctccgcgtagtagaggggcgtcggccttcccgcccagttccgcaggtagtactcgagggtttcgttgaactcagggtcgtccttgaactttttgtaagccctttcaagcttcttcaaaggttctataagcgtctcggggacgaactggcccccaaaccttccgaagaacatatcatccattcctcaccaccgccatgaaggcctctatcaaaaccctgtccttgacgccgttcctctcaacgccgctcgaaacgtcgactccagctggtttaacccaccttatcgcttccccaacgttctccggggtcaaacctccggccaggactatcgggtactccttggctattatcgcgctcaccctgtagtcgtgcctcctcccgctccccacccctgtgtcgaggagtatcttgtcaacctcgtactgccctatgagctcgaggagcctttccgcatcttccgcggggtcgtcgctctcccttgggaccatgaaggccttcataacgctcaccccgtactcatccttcagcctgttgacggccttggggtgcatgtccgagtgcacctgtatgtactcggccccggtcttctctaccgcgttggcccactctgggaaggtcttcatggtggaaacgaggtagattgggatctctgccatctcaatcagctccgcggccgtcttcagcggcaccttcctcttcgaccttgagttcaccaccactcccgttgcatcggcgtacctctcgacaagcctgagctcatccattgtttttacgccgcatatcttaacgaactcaaccatttctgctcatctccacgaagtttttgatgatcctcaagccttctttcctctcccattcggtcagaacgctttcagggtggaactgaaggccctctatcgggagcttcctgtgccttatccccatgaccacgttatcgtcgagggaaacggcgctcacatcaaactcccttggaacctccagaacggcgagggagtggtaccttccagcggtcagcgggttcttgattcccctcaaaacgcccttcccgtcgtgcttcacggggctggccttcccgtgcctgggctttaccctccccaccttcccgccgaatgccgtcgctattatctggtggccgaggcagaccccgaggataggtacccccgcctcgaggactatctccggcgagtttcccacttccctcctctcgagcgggtgccccgggccgggggagattatcactccatcggggtcgagccttctgagctccccaacggttatagtgttcggaacgaccttcactctgtcgaagagggaggcgtactcggctaaattccagacgaaggagtccctgttgttgacgaggactatcattccctcacccccagcgccttcagaactgctctcattttgttctcggtctcgaagaactccttctctggaactgaatccgccactattcctgccccggccctaacgctcgctttcctgccctcgatctcggccatccttatcgctatcgccatgtcggcgtccccggtgagggagaagtaacccactgctcccccgtagacctttctcctgctcctctccagctcgtctatgatctccatcgcccttatcttcggggctccggttagtgttcccgccggaaaagccgcctccatggcgtcgaacgcgtttttcccctcatcgagttcaccgaccacctcgctctctatgtgctggacgtggctgtacttcaggacgtcgaagaagcgggttagcctaacgctcccgggctttgaaaccctcctgacgtcgtttctagcaaggtcaacgagcatgacgtgctcagctcgctctttctcgtcggagagtagggccttttccagctcccggtcttcctcccccgtccttcccctcggcgctgttcctgctatggggtttatcttgaaggttctcccctcgacggaacccatggtttcgggtgaggcccctacgacggtcttctcgaactccaggatgaaggtgtacggggaggggttgagctccacgagccgcttgtagatttcgagggcatcgagatccgttctaaccctgtactcgcgcgacagaaccacctggaagacgtcccccgagtagatgtactccttcccagccctgacgatttcaacgaactcttccatgcccgcgtcggtggatatgacctccgaaccgccgtcttcaagccgtgactcttccctcctggccctttcaactaaggcctcggggtcgaaaggagcctctctgaggtaaaagaaggaaagagcgccggtagagtggtcgtagatgaaggtccaggggtagtagccgaagaccgagggctcttcgatcttccccccgatgatggagtgtaccgaatcgtaggagacgtagccaacgaagccacccatgaacctcctgccctcgaccctctcccccatgagccctttaagagctctgagggggttcctctcgtcggaaactcgctccccgtcgatctcagtcccctcgccgacctccacgacgaactccggctcggccgatatgtaggtgaatctggccttcctggagtccttctcggcagagcggagcatgaatggcatcccaaagtctctaagggcgctgtagagcttcaaagggtcaacgggcttcagctttttgagaggcatgctatctcctccagtttttcaagcattccctggcccagggcttccctggccatctcaaggccctccctaaagtcctccgcaacccctgacgcgtagagagccgccgaagcgttgacgaggatgaagtccctgtcctcccgccttcccgaaccccctagaaccgcctttatcctcgcggcgctctcttccggggaggagcacggcaggggcttcacaggctcgattccgaagtcctcaggtgagagcgtgtacctctcaactccattgccaacctccaggacgagggtctctctgtgtggggacacctcatccatgcccgaaccgtggacaaccagggccctctcaaccccaaggaactccagggcctctgccacgggttccagaagctctggagagttgactccgactacctggtatgctggatccgctggattcgcaagcggcccgatgacgttgaagactgtctttatcccgagggcctttctcacgggcattattggtctgagtgccgggtgataggcgggagcgaagatgaacgtgaagttcgtgctttcgaccatctccctggccctctccggggaaacccgtatgtttaagccaagcgcctcaagtacgttggctgagccgctcttcgatgttatggaaacgtttccgtgtttagcgaccctcgtgaaggccgagagtatcaaagccgaggccgtgctgacgtttatggtcgagctgccgtctccccccgtcccggctgtatcggccaccttcccgaggtcgagcttgactgcgctgtccctcattgccctcgccagacccgcgagctcttcgccggtgtagcccttggtctggagtgcagccaggtaggcccctataagcactccatcgctccccttcagctcgttgaagagctcgtaggcctcctcaaagctcaggttctttccatcgacgatcttcgcaagaaggctcatacttccacctccacgagcttcctgagaaactcctcaggatccggggtcttcatgagcgcggtgcctatcagagcggcatccgcatgtcttaaagccctcttcaggtcttccgtgcccgctatgccgctctcgctgaccttcacgtatcttttcggtatgagcggcgccagcttttccgttaggctcacgttgccatcgtcgagctcaagcttccctatgtcgcggttgtttatccctatcatcgttgagtccgtctggagtgctatcgccagctcctcctcgctgtgcacctccacgagggtgtccaagccgtgctccttcgcgaagtccacgaactcgggcagttcctctttcagaagccgcgttatcaggagaaccgccgaagctcctgcttcagcagtcctttcgacttcctccttgctggctatgaagtccttccgcaaaactggcagttccgtttccctgcagagtttcctgaggaactcaaagcttcccctgaagtacttcgggtcggttatgtaagagattccaaccgctcctgccctttcgtaggccctaaggatctcaaaggggttcctgcccttcagaagatccccgtacttcggagaatagaccttcagctcggctattatggcgttcttttcggcttttctaatagccctgcttaatccaaaaaccatcacccatttgaactcaccggtgtcaaaagggggagttgggatataaggctttggacatgctgaggtgtccaagggagtagctaaaaagaccgagagggcgttaaggccctcgtttaacctcctccaaaaacatttttatcgcttcgttcgcattttccacgtcccttccgaccatcagaaagccgaagtccccgtattttttcctgtagttctcgatgaacagctcgtcccctgccgtgtcgccgatgtaaaccccctcctcaccccctacgaggcatcggaggagctcggggtcgggcttcaaaccgctttccctcgtcacaaccttcggaaacctgaagccgatgatcctctctgcaagctccatctccagtctgttcctccccgtcacaacgcccagcttgaacctctcccccgcctcccggaggagctcgacatctacgagcggcttttcaagcctccagaggccctcgaagtcaaagagcctgtcctcgtagagctctcccaggtagaaggtgttgaagaccctctcaacgtgacccgggtcaattccaagcgggaagtttctcctgaagtactcaaccccaactccctctggaatttgttcccagtcattcaggccggagaaaaccgccctcaccagggcctcgctgagcttaaagtcgtctccaaagactcccttcctcctcagctcccttaccagctcgatttcaacctccgagggctttccaagctcctccaggaggtactcgacggtaagcttcactgccatgtcgtagctttcacccacgtctatgagcgtcccgtcaacgtcaaagaccagccacatccttccactcctccatcgccttcaggaaggcgtcgttctccctcctccctatcgtgacccttatgtgtcccttcagcctccccgagagcttcctcacaactattcccctctccaggaggaaggagtgcgcgtccgccttaaccaggaggaagttggcgtcgctcggataggccagctctccgagcgatctcctcaccctctcgcgctccctcactatttccctaatcctctccctgaagagccctgggtgcctcagcacgactttaacgacagcctgggcgaagatgtccacgctgaagggcgactttatccggtagagtgcctcaattatctcctcgctagcgagggcgtagcctaccctcgctccagctaagctgaaggcctttgagaaggttctcaggaggacgaggttgggatactcatccaggaggccgaggaggtctttccccgcgaactcgacgtaggcctcgtcaaccacaacggccttccctgtctccaggactttgaggacctcctcaaccggctggaggttcccggtcgggttgttgggcgatgctatgaagacagccgacgcttttttcgccttctctgctatggtatctccatctatcgtgaagtcctctctcagaggcacctcaatcacaggaatcccgttcagcctggcgtagaaggagtacatcccgaaggtggggggagtggttacgatgtagtccccctcgaagaggcggacgagatagccgataagctcgtcgcctcccttcccaacggccacgttttcagccgggagcccgtagaactctcctatcgcttccctcgccggcatggaggttatgtgggggtagcggttgaagggaacgctcttcagctcttcaaatatctcctcctttagctcctcgggaaggtcgtaggggctctcgttcttgtccagccatatcctgtagttcccctctatgacgcggtagggcttgaaggcctttacctcattccttatcatttccgccgcctcctgagctcggccatgacctccccgagggaaacatcgttgtaggccaggagaacgaggaggtggtacagcatgtctgcagtttcgtagatcaaggcctccctgttttccgccacgagaacctcaactgcctcctccccgaacttcttgtatatcctctccctgccctccctgaagagcctcgacgtgtaagaaccctcgacggggctttccttcctcttccttatcagctcctcgagctccctgaggattgtgagcgagtaatccatcgggagaaccctctcgggctccccgagctttcggtaaaagcaggagtagttccccgtgtggcaggccgggcctttgggctcgaccttcaggagaagggcgtcgctgtcgcagtctacccttatctccctgacgacctggaggtttccgctcacctcccccttcatcctcacccttccctgggagcgggagtagtagtgggcgtagcccgtctcgagcgttctcctcagcgcttctctgtccatgtaggcgagggttagtacctccccctccgtgtcctggacaacaacgggaacgacccctccgttcttttcccagtcaaccttctctaccagctcctcgatgctcatgctcccacctcagtagtccagtctaactggaatccccctctcggccaggaaccccttaagctgaccgaccgtgtattctccgtagtggaatatcgaagcggctaatgccgcctccgctccagccttgaaggcctcgtagaagtgctccggccttccggctcccccggaggctatgacgggtatatcaacggcattcgccaccgcccgcgtcagcgggatgtcgaagccctccttcgtcccgtcggtgtccatgctcgtcaggagtatctctccggcccccagctcctccaccttcctggcccactcaaccgcgtcgattccccgcggtttcctccctccgtgggtgtagacctcccagaaggagccgttccacttggcgtctatggcaaccacgaggttcgcgctccctacgagctcggctatctcccccaccagctcgggcctctcgaccgctgcagtgttcacaaagaccttatcagctcctcgcttgattatctcccccgcttcctcggcgctcttgattccgccgccaacggtgaaggggacgtatatctcctcggcgaccctctcaacgaggtctaagaggatccccctcttctcgtgcgatgccgttatgtcaaggaagactatctcgtctatcccctcgctctcgtacctccttgccagctcaacgggatcgcccgcatcccggatgttcctgaactttatccccttgaccacccttcccgcccttatgtccagggccgctattatcctcttcgcaagcatttggccacctccaggaggtcttccagcttaacaactccctcataaagggccttccccacaataaccccagaaaagcccctctcggcaagcctaacgatgtcctcagcgctggaaactccaccagcgtatatgaactcctcgtccccccagaagcgccctatctcgtcaactccagtcagagtaccgtccctttcgatggaagtgtacacaaagcggttcacgtagttcctgaggatctcgaaggcatctctcacttttatcgagccctcctcgacccagcccttcaccgctatccttccgtctttgacgtccagacttacggttatcccgccgaactcatcggtgagcctttcgaggaaagccgtatcgagggccttcgtgccgagtatgacgttctccacgccgacctcgtaagccctccccacggcttcgtaggttctgaagcctcccccgacctgaaccctcaggccggtctcctcgattatcctctccaccacttcgaggttcctaggccgcccctcgaacgccccgtcgaggtcaacgacgtggatcttgtccacgagctccgaaaagccctgggcgatcttcactggatctccatagaccttaacgctctccctcctccccctgtagagcctcacggcccttcctttcatcaggtctatagcaggataaacctccatctcacagcctcctgaagttctccaaaagcctcagcccgttcctcccgctcttctcggggtggaactggacggcgtaaacgttgtccctgcagacggccgaggtgaagaccaccttggcccccttcgactcgtagtccgtcactcccaccgttacgtcctcctcggggagagcatagtaggagtggacgaagtagaagtaggcaccgtcctttatgccctcgaagagcgggcactccttcctctgccacacctggttccagccgatgtggggcaccctaacgccctggaagcgcacgacatttcccctgaagacccccagaccaggctttccggggctctcctcgctcccctcgaagagaagctggaggccgaggcagatacccagcaggggctttccgtcgtttatcgcatcgattataactcccctgagcggttccagcttttccatcaccgccccgaagttcccgacccccgggaggactatcttctcggccccctctatcgcgtaggggtcgctcgtgatcacccctccgagggccttcctcacgttggcgaggttccctatcccgaggtcaactacggctatcattccaggacccccttggtgctctccagcctttcgctctccgctatagcctgggcgagggctattcctagccctttgaaggcggcctctattatgtggtgcgcgtttactcccccaagctgtttgacgtgtatcgttgccctgagcgagcgcgccagcccccagaggaactccctgacgagtgttacgctgaatccctcctcttcctccagcgggaagagctcaaggttcaggtagggcctcccagagatgtcaagggcaaccagaatgagcgcgtcgtccatcggcattacagcgctcccgaagcgggcgaacttccctgggagcttctccctcagctccagccccagggttatccccacgtcctcccagaggtggtgcctgaggtcgtagttcgctttaacccgggcattccttcccatgtagtggaagagggccatcaggaggtgattcaggactggatcgcccgtctctacggttccctcgacgtcaagctcaacctctatatcggtctccttcgtagtcctcctcatggcagggccctccggatagattcttcaatcagatagtcccaaccatttccgccagcgcttgcgaggcaagggctgctcttcatctcctcacctccaggctcctcctgtgggcttccattccctctatctcagccagcctcatcccgagccttctgtaggccaaaaactcctccctgctcaccctcgcgagggttatgggcttcatgaagtccatcaccgtcagaaccccgctgaacctggccgctcctcctgttgggaggacgtggttaacgccgaggaagtagtcggctgctgggacgggagtgtaggggccgaggtagatggctccagcgttctcgatgaggtcaacgagctcctcagggttttcggttattatctcaaggtgctcgggggctatctcgttggccttctcggcgcattcctccaggttcctgcataggagaacctctatcccctcccttgagcagtaatctgcgagctccctggaggtggtcaggagccatgccttactgtccttcccgtgctcgagctgactgaggagatcggcgagcacgtaatccttatctgcactctcatcggctatcacggctatctcagaaggccctgcgaggctgtctattccaacaatgccgaacacctgcctcttggcctcgttgacgaacctgttcccgggcccgaatatcttgtcaaccctcctcatgccaaccccgtaggccatcgccgctattgcccccaccccgccgagcttgtagacctcctcgatcccgagcagttttgccacgtagagaacgtaggggttcaccttcccgtctttgggcggcgtcgtgactgctatctccctgaccccggctattctggctggaatcccgaccatcatgagcgtcgacgggagcggctttcccccgggaacgtatatccctatcctccctatcgggcgatatataaggccgtagagagagcccctcttgatgtagagctctacatccctgaactgcctcgcgtggtactcccagaggcgctccatcgtctcctcgattaccctcttgtcctcctctggcacgagttcctctgcctcctcgaactccccctccgaaaccctgaacgggcccgagtagttgtcgaacctttccgagtactccctcagggcctcaaggccccttctcctgatgtcctccaggatttccctaacgtattcttcaagccccttcatccaaaacccccctaagcttcatcacaagctcgtttatctcatcgaacagaaccttctgcgctatcctgttgacgagaaggagcgcggaaacgtccataaccttggcaacctcgacgaggccgttctccctcagcgtctggccggtctcgacgatgtcaactatggcatcggctatccccgtcctgacggagagctcaacgctcccgtggagcttcataacctcaacgtcaacgccaatcgagtcgaaataagagcttgctatccgtgggtatttcgtggctatcctgaagcagtccatgtcctcaggataccttttcctctccccgggaacggccacgcttatcctgcactttccgaagggcagttccaggggaatgaaaacgtcgctccccctctccaaaaccacgtcgctgccagctatccccacctcaaccccgtgttcgacgtaaacgggaacgtcgaaggccctcgcgaggagaaccctaccatcggccgaaacaagctccctcccgttcgggagctccagctcaactccagctttcctcaggaactctatgctgggctttaggagccttcctttcgggagaacgaacctcatggcctcacctccacgggaatgcccattttcacgagctccctggccctcctgtagacttccccaggctctcccgtgagcacctgcctcttcctttcccgccccctgtagagcttcaagagggctcctaagtcgagggcaaagcctatggcctttttattccccaccaggtactccccgccgccgccaaggggcttcccgagcctcggagaatagacctcaaagatgacgtctgtgtagtaggggagcggcctcacggtcccgaagtccaggaaaaccctctcatcgccgaggagctccgctatcgcgtcgagcttttcgacgcccgacctcttccccctgaagttgaagagtctccacaaagcccttttcctgcccgcggatatcggcagggattctatgatcccgaagtttctggttaaaagggccctcctgacttcttccctgaagggttcaatgcccctcgttgcctcctcccagaccttaacgctcccaacgtctatgtagaagtcctcgattccgagtgattcgagggcagttatcagaacgctcgggacctcaacgtacatatccggctctctgccgccgatcagctccactccagcctcccagaccccgtggatttctccatcgagaacctcgcttatgtagtagatcctcgcttccccgttgttgaaatcccttattatcctggacgtggcgtctgggcatatcacgtaaaactcgttgttgtgggcgaacttcgttcccttccttattgactcagagtactcctctactgcgggaaacactatttcgcggtagttccagaggtcgaagacccctctgagccggttcccaatctcggctagcctcaaatagtcccggagtgtgtacctcaagaagaacaccccccgaaaaagtctgcactaacctttaggccagggacatcttcagaagagatgatggcagtaagtcaccttgaaaagcagtgatgcgcccatagataaaacccgggatttaatgcttctctctaccatggtactcaccggggccgggtgatggtgaaagtatataaacctgtcgccaggaaaggctgtccacaaaagcaaaaatccaggcgttagattctctcctcaagctccttcaaaacctccatctgctcctgtgtttcaaccgctccaggtctctttctcctgacttccatgagggcctcgcggagagaaagacccctcgagtacatgagccacgcaacccccaccgttccgctccttcccaggccgcccatgcagtggattagaactttcttgccttctctaactcgctcttcgatccaccggaggatttcgaggagctgctcaacgcttggagccgtgaagtctggaatggggccgtgaaggacttctacgcctctcttttcccactcgtcgagggaataggggagctcgtaatcttcaacgaggacaaccactgcgtcaaagtctctagccacttcgtcgagctccctctccgccggcatccgcgaaaatgccactctcccatcaatgaacttcgcggagggccacatcctctcacctcccgaggacttctctgattatcttagcagctgcgaaggccgttacgttgctcacgtcatagcgcgggttgagctctaccacgtcgaaggccacaacctcggcgtcaatgctttttatgagctcaatgagctccctcgtgctgaggcctccaggctccgggtttccaacgccgggggcaaacgccgggtcgaggacgtcgaggtcgaaggagaggtaggccctctcgaagggaacctccacctcggcccccttccacacttccgaggcggagtaaatcagtatgccttctctctcagcgaagtcaagctgttcaggagttggggcccttatccccacctgaacaacgttttcgcccctaacccagccctcctccacgaggcgcctcacggggcaggcgtgggagtaggggtcgccctcataatggggatagaggtcggggtgggcgtcgaagtatatcagcccaaactctttcccgctcgcctccctgagggccctgaaggtggcgtaggttatggagtggtcgccgccgaggaagagaaacctctcaccactgtagttctcccccacgagcttcctcaccctctcaagaacctccgcgaaggatttcccctccacgtcgccaaggtctctgtaccgccatctctccgcaaggttgacgagattctctgtgtagctgttgtatagctcgcttgatgttgcctcccttatggcctttgggccgtccctcgcgccctttctgtaggaggaagagccgtcccagcggattccaaggagcaggaggttcgggtttttggattctggaattccgaagagcattcaccacaccctcgtcccgaccggtacctcttccggaaccggcaggaggtagaccttaccgtcctcggtttccgcaactatgagcatcccctgactctcaacaccgctcaactttttcggcttgaggttgaggacgaaaacgaacttcttaccctcgagctcctccggggagtactggtcggctatgcccgttattaccgtcctctcctcgcccccaaagtccacatcgagctttatgagcttcctcgtacgcttcagcttctcggccctcttaaccagcccgacgcggaggtcgaacttccagaactcatcaacgtcgtagagctccatgggaaccaccgaaaaaagttggagtgggggtattttagggttgcccctcccagaggaggagctcctctcccctgctctcaccgattagcgtcccgtctccatcaaagacccatgcaccgccgggcggaaagctgttcacgatgaaagtcttaacccctaggagtccgacgcgctccgacatggccgcgatgtcctcttcgtttggttctccgtattcgggcgaatactccatgggcacgaagagaaaatctggccttttcctcctcacccacttggctatgcgcctgttgtagaggtcgccgcagatgataatggcaaccttcccgaactccgttctggcagtcctaaccgtgttgcccgtgcagaacttgtaaggttcctggaacttgcggtgcttgaggaggacttcgccgttccgcccgatgagtaaggcggaattgtaaacgcagttcttgtatggctcaagcaggccaaagacgacgtagacgttgtttttcctcgccagctcgctcacccttgcggttatctcgtcgtagagctctgcaccgctgaagtcccattccctgaagccagtcagacagtactcgggaaaaacgatgaagtcgggtctgtgctctaaggcctcattaaagcgccttttgaactccctccagttggccccgaagtttccgtcctcaacctgcatcgggattagtgctaccctcattcttcaccctcctgatgagtgaaagcgcgcccagaaccgctaccaaagtgaaaagcctgacatcccacttttcggcttttttcatgacgaggtacaccacaacaaggccaaagaggtaggaaatcaccatagagagcttcctgtgccctctcctctcgacaacgtagaggatggcaagataaacgaccaccaggccaaagtagaggtatccgatgaagtaggcaggaacaaaggcgaggattatcatgattaccacgaggagggtgaggattccactgttgaagctgttctttcccattatgaccacacaattactaccgcccacaaaaaccttaaaacttttatctttaaaaacggttagctaaacgggaggacttcaaatgaagaggtattccttcggctttgagacagttccagtcgctctggtggatgacctgctcatcgggagcgtccacgacggaaggaactataaaatcctgctggccagagttatgggcgaagaaatcctcgaaactcacttcttgagtggaaaaaacgactgggaggggcattcgatagcgaggatagagggaggctacatgatagggggtgccgccgaggggaaagcaacgtccgacggcggtgttgggtggaaggcctacgttgcgaggctcgatgaggatttaaacgtcctctgggagaggaagattgagataaggggcaacgaggctacctactccatccttcccgcgggggattcaattttcatagccggcgacacgggacggcccaggaacatgggctttttctctggaaagttctcgatggagggcgagctggagtggctgaaggactttggcaactgggaggaggttgtcacggcatcccttctctccagagaaaggccgaggctcatcgggagcgttaaagaggagcgctggaaagtcgtcgcctttgactttgattccgacgggaactttctggatagggcaacaataacggaagaaggaatagcgctcaccgctgccctctggaacgacaaacttatcctcgccggctacaaggaaaatgacctctgggtctggagcaaggagtgggaagtaacccttccaaacggcgccgccacctcaccccttccgcttggagatggccttctcgtcggaggagaggtcgaaggaacggcctccgttatggagctcagcccaaacggggaagtcctctggaaaaagtccctctgggagcgcggctgggtggaggttctgggcaaagacctcgctgcgggtgtgaaagaggaggacgggaagactgttatgatggttgaatcgataggcgaatggtgaaaacaaagttgcatgctttaaaacgtttggagggattaagtatggatttaatcaagaagtttaagctcctgatggccctgatgagcactggcttcctcggtaacttgctcgtcatctacttcctctccaaggggttcagctacgcccagataggccttgagacctcggtgatggttcttggtggctttctcttcgaggttccaactggggtcgtcggcgacaaaataagcaggaagctgagcgtcctcctcggctttaccatccatgcatttggaagtgttgttctcctcttccttcacaacttccccatgcttctcctatatgcgctcatatccgccctgggcgcctccttcgtcagtggaagctttgaggcgtggctcttcgacgacctgaagcacatagggagggagagggaatacagaaaggttatgcgcgaagctaaaagcataacgattcctctctctgcgacaaccctcgttgtgggggcttttctggcgcagttctacggcttcaccctgcccatcgtcctgggcctcatagttgagcttttggcggtagtcctcatcctctcgatcccggagtacgagttcaagaaaacggagagaaattacctaggtcacactctctcttcactaagggagctcttccagccgaggctcttctggctggttttgctatctataatcgttggcatgcaaaccaatcagttcaggaagttcttcgagccctaccttggaggggtactggccaaaagcctcgggacaacactcatgggcactttaggacttctcggtgtcgtcgaggtcacagtcaggacggttccaaggctcatcggcgtccgcctccgcgactcctggagcaggaaagcctactccctcgccccagttctcctcccactgttaacggttctctccgtggtttacaccaaccctctctggatagtcgcccttggaatagccctcaccatcataacggcggctttcggcttcaacctgaacgtggagttccagcacaggataccgagcgagaagagggcaaccatcctttccctcgacaggatgctcgccggattggtgatggcggttttctatgccgtctacggctttgctgtggacaagctgggtctgtctggggccagactgatgttcgcaatagctctgctggtgctcggtgccggcttcaaggctggagaagttctgggattcctgggagagcatctaaagctgcaccacctggaggaaagcggagactagctcacatcttttccccgttcaacatcgaaagccagacacaaactcatacatctagaaagccttctgaagtggccaactattgggcgatcgataccattaactcccgtgatggctgcaaagtctcaactcacaacctctcaacaaccatcaaaaacgcctcccgtagatcgccgtggctctccgcccggccaacggtaacgcccttgactattttcacccccttccatcttgcgaattcccttattctcttcctcaggtcgttaatgtcgaagtccccaacgatgacgcgccctccttcttcgagcacttcgagggccctctcaagaaacggctccggctcaaagtcgtgcagaacgtacgagaacacgacggagtcgaacttttcatcaaggcccatttccaaaaagtttccctgaacgaacttggcatttttcgtaactctatcccccaagcggttgcagaactcgattacctcctctttcctatcaacgccaacgaccatctcaaccccgttttttaaggccatcttgaacgttagaactccagtcccgcagccgacgtcgagaaccttccccttaacttcatcggttatcatctccatgagcctctttctgatctccagctcttctctataggagggatatctggctagtaagctgccgacgagccagtagaaatcttcctcgccccctcccgattcccgaaacgttctgagggcctcttcatagtagagctttagaatgttcatcttgaaccacctagtaagctgaaatcagtgtcaaactaacgccccttctccaccgttccatcccacatctccaaaataactttgcatgaaaactttttaaaaactcttttgcgttgtaaccgtggggatggctatgaggcccatcatccttaagggggagaaagtcgccttaggtgtgattatcaaggaggacgttcagaaaatatgggaatggaataacgacagagaggtcgccaaaagtctcgccgatccatccgatgtttcaacgcttgaagagtggatgaggtggtacgagaatctgacggctaaaaagctaaccaagagggcctttgcagtacttaatgatgatggcgaacttgttgggacagttatcttgagcgggatagacctcaggaacggaacggcagagataggttatttcatcggaaaagaacactgggggaaaggctacgcgagtgaggccgtaaagctggccttgagattttgctttcaatacatgaacctgcgcaaggtctttgcgagaacctatgagaacaacgccgcctcaataaaggttcttgagaagaacggattcaagctgacgggaaaattaaggaaacatgcgtggacgccggaggggtacgttgatgtattgttctatgacataatgagggaagagtggcaggccttggctgaagcgatgggaaatacgtggacgagctgttttacgagttaattcgagaagagtggaagagaagcccaaagctctaaaacctgaagcgggataagtcctatcaggtgaaccacaatggaacccatcatccgcgaggctaaacccgaggataaacccttcatcgaggagatagcgcgccttacttggggcggggaggattaccttgcgcgcgttttcgacgagtgggtcagagacgggaacttctacgtccttgagctcgaaggaaaggtaatcgggacggcgaagctcaccctcctgcccaagagagtcggctggatggaagggttaagggtacaccctgactaccgcggcaggggctttggaagaatgctccacaacttcatagtctcaaaaggaaaggagctggcagaggaaggcaagatagacgcccttgagttcgcgacctacttcctcaacagggagagcatagcaatggccaagaagaatggattcaagattgtgaagcgctactacattatggggaaagctgtagaagaaattaaaccttcaaagccatccgacagcacaatagcctctttagaagagcttgaatacgagaaatatattcctgtaggatggaagttcgttcataaagtcccggaagctttagaatggctcaaagagaaagctattatcaaagaatgcaatggagccaagttcatgatgcccaaagactctgagagtgcttttgtaccgtttcgcctttcaaagtcatatgtagaacaactactcccctgcatggcacaagaagctttgaacgcgaatcaaaaatacattgaaattatggtgcccgaagaaaggaaggaattgcttgaacccctaaaagagcttggctttgaggtctgggataaccccaaagagcccaatgtactggtgttcaggaggcgctttgaataaaagttacacaaagataatggcctaattcactccctccatttcatgttttttgctaccagtgcaaagaaagcaagtgtgtatattgctgccccggttgcatagagtgaagcactggagtttgatagtccaaagacaatcctcataagttcagcgatgtatgtcgttggaatcaataaagccagcttttggaatatggccggtaatctgctcagtggataataaacgggaggaattaaaaccaaagtcattgagagcaagcttgatagcgcatcaacgtggacaacatttttgatgtttgtcgatatcgtgaaagccagcagagaggataaaagccatgaaaatattataattccaactacaaaagccaaattcgagaatgttaaaacccccaaataagctaagactcccatgaagattaacagcgatggcaaagcacccaaaagccgtgaaagagccaagccaagcatgtattctacagggctcacgggggaggcaacaaaaatatcctgaaagcctataaacttgagtaagaccactaatcgggacaggcttatactcgttgatactgtcaaagcaaccagagcaccgaccaaagcgtataatgctaaatcctttccaccaaagatgaacaggatcaaaaccattgctatcggcgttaaaatttgtggaacaatccagagggggcttcttaaaagtcccgtaatgtttagataggctattgaaattatagctctagctttcattccgctctccctccaaaaaagctataaaaacatcttccaaatccgttggctgaattgaataggagtttaattttcgcaaaatttcatgtatttcatcaaattcgttgaagtatagaattttcttgtccccaaactttatggcccctttaatctgcacatcgtctgtgaaaattagcttgtgcttgtaagtctccccttttagttcctcaggattccccttggctattattcgtcctctgttgattattgcaactgttttggccagactttctgcttctaaaccgacgttcgttgtcacaaagaagaatgtttcttccctaagctctgaaatcagcctccaagtttcacgctttgagagtggatccaatcctaaagtgggttcatcgaggaagatgagctcagcacttgttgcaactgtcaaagctaagagaactctcctctttagtcctccagacaggctgagacatggtttatctttatattcccacagattaagttcttttaaaacactctccgtcctcctctttgcctcggaaaagctttctccccttgaaaccaagtaccaatagaccatttcccatggcgtggcttcgtttaggggtcttgcctcttggggtagaattgctatcctttttctaatttcattagcttctttgatgacgtcaaaacctaaaacataagcttttccacttgtcggcttcagctgtgtggagagtatcctgaccaaagtcgtctttccagcaccattgggacccatcaagcagaatatgttgtccttttccaaaacctctaggttaactcgattaagagcaacggtcgaatcatagcggtgaaacaggttctcaagaactatcaacagaaacacctcccccaaactaaccctgattcagagaagtattgagcgtaatttccatagctgagtggaaagggctaaatggcatgttttaataatactaacctgcagttataactctttctgagaaccataagtgagatgcaggtatgagaatcaaaccccttcgaaacggaaacatagatgcaagcatgcatcgagatagcgaaaggccttccggagtggttcatcgaacgcgaccttaggaaggaggagacttacctgactgctgaaaacggaaacgttctaggctccataacggtaaagcccaccaacgagaaggccctcgaaatcctctggatggccgtaaagagggaacaccggaggaagatattggctccaccctcctgaagttcgtcgagagcctggcaagagagtggggctttgaagtcctcgtcgccaagacttctggcgacctccctaccggccctacgatgagacgaggcggttttacgagaagaaaggcttcgtgagtgttgccctcatagacccttaccccgagtggggcgaggaggcccttgagtgggtgagaaggaaggccgaggtttacgagatagccggcttcaagttcctggttgagaaaggaagggccacgttcacgccgctctccttcgggcttggttgtataaaggcaatgcttccagctatggcgtgggtcgcgaaggatagggacgaagcctttgacctcatgctccctgcgagcatgagggaagttttacccggcctcaagcggctcggtctgtccctatgggacgagaccgacgagccgaacgtgctggtgttcagaaaagaccttacttagtctctttcttttctaaaaatcatccctttccagtcaacctcaacgaaaaattcctccgtgagagcatccacaacctcttctggtaggccttccttcttcaaagcctttctaaaggccctccttcccctgcggacaatcctaactaaccccgcaatttggaatagagaccttggaatatgtaaaaagagaagcttaaggagagagctgactaagctcactcctccttctcctcctcttcctcgatctctatttccctgaccttcttgtggccgagggggatgttaacgctcacgttgccgcccttgcttgccatcatgtttgcgaaggtctcagtcagggtcttgacgacgtttatgctggccatgtactccttcgtcagctcaagagcagcctccttgtccattcccgcctcgacgaggttcttgtagaaatcggcgacgctcttccccattgccgccatcttctcagggttatatagctccttgaggagctcctttataggctctattatgtcctccattatgggaccgatcttgtccatcagaattgctgctttctcgatgtccttgtcgccctcgacggcctctatgaggtcttcgagcatctccaccttcctttggagggcttcgagctcctccggtgtcttggcgttcctcatctcctcaacgatctcgtcaatcaacctctcaatcttctccgcgttcaccataccaatcacctcaataatcattagcgtgctcaaacctaatcggcattccgatcagctctaaccacttcctgaccacatcgcgggagagggtatatatcctgcctctgttgtcctcggaggacacctctctaacgacgcccagctcctccagctcctcaagctttgccctgactgtgttccgcgaggcctttccacgcctccccttgagctcccgcgctatttggctcacgtttgccctcctcaggtcgaagagaatcttcacaatctccctcgctatcgggtcatgctttatctctggaataacaacgtctatgctaagcccgccgtattccgcgtagaggttgaggagccggaggtaggactgggccatctgggagactatctcgaagctcttcctcagcgtttcaagggcctccctgagctcctggacttccctggctaggtcttcgtcgggcatgttcgttagttgggtgctcaaccatttaggggttgtggtcaggggtgagcaggttggagtgcttttccaccgccaccacccagacgtacctgttcaccctctcggcctcccaatatacccccagcctttcaaaaatcgcccccaagtggtcgagggtcgcgaagtactcttccagaacctcttccagtatgccgtcctcctcgcctatgcgccttttctcgtcttccgactcaaacatgacgtcggctatgattaggatccctcccggtctcagcacgcggagcatttcccttatcgcttcccccttctcctcgtcaggaacgtggtggaaggcgtaggtgctcaccactgtatccgcgctcccctccggaagagggatttcgagaaagtggccgtcaatgggctcaaagccccacttctcgcgaaaagccttccgcatcccctccgagggctcgacgccgatgtagcgctcacagcggaggaagcggaggatgttgcccgtgccacagcccacatcaacgaccactcccttagccctctccgcgacaagccgaaggactctctcataatcgctgtgtatccagccgtcgctcataacgtcctcgtcatagctctccgcccacgagtcaaagtcccacctttcttccatccatggcaccatcgttactcccgccgaaaattatttaaagttttttcactcaaagcacgacactttaggccttcggagggttctttatgcgctggagcgaaattcccagggaagccaaggcctatatgatctaccacaccctcatagccccgggactaataacgtggactctcttcccgctctaccttatgatgacgggctactccatccttgaggtcggggtgttcttcacgatagtgaacatcgcctcgatcccgctcacctacctcttcggcaggctcttcaaccgctgggatatcaaaaagggcctcatagtgatagacatcctcgatggaatagcctacgtcatgtacggcctcgccaagggagcgatagcgccgctgatgctcttcggcggcaaggtgatcgacaagctttccactctgttataccctctctaccaggcctacgagcagataatctaccctgaggacaaatacgaggagatattcgcctggcatctaagattgcccgagatagctactttggtgagctttccgataatgggctacctcctcggatatgtgtacaataggccggagcactaccgcctgaccttcctcttcttcggcctcttctcggttgtaactgtcgcttacctctggctcttcctgccccctgtgggcaaggaggagaggataaccccggaggggttcacgttcaaagcgggtgagtttaagcgcctccttgcatttgaaacgctattaacgctggcgtgggggctagctcctgagttcgtcctcataaactacgtcgtcttcgttcttcacaagacggtcttcgagataacgctgatagcggttgcgagcagtcttcttagaatagcaggcacatacgccagcgagagggttccaaagaataagggcttccacgcgatagctttgggaatgttcctaaacgccctctacgccttcgtgatggcccttgccccacctttctggctcgccctggtcgtttacgccatcggagacttcggcaacgcgctctggttcccgttctaccgctcgtggctcttcaagctcattccaaaggagaggacaacagagttccatgcggccctttcgagctaccggaaagttcttggactcataactccgatcacagccggtttccttgcgagcattcaccccacgctgccctacggtgcaagccttgctggattcatagtggctggattgttcctcctgtggatcgcaaagaagagaggaagaccttaagttttgcttcattccacttttttcagctcggctttcagcagttttacgtaccgctcgaatccctcttcatcaacgatgtggaattcaaaggggtgataatcgggcaggcctgcgagctcttcgatcctcgcctcaagttcagccctctcgcggaggctttttgggactttttgaacctttatcatcagatcaacgtcactcccagcggtgaacttcccggtcaggacgctgccaaagacgtagagctcgcacttaccaaagacttcctcgcaagccctctttatcgctggaaggtagcgcttgtagttctttatcattaggtacctcttcctcccgcgctcgatcattgcctcaatggctcttcctttcgaactcatccgctagaccctccacgaagtccctaacttccctcacgaactccataagctcctccgcgtcctcgcggtagtagcgccgcggctcatacctcgcccctatgtatgcatcctcaagctctctgagaaggctccggtgcgaccttatgaagtcagctaccttctcttccgcttcaagggctttcccaagggccgccagaagctcccttaccgagtgagttctgagtctcacgtcagcgtatttaatcagaagggctttgaggtaaaactgaatcgcttgttctgtcagaaaaatcgcggcgtcgtacttctcttcatcaaaagcagaatcagcaagctccatgtagtcctctgatctttgaaggagaacctcaacttcttcgtagtgcatcgtcccaccgaagttagtttgagtaccagaaattaatacctttcgattgagagtcaaagctggggatgcaagtccctcagcacacccagggcttgagcatcagtgccgatgtggttaaaaaccacgtgaagacaaccagagcgagctcgtgaaggcgtttttcgtagtagtcttgctgaaggagatacgacaggtcggttgcgagggagaggaagtagagcatcgttacaaagcctccagcataaagagtcttgcagaggccgaccgggacgaggaggagaccgaaaagcaagtggctcttcgcgtgctctctcagggcttcgtagcgctcaaggaggagatagccgaggaggagaggggctatcaaaatggctagggcgagaatccaggtggaggtaacgcagtaaaacttaacgcaggggatcccgccaaccctttgggtagtcaggtagaggtcagcgaccttcctgtggattccgagggatgcctcaacaagaaagacgaaaaaggaatacgccactaataagactggctttactccaatcttaatcatcttctcggcacacccgtcctaacggtgtagtgctcaagcgttgcccccctctccacgaactcgtgtggccagattttgacgttgtacatcctcacgttgtcctctatgacggcgttgtcgccgattacggagtttacgattctcacgttgttcccaatctcgacgtggcgacctattatggagttcactatcctaacgttgtctccgagcttcaccctgtccatgacaacggagtggaggatctcgcagttcctcccaacgatcgtgtagttgtctataacagcgtcctcaagtgcagtcccctttccgatgctgatgtgcctgcccaggagcaccttaccctccacgatgagcttcccagtctttatcatctcccggaacttcctccggaggtcttcggacatctccgatttgccctgcatgtaaacgtcgtgggttatttcaacggcctccatatcctcgggtgaaaggtgacggagcaggtacatggcggcgttgagatacctctcaggcgtacctacgtcaaaccagtagccctccatcggatagccgtaaacctcgtagccgtgctctatgagggcagggattatgtcacctccaaagtccagcctccgagtttccttcatctcctttgcccatccctcgttgaggaactcccagaagttctcagagaggatgtaaatccctgtgttggcgaggttgctgggtgcctgctccggccttggcttctcgacgaagtattcaatccggtagtcatcgtctatctttgccacaccaaagcctgtgacgtcttcaaccggctggagggcaatcgtcatgaaggcgtttttcttcctgtgccacttgtacatgtcctggatgttgagctggtagatgttgtcgccctggataactaccacaggttcttttatcccgtagtactccattgtgtaccagacagcgtcgccgttggtggtgctctcatagcgcggcatgtagcggattctaatttctttttcaaggccatatttcttctgcagccagtagccctctcgaaagtagtcaaagagcgtcgtgtagttcacatagcccctaaccccaaggtagacctcctcaattccgtccttcgcgagactgagaatggagtgctccagaatgggcttgttcaaaagcctgaccaagcccttagaagtctctatcgtgagagggcggagcctcgtggcgtctccacctatggggatgacggctttctttatcatggtggcccaccgtttaactttgtcacaagtaaataaaaaagtatcccctccgaagggaaaatggcagtgattaaggcaaaatcagaaaacaaaataaagagagaactagagtgagaactggtgagagtgatggttccgctcgagtatctgctcaggttcatcgaggaagacgcgccctttggagacgtcacaagtgaggccgtgattcctgaagatatgaaggcaagggcagtcatcatagcaaagcagaatggtgtcatagccggcgtggaagaggccaaagcgcttttcgaacactttggggtcaaagtagaggttaaaaaacgggacggagagttagttgggaagagagacgttatactcgagcttgagggcaacgcgagggcgattctcctggtggagaggaccgccctgaacgtaatggggaggatgagcggaattgcaactgaggtcaggaagctcgtggagaaagtcaagagcgtgaaccccaaagtcagagtcgccgggacgagaaagaccctcctcaaacccatagacaagcgtgcactcctcattggaggcggagagactcatcgcttctctctcagcgacgcgatactcataaaggacaaccaccttgccttagttccccttgaagaggctataaaacgcgccaaggagttctccgtctacaaggttgtcgaggttgaggtcgagagccttgaagatgccctgaaagcagcgagagcaggggccgatgtggtaatgctcgacaacatgaagcctgctgaaatagcggaggttatcgaagccctcaagcgcgaaggcctgagggagaaggtcaaaatagaagtttccggtgggataacccccgagaacataactgaatacgcgaagctcgacgttgacgtcatcagccttgggtatctcacgcactcggtcaagaactttgatgtaagccttgagataattggcaggctttgatgaactttttcgctcttcgccaatactttttaaacatctttcgacatcactcaccgttcgttaagggaagacttatattatagagtttagaattctcataaccgaggtgtgggatatgggaaagctggacgttattcaggctaagggtaccgagaggctgaagaggggattcgccaagatggtgaagggcggcgtcataatggacgtcaccaacgccgagcaggcgagaattgccgaagaggcaggagccgtttccgtcatggccctccaccgcgttcccgctgacatcaggaaggccggcggtgtcgccaggatggctcctatcgagaagatacaggagattatggacgcggtaaccattccggtgatggcgaaggtcaggattggccacgtcgccgaggcgaagatactcgaggcccttggcgtggacatgatagacgagagcgaggttcttactccctcagacccgttcttccacatagacaagcgcgagttcacagtacccttcgtctgcggtgcgagaaacctcggtgaggccgtcaggagaatatgggaaggcgccgctatgatcagaaccaagggcgaggccggaaccggaaacatagttgaagccgtcaggcacgtccgcctcgtggctgagggcatcaggcagatccaggccatgaccgacgatcaggtctacgccgttgctgaaaagttcgcggaaccctacctcaggctctcgctcaacgtcaaggagatagctggacttccgcagagagtcctcgacaacgagccgatctacggccactacacctaccgcgagatcgttgacgggctctacaagatactccttgagataaagaagcttggaaggcttccggttgtcaacttcgcggcaggaggtgtcgcaacccccgccgatgccgcgttgatgatgcagatgggaatggacggtgtcttcgtcggctctggaatcttcaagagctccaacccgccgaagatggcgaaggctatcgttgaagccgtcaaccactgggacgagcctgacgttctcgtcgagatcagcaaggagataggcgaaccaatgcgcggccaggacatcgaggagcttgaggtaagacttgaggagaggggcgtctgagcctttttctttcactcttttggggtggtagtatggtcaaggtaggtgtcattggccttcagggagacgtggaggagcatatctgggctgctaggagagcccttgaaaacctcggcgtctctggagatgttatctggctaaagaagccggagcagcttgagaacatctcggccatcataatccctggaggagagagcaccacaatctcaagactcatggtgaagaacggcctcttcgaacctgtaaagaagctcggcgaggaaggtcttcccatcatgggcacctgtgcaggtctgataatgctctcaaaggaggttatcggcgctaccccggagcagaagttcctcgaacttctcgacgtgaaggttaacaggaacgcctacggcaggcaggtggacagcttcgaggccccaataaagctcgccttcagcggcgaaccattcccgggtgtcttcattcgcgccccgagaatagtggagctcctcagcgagagggtgaagccgatagcctggcttggggacagggtcgttggagttgagcaggacaacatcatcggccttgagttccacccagagctgaccgacgacacgagggtgcacgagtacttcttgaggaaggcagtttgatttcgctttttagatcgttcacttaatttttgaaggccatcatttactgcatagcttttaaacaaagatctcatcccccgaacagtttacaagaagagtttccaaaaattacgtgcactctttttaaacaactatttaaccaaataagaaaatctattaaagacaacagctcaaataagatactgatgaataaaagtgaagcccaaaatagagacgctgttggtgtttttcctcgttggaatcgttgtggcagcaggatgtatttcttcgaacactacccagccttctaccgaaactggtactaccagcaccacggaacttgggagggattccaactccacaacaaatacggcgagctacgcaacagcaaaccacaccgcagatataactgtcgagattaatccaaatctggagctgttctcggtcgtgtacattctcgctttcaatggaagcgatcctttcataatggcccccaaggagtacatacaggatgttttaacttattttggcccgtacaatgacagtgtagtcgttggatatgttcgtgatgtatttggcccgtcactcccgtattacactagggactattcaataatgaaatttggcaacaaattggcgaagttagaataccttgggaacataaccaacgatagtgtgttggcagtagatttgaggctcttatcagagtttgccagagagagcaacttcagtgcattttatcgggcacatctgaaagaatattcaaaggcgacttccaatatctcagcatacataaactgtgcaatccctatatactggcgttttttcggaaagtggtacaccaagttcaggattgaagcttcgtactcagtatggatacacccccacgccagttgggagaatgaaaccagttattacatcggatggatctcgcataatacgactccccgcagactttacggtcaggttcgcaggatgttccatgagtttgcacatcccttcgtgggggagttcctggatgaaaacttccagctttttgagggcatggactactacttagacgaaatcaaaaaagaactgccagcgttgaccacctacgatacaccccattacggttccttctctaggtatcttaatgagttattaaccgaaagcatagcaaagtacgcggctctaaagtgtggcatacccaaagactacatgacttactcaacgttgctgatgtcaatgtatttccctccactatccaaactcctcgaagagtacgatgttgtgtggaagaccaacagcactttgcctcagtacgcacccacattggccgaacacatgagaacgtgggcgactccaaccaacataagcaccctctactgggagctctctccagtaacatgggaccatgagtggaacactgccttccattacggtcgggtggttatagtccccggatcgagtgaacaagaaagagaagccgctaaaaccattaaggatgccctcgaggactcttacaatgaggagtttggccaagcaccatcaatagagataaaagcctacgatgagctgactcccgaggataccaaggccaacttgatcctcattggaacgccgcagacaaacgacctagtgaaagagctcaacgacggacttccggtgaagttcgttttcaatggatcgtggattctccagagagacagcgcatcagtgaaagagtttttctcgtttgaaattacaaaccagtccgtgaagcagttgccactggagtatccaacaccctccccctggggagttatagagaccataagaaacccctggaacgacaggacttacatcacagtattagctgggacaaacgaatccttaataatgcaggcattttggcgggggtttccaagctatgtcctggttggggacaactactttgaggttgggttctacatacaaggaggatagcacagcgaagctttctcaattttttagtcgtgaaattaattagcaattctttttcaatttttaccaaaaaactttttagttttgactttttcttgccaaacaggtggtagcgtgaagaaggtcgtctgtccttactgcggctttggctgcaaacttctcattgatcccgccacacttaaagtaaagccatacaagggcgagccaaacaaaggaaagctctgtcccaagggcttatattctactgagatcgtcaaatccagagacagactcaaaagaccgctcaagcgcgtcggctcaaaaatagttccaataagctgggggcaggcgatggaggagatatcgaataagcttttggaggtaagggaactttacggccccgatgcggttgcctttctggcgtcttccaaggtctccaacgaggagaactacctgctccagaagatagcgcgcctcttcggcacgaacaacatagacaactgtgcaaggctgtgccacgaggcctccgttcatgccctcaagctggccgttggtacgggggcgcagaccaacccctacgaggacataccgaagttcaaatccgtcctgatctggggatacaacccagccgagacccacccagtcgtcatggactatattctgagagcaaagaagagcggtgccaagattatagtcgttgacgtgagggaaacgaggacgatggccttcgctgaccataggctcataataaggcccgggactgacatagtcctagccaacgctctcgctcatgtcataatcgaggaggagctctacaacgaggagttcatccggagcaggacaactggcttctctgaggtaagaatggcggtcaaaaagtacactccagagtacgccgagagggcaactggagttcctgcagaaaagatcaaggaagtggcgagggatttctccctggccggaagcggggcagagatgtgggggatggggttaacccagcacgtttcaggtgtagagaacgtgctcgcgctcataaacctcgcactgcttctcggttacatcggcgagaggggaggcctctacccgatgcgcggccagaacaacgtgcagggggccgcttatatgggcgctctgagcgagtttttacccggctacgtcccgctcactgacgggaagttcaggaagagagttgcagggctctggggcgttgatgacctcccgacggagaggggcctctacctcaccgagctgtgggatgcgatagagaagggcgacgttagggcactctacatcgtcggcgagaacccggctgtcagcgaggccgacttcatgagggttagaagggccttaaggaatcttgacttactcgtcgtccaggacatcttccccacgaggacggcccgctatgcccactatctccttccagcttcggccttctgtgagaaagctggaagctacatgaacagcgagaggagaattcaatggagcgagaaagtctgcgagccagcatacgactcaaagcccgactgggagatactgacgatgctcggaaaggcactcggtctgcctggctttaactacacctcagttgaggaaataaccgccgagtacttcaggttattcccggagcttgaggagaagagcgtagaggagctgaagaactcggacggaatcttcctgccgaagaagaggcttcacacctgggagtttgcaacgccggatggaaaagcccgcttcatggcagttgagtggatacctccctgggagggcccagacgataagtacccctttgtcctcacgacggtcaggcttataggtcactacaacaccggggagatgacgctgaggagcccgtcacttgtcagactcatgggcgagccaaaagcactgataagccgtgaagatgctgagagactcgggatacagaacggggactgggtagaggtggagacgaggcgcgggaagatcagaatgacggcggagattggggacgtgccccaaggagttatcgccgtccccttccacttcaaggccaacaagctgacgagccatgcgctaaacaaggccggaacgccagaatttaagttcgcggcggctagggttaggaaagtctaatcgccccgtcgccgacatatttttagggctcaaaaacaactggatatggtgggaagatgggagaagtcaccgttgtcattccctcagacctctcgcgaatcctcagagtcgatgagaaacagctaccaaagcttgtcaggatatacctcgccgttgaactctatcgggagggcgtagttagccttggaaaggcggcagagattgctggggtcaccaaagcagagatgatggaaattctggcctccaagggcgttcctttgaactacactgaggaagatctccaggaggacatagaaaccctggagaggttactatgatagttgtatccgactccggaccgctaatagcccttgcaaagattgaaaaactggaacttctacgagagctgtttggtgagattgtcatcccccgagccgtatgggcagaggtagtagagaagggcagaggccgtcctggctcccgggaagtgagcgaagcagaatggataaaggttcaggacgtaaacgacaggttgagcgttgaaatcctcatgaaggagatcgagattggagaggccgaggccatagtgctcgccagggagctgaacgcggatttgctggttctcgatgagaggatcccgaggatcatagcgaagtccctcggaataaaggttgcgggaaccctggcgctgcttttcatcgccaaagaaaggggcctcctaaaagaagacctcgaacccctgttgcttgagctcaggaccaaaggagtccgcttcagcgataaggttgttgaagctttgaggaagcggttcattaaaacctgaaggcccactcagggtactcccctgtgaggcacgccaggcataggtctttcttgccaacagccctgataaggccctcaacgcttaaatatgccaggctgtcagcacctatcgctcccctcaccttctcaacgctcccgaaggcagctataagttcgtgcctcgtcgggatgtctatacccatgtagcaggggtgccttataggcggcgacgctattctcacgtgcacttccttcgctcccgctttcctcagaagggagactagtctcctcatggtcgtccccctgactatggaatcatcaacgagaacgactctctttccgttgatgacctccctcacgggcgagagcttgagctttaccttaagctccctgtagaactggccgggggttatgaaagtcctcccgatgtagcggttctttatcagcccctccgagtagggtatcccgctttccatcgaaaagcccaacgctgctgccctcccagagtcgggaaccgctatcacaacatctgcatcggcgggactctccctagcaagttcccttcccatcttcaccctcgcatgatagacgttcacgccgtctattgtgctgtctggccgggcgaagtagatgtactcgaagacgcagtggtggtgcttctccctcgccagaactctactctccacactcccttccgagagtagaaagacctcacccggccgaacgtcccttatttccccgccctcagtctcgtcaacgaaaagcctcaaagccgaatcctcgctcgcaaagtagtggccgtctccaatcccatagctcaggggcctgaaccctacggaatctctcgctacgaggattttgccgtcgaagagcagagcaaccgaataagcgcccttaacctcgttaaagacttctctcatggcctcaaactcgtcgccggtctcattcaggtgccagagaaacgaaatcccaagaagttcagaatcaacggagtggtgaaacctaacccccctattctcataactctttctcagagggagaaagttcgtgagggtgccgttgtgggcaactgctatcctctttccacagcactccgtttcaagaggctgagtctcgctgagagagccggatgtggagtagcggacgtgaccgatcgcgaggttggagcgaagggatgagagggttttcccattgaaaacgtcctggataagccccctgccagcgacggttcttatcctgtgcttccatacacttattccggcgctctcctggccgcggtgctggagggctatcagggcgtagtatgctttcttcggcgcgttctctgagagtgctgcaaagaccccgcacttttcgcgcattgctctcaccgggcaccttcttgaaaggggtttttgatttaaacatgctaatttaaacgtttcatgcgatagtcttttgcagattcaagtttaaaaactttgcccagtgattgacattctaatggcaaaaaaattcttaaaaagaacaaagtttttacataaaaatggtgattagcgtggacgtctacgaaggaaaggccaagaaaataatccctctcgatgacggtaaggtcattatggagttcaaggacgatgcgaccgcttttaatggcgagaagaaggcccaattcagaggaaagggctggctcaacgcccagataagcgcccatcttttcagggttcttgaggcgagcggcataaagacacacttcattggggttgccggagacaacaggctcatagtcgagaggctgaagatgtatccccttgaggttgtggtgcggaacgtcgttgctggaagtctaaagaagcgcctcccgcttgaggagggcactgaactcccagagccgataatagagttttattacaagaacgatgaccttggggaccccatgataaaccagtaccacgccagagtcctgggtgtgggtgagagcgaacttaaagagatggaaaaaattgcccttcaggtgaacgatgtcctgagaaagtacttcgcggagagggggataatcctggttgacttcaagctggagttcggaaagaacacgaggggcgaaatagtcctcggcgacgagataagccccgacacctgccgcttctgggatgccgaaaccaaggagagcctcgacaaggacgtcttccgcttcggcaagggcgatctcatctccgcctacgagaggctctatgagaggatcacaggcgaagctcccgttcgtaggtaatcatgacggtgtagcagcccttatcgtcctcttttatttctatgcctttcagggcagtgccgtactcctcaacggccgttttaacaacgtccggaagctcctcaaggaatgccttcttcctaaccgtcagctccatgatatcaccgaagaaaaaagaggaatgagacgttaaagttttatcccataattctcgacccttattccaggctctcccacaacctttccgagctcgaagctctcgaagtgtctgtttaggagctggagggcctcttccttctcctcccgcgggacaacggcaaccatcccgacgcccatgttgaaaacgcggaacatctcctcaagagggacgccgttctcatagattagcctgaagattccctcaataggcggcatctcaatggagaagccgaaggaagtaaggcgcttgaggttgagaaggccccctcctgttatgtgtgccaagccgtgcaccttaacgttctcgataagctcaaggacggccttgacgtaaatcctcgtaggttcgaggagccactcccagagctttttcccctcgtactcgtagtcgagaccgtacttggggatgaggagctttctagcaagagtaagaccgttggagtgtattcccgagctctttattccaatcacagcatcccccggcctgattttcttcccggtaatcaccttcctcttctcaacgactccgatggccgttccagccagatcaaagccgttgattagatcaggcatcacagcggtctcgcctccgacgatagctattccagcctgccttgccccctcgtataggccctgcgctatcccctcgaacactctttcatccggctctttaacggcaagatagtcaaccaaagcgaccggctcggccccaacgcagagcaggtcgtttacgttcatcgctatcatgtctattcctatcgtgtcgaacttcccgacggcctcagccaccaaaaccttcgtcccaactccgtccgtagtaatggcaagatagaagtcaccaaagtccattaaggccgcgtagtggccgaggtcttcggccggctctccgagcttaccccttctgaactcgaaagtccccttggcaagagagattatgcttttcaaggccctcgaagtcttttcatcatcgactcccgcctgagcgtaggtcagcatgagcaccaccggggagagttggagaaacggcttaaaaagtttgccattttcatgactaaaaaggcttaaatatcttaagtttttaacatttaaacgttaaaacaaggggtggtgctcatgataaggccccgcgatgaacttggaactgccacgactgattccgctcagaagatagtcctcctcgggagcggagagctcgggaaggagatagcgatcgaggcccaaaggctgggagttgaggtcatcgccgttgaccgctacgccaacgccccagctatgcagattgcccaccgctcctacgtgggagacatgaggaaagcagactttctcttttcagtcgtcgagagggagaaaccggatgcgataattccagagatcgaggctataaatctagatgccctcttcgagcttgagaaagacggctacttcgtagttccgaacgccaaagcaacgtggatagcaatgcaccgcgagaggacgagggagaccctggcaagggaagcgaaggttccaacttccagatacacttatgcctcaactctcgacgagctctacgaggcctgtgaaaagataggctacccctgccacaccaaggccataatgagctcctcggggaagggctcctacttcgtcaaaggccctgaggacgtcccgaaagcctgggaggaggccaagaagaaagccaggggaagtgccgagaaactcatcgtggaggagcacatagacttcgatgtggagattacggagttagctgtgaggcactacgacgaaaacggtgaggtagtaactactttccccaagcccgttggccactatcagattgacggcgactaccactcgagctggcagccagccgagataagcgaaagggccgagagggaagtttacaggatagcgaagcgcataacggacgttctcggcggactgggcatctttggcgtcgagatgttcgtgaaaggcgataaggtatgggcaaacgaggtctccccgaggccccacgacaccggcatggtgactctggcatctcaccccactggattttcggagtttggacttcaccttagggcagttctcggactcccgattccaggcgagtgggtagacggttacaggctcttccctatgcttactccagcggccactcacgtcataaaggccaacgtttccggttattcaccgcgctttagggggctggcaaaggctctcagcgtcccgaacgccacagtgaggctcttcggcaagcccgaggcctaccctggaaggaggctcggcgttgcaatagcgtgggacaaagacgtgggagaggcaaagaggaaggccgaaatggtggcccactcgatagagctgaggacgagatcagctaactggcactcccaggactacgagaagagaaagcacttactctgacgcctgttttgattcttcaattttcttccgcttcgaactgttgaatgttattacaaagttatgaacacctatggcaaaaattaagtgatgtgggcattccttagatacggttctggccattaacaaaatgagcatatatgctgattagtccaatgatttggacaatatccgaaaaatttaaatagtccggagaatagcactacacgctggtaagttacgtgggtgtactaaaatcagcagggttaagtaaaggggatgtaaccaggaatcaagttcgaataagagagtggaatgggagaggaaggtaaaattgagaatggggatcctcccccactcttaattcttctttgtttttgccgattaaaaggctcgagataaaaattcaaaatcctaatcagtcctcttcatctcaatgccattccgggtgaatgagtactcgaatgatataacatcagacacccccggggccttgagtatgcacatatagcgctttaccccctcttcggtgagctcgctcctcgttctcacaacgtaatcgaccctcctgtaaagggacgagaacacacgatcgggctttccagaaaagacccatatgttagtgcccgttgggtattctctgtaggccctgtggcgtctcctaatctcagcagagacctcgaagtagctcagggcgttggcttccccgaaaatatttgaatactccgaaaggtccatagccactccccatagctccctgccctcaaacatgttctccttcttccagagctccttgtgtgccctgacgacctcagcgtatttcctggacagaagctcataggagagggaacctgaaaggtaccagacaccgcgcctctctatcctcgggccgtaaagacttccaaaggtatccactattgctaggttgagcgaatcaaggtactcatcaacattaatgcccctctttttcatgatctcaatgaggattggaagagcatggctgatgttgaagaaccctaccaggttatcgttctcaagcttattcttcatgaactcaaagactagctcacggccgagggagcgagggtcttcctcgtgaagcagtatgtatgagtgctccttaaccccaccaagggcctcgtctagaggctttatcccgagtttaatcatgttcatcaccctcaaaaggatcgaaaacctcgggttcaagtcccttcgttacgtatgcctttctcttaaacatctctctcgtaacctcgaccacaatatcggagaacgtgtagataaagtcctctatctcggggcagtctgtactgtcatagaccagtatggccctaatgtctgggattttactcgtcacttcagtttttgtactccataccaactggtaggtcttcctggggttcttgaagagcttgcaggtcccagaactcaaatacgtaaagagccagatacggctggccgatattttctcggatagagttcttacaaaatcactgtacttggtgacaaaaacaccgtcgtcaaggtacccgctcagctgataaacgtgggggagattccgatctatccccttaaagctcccgaagacatcaaaaactacaaacttctccccaagcacatcttccagagaaatccctactctttccaggttagacctgaaaacgaggagtggctcgtagagaaccacaaagacaggctcttcacgccttataagctctttgagaagccttaccccaataacgtccccgttggaatcgggccccctcgcaataactgtgagtactccgttttcaggaacagaatcaaccaaccttgaaagccccataggtgtcccctctccagtagttaggagcaacttctattaaacagttttttgccaattaaatgtaaaaataaagcttaaaaacctcaattttttacacaaaaatggtgaaactcatgcgcgttctgctcgtgggtgcaggtgggagagaaaacgcgatcgctgaagtccttgccagagatgctgagctttacgttgtggcaggccacaaaaaccccggaatcgcgaggctcgcaaaggactacgccctcgcgaaggaaaccgacgtcccgagagtcctcgactttgccctcaagtggggagtagatatggccttcatcggtccggaggcgccccttgagaagggcatcgtcaacgttctggaagagaacggggttccaacggtaggacccacaagggaagcggccatgctcgagaccaacaaggccttcgcgaggtggctgatggaagagtacaagattcccggaaggaagctcttcaaggtcttcgacgacgtttcagagatgaaatcctggatcgacgactttggaaggccagttgtcgtcaagccccttggcctcacgggtggaaagggtgtcaaggtcgtcggctaccagctgaaggacaacgaggaggctaaagcctacgccgaggagctgataaagagggacggaaaagtcctcatcgaggagcgcaccgacggcgtggagtttaccttccaggtcttcaccgacgggaagagagtcgtcccaatgcccctcgcacaggactacccccacgcatacgagggcgacgtaggaccgataacagggggtatgggttcttactcctgcgaagaccaccgactaccgtttataactaaagaagactacgagaaagctcttgagacactcaaagccactgtggaagccatgaggaagaacggaaccccctacaagggcatcctctacggccagttcatgctcgccaaggacgagccgaagataatagagttcaacgcccgcttcggcgatccagaggcaatgaacgtcctgccgattctgaagcgttctctcgttgagatcggcgaggaaatagtggacggcaacctgaagggagcagaatttgagcggaaggcaacggttgtgaagtacatcgctccaaaaggctacccaaccaacccggtaaggggaataaagcttcacgtggatgaggccaaaattagggaggaaggggctagagtctactacgcttccctcgacgagaacttcaggatgctcggctcaagggctttggccgttgttggaattgctgactcgctggaggaggccgagagaatagcctcagctggaataaggcacgtaaggggggaaattttctacaggaaggacgtggggacgagggagagcatagcaaggagaatagagcttgttagggctatgaggggtgagtgaaatgatcgaacggaagcaaattcttgaggttcttgaagggtatgagaaggataagataaaggtgggcgtcatcgggagccactcggcccttgacatagccgatggcgccaaggccgaaggttttaagacaatcgtggttgcccagagggggcggcacaggacttatgcggagtactttaaggagaagaagacgagagacggcctgactaagggcttcattgatgatgtaatcgttcttgagaagttcggtcagataatcgaggttcaggaagagctgaggaagaggaacgttatcttcgttccgaaccgctcctttgttgtctacactggcattgacagggttgagaacgagttccttgtgcctctcttcgggagcagaaaccttctgagaagcgaggagaggagcgaggagaagagttactactggctccttgagaaggcagggctgccttacccagaacccgttaagccggaagaaatcgacgaggtaggcctcgtcatagtcaagctcccccacgcaaagaagaggcttgagaggggcttcttcacggccgcttcctacagggagttcagggagaagtcagagcgcttaatgaagcttggcgtcatcacagaggaagatctcgccaaggctagaatagagcgctacataatcggcccggtcttcaacttcgacttcttctactcgccgctcgatgaggagatagagctcctcggaatagactggcgcttcgagacgagccttgacggccacgttaggcttccagcgagccagcagctcacacttccagagtggcagttcgagcccgaatataccgtcacaggtcatgcatcctcaactctccgtgagtcccttctggagaaggtattcgacatggccgagaagtacgtcgaggcaacaaagagatactatccacccggaataatcgggccgttcacgctccagaccgctgtggacaaggatctgaacttctacatctacgatgtggcaccaagaactgggggaggaactaacatccacatggcgatgggacatccctacggcaacgccctctggcggaaggagatgagcacgggaagaagggttgcgctcgaaatcaagagggcaattgagctggacgagcttgagaaggtcgttacgtgaggtgatgaggatgaagtggaaggttaaggtcatcgtaaggctcaaggaaggtctcaacgacccagagggaagggtcataggaaacgccctgaagaacctcgggttcagcgtggagaacctgcgcgttcccaagtacttcgagttcgagcttgagagcgaaaggccggaggaagaggtcgaggagatgtgcaggaagctactcgccaatcccctcatccacgagtgggagtacagcatagagccggtgagctgacatggtcaagtttgccgtcgttgtctttccgggaacgaactgcgacttcgagactgagagagctatacggaaggctggggcggaagctgagcgagtgtggtacaagacctcgcttaaggactttgacggcgtcgtccttcccgggggcttcagctacgccgactacctaagggcaggggctatagcagctcgtcaggagataattgaggaagtgaaggagttcgcccgagatgggaagcccgtcctcgggatatgtaacggctttcaggttctgactgaggccggccttttacccggggcgttgaggccgaacaaagttccgaggttcatctgcaggtgggtgcacctcagggtcgccgataccgaaaccccatttacccagttctacgaacccggagaggtcatcaggatgccgatagcccacgccgagggcaactactacgctgacgacccctcaaaggtcagaatcgccttccagtacagcgacgaggaaggcaacatcacggaggaagcgaacccgaacggctcgctcctcaacatagcggcgatagcaaacgagaatggcaacgtcctcggaacgatgcctcacccagagagggcgagcgaccgctttttgggcagtgaggacgggctgaagctgttcaggagcatggtggagtgggcgaggaagtaacttctcaaattctccttctttgcactctttgccaaaaacctttttagtgtagtgttcccttcactaaaggggattataaatgttcgtccgctcgctttccgctgggggcagcgtgaatgaaattgggaacaaggcccaccgtctttcgatcctcgcaaggtacttcaacgtccccactggcttcgtggtgaccacgagggcttacgacctctggaaagaggaaggaaagctcccccaagaagtcgtggaagaagtgaaggactacttcacctctccctacctcctcgaaggagagtttccagtagtcgtgcgcagttccgcgacagtcgaggatagctccaaggcaagctttgcaggggttttcgagagcgttacggggataaactccttcaacgacttaatcgaaggaatagagagggtctttaagagcgccagttcgaagagagttaggacttacatggagcggatgggcctaagtggacagtcgaggatggcggcgatagtccagagggagataacacccgagttcgctggtgtgctctttacacgctcgtccacagaaccggaaaaagctttagtcgagttcgtaagaggaagcggcgaggagcttgtgggtggtagaaaaagcgctgagcgggttttgcttccaagaaacccggaagaggttaatgacgagcttatgagggagcttctcaccgtgggtcttgaagttgagtccctcttcggaaggccgcaggatatagagtgggcctacgacgggacgctctggatactccagtcgagggacataacggtgctcgggcaaaacagagaagcaggagatataaaaaccgagaactggtacgctctaaagggcatcccggcgagccctggagtggcgagaggtagggcgcggtttgtgctggacgaccagcccccagaagaggccgagatgatttttggggaaggcgaggttctcgttacctacgttctccacgccgagcactacaacctcttcgcgaaggccgcaggaatagtgacgaaggtggatagcattctctcccacccggcgataatagcgagggagctcggaattccctgcgtggtcggggttgacgttgaagcgataagggacggcgatgaggtaatcgtcgacggaaataaaggtgctgtttacgtcaggaacccaaagagggtgctaaagggtgttgaactctggaaatcaagctaccgcgaggatgaaaccgtgagggagctaaaagaggagtacctgaaggccctggaaaaactctcgtcggaggaactggagaacgtcattgtgggggctttttcactcgttagagagcattatctaatggacagagaaaaggccttcaacgtctactacttcataaactggcttatggaggaggaaacgccgaggcttttagctaagcgcttcgatgttatagacatcttttcgcgcgcggataggggagaaaagccaagaaccaatgaggaggagaggctcttcgaaatctaccggctcctcaaggcattcataaactacacggacgagagggttagggacattccaaggttgctgttcggagtctaaggcagggttggagcgtgtggtgctgattatggaagttccaagcctaaactccaaaaaagacctccttacgcggaagaacttcccctatctgcttatcaaccagctaatctcaagaatcgccgaatacctcttcttcatcggcgtagtcttctacatttacaaccagtcttccacagcggacacttcgggggtgttcattgcaaaaacactggcgcttttactactctcgccagtagttggagtgatcgtggacagacacggcagaaaaaaggttatggtaacctcaacccttctcaaagcggttttcgtgctgtctctcgccgcggtttttaactcctccatcagcatctatcttctcctgtatctgtactttgtcaccttcctgctcgatgcctgttcgctgttttttggaactgcccgctccgcaataatcccctcaatagtcaaaactgaccagcttaaaacagccaattcgctgttgacattagccgatgacctgatagatactctgggccccacgctcgcttccctcatgatccttgcgattggtagggaacgcacgcccctcttagcggccataatctttgggatctcggtgatactcctaaagaagcttgatgtggttgaagagccgtcctccgacatggaggacagctttctggaggaggttaaattaggcctggcattcgttaaaacgtccaggcctgtgctaactcttcttttaatctccgggggcttatgataggcgggggaataataaacgtgcttttggttccctactcggcgggcttgtcagcttcggccgaggtcggctacggcgtcctgctcacggccctcggtgcgggattcttcataggaagttttctgatgagcctccttggggacaggttctctgatgagacgacgttcatcgctggcctctttatgacggcactcgccccaataatgtggagccaggtgggttatctgtccctggcggcagcgataggagtctttaacggcgccgctaacagcgttctcaacatttccctacagacgctgttccaaaagacggttccctctgatcttttagggagggtcttgtcctttgagtactttctgacttcggcattctcccttgtttcaatggcagggggaggagtgctcgcagacaaaatgggggtcagtttcgtgctcctcacggcaggcatcatggaattggccatagcggtctctgcattctggcttgtagcctattttaaacgtgatttaagagtttagaagcaaacgtgtattgacattttttcgtcaaaataaaccttaaaaactcaaaatttttacatttttctgataataaaggaggtgtcacgatgttcccccacgaggagaagctcatccgggagaggctcgggagggagccgaacgaagtggaaaaggccatgctcgaagtaatgtggagcgagcacgcctcgtacaagtctagcaggccgttccttaagctccttccaacggagaacgagcacgtggttctgggcccgggagaggatgctggaatagtgaagttcgacgatgaaacctggatagcggttggaatcgagagccacaaccacccttcagccgttgagccctacggcggtgccgccacgggtgtcggcggaattgtcagggatatactctgtatgggcgcccgtccgatagccctcctcgacccgatacgcttcgggccgcttgagaaggagcgcaaccgctacctcctccagggcgtcgtgaagggcatagcggactacggcaacaggataggagttccgacggttggcggcgagacagagttcgacgagagcctggataactacacgctcgtgaatgttgcctgcgttgggataatgaggccggagcacttcgtccacagctacgttgaggaagccgggttaaagctcgtcctcgtcggtaacaggaccggcagggacggaatccacggcgtgaccttcgcaagcgaggaactgagcgagaacgcggaggaggaagaccgctcggcggtccaaattcccgaccccttcaccgagaagcttctaattgaagccacgcttgaggccgtctacacagggaaagttagagcgctcaaagacctcggcggcggcggacttacctgcgcttcctcggagatggccgggaagaagggcttcggtgccgttatctacgccgaccgcgtccccctaagggagccaaacatgacaccgacggaggtaatgatatccgagagccaggaaaggatgctctttgcagtcagggaagaggacgttgaagaaatcgggaaaattttcgagaagtacggcctcgaatggacggtcgttggagagattataaaagaaccgcgctacatcgtttactggaagggcgagaaggttgctgacctcccaatagatctccttacggaagttccaacgatcgagtgggagacgaggccctacagcctcgaaagggacgttgagacacccaagataagcttttctgacgccttcgagctcgtctggagcagtccgaacgttctgaacaagcgctgggtatgggagcagtacgaccacgaggttcagggcaggacagtggtaaagccaggaagagatgctgcagtgctcaagataaacgagcgctacgggctggccttcgtggccgacggtaatcctaaccacagccacctcaacccctaccacggagcgatgggggctgttgctgaagtcgtgagaaacctcgtcagtgtgggtgccgagcccttagccctggtggacaacctcaacttcgcctccccagagagacccgaggtctactggagctttgcggagacagtcaggggactggcggatgctgcaagagccttcggtttagcgtacgtgagcggaaacgtcagcttctacaacgaggtcgttgacaggcccataaagccgactccagtcgttgctggcctcggaaaggtggagcttgagaaaatacctggctttggcctcgaagaggggctccttataggcgtcgttgggagcactaagagggagctcggaggaagtgagctatacgtgaggctcggtctgaaaggcggaatcgctccgcgcgtgaaccttgaggaggaaaaggcgaacgccgagggaatccttgaggcgatcagaaggggactcttgaaggccgtccacgacgttagcaagggcggaatagcggtggccctggcggagatggcagttttgggcaacacgggcttcaccgctgacctctcgaaggtgcccgccgagacttctaacccgcttgaggttgccttcagcgagagccacggccgctacatcgtagtcttccccgaggaaagacttgaggagcttaaggcgctcttcaggcacttcgcagtaatcggcagagcaggaggaagcggtgccgtcttcctctggaatggagatgagctcctgaggaagccgatcaccaagctgagggaagttcacgagtcctttccgaagctcctgggtgaggaggaatgagggtagcgacctatgcttcccactctgccctccagattttgaaaggggcaaaagacgaggggttcgagacggttgccttcggcccttccagggttaagccgctctacaccaagtactttccagttgcggatcatttcatagagggtgcatatccggaagaggagctgctcgagttcgaggccgtagttgttccaactggttcgttcgttgcccacctcggcgtagaacttgttgagaagatgaaggttccttactacggcaacaaagccgtgttaaggtgggagagcgaccgctccctcgaaaggaagtggctggagaaagctaagctgaggctcccgaggatttacgaagacccagacgacatagacgggcccgtcatcgtaaaaccatttggcgctggagggggaagggggtacttcctggccagctcccccgaggacttctggaaaaaggccgagaggctaggtgttcgtagtaaagaagacctttcgagagtccagatacaggagtacgtggtgggcgttccagtttaccctcactacttctactcgaagctcaacggcgagcttgagctgatgagcgttgacaggcgctatgagtccaacgcggacgcgatagggcgaattccagcgagggagcagattgatcttggaatcagcaccgactacaccgtcgtcgggaacattccgatcgttctaagggaaagcctgctaatggacgtcatcgaggctggagaacgagtggtgaaagctgcggaggagctcatgggtggcctctggggcccgttctgcctggagggtgtctttactcctgacatggagttcgtggtcttcgagatatccgcgagaatagtggctggaactaaccccttcgtgcacggctcgccgtacacctggctccgatacgacttccccgtcagcacgggcaggaggatagcgatggagctgaagcagggcttggaagaggacagactgggagaactcctcacgtgaggagcctctccagcgttttcatctccctttcttcccaggcgtctttttctaggacgagcacgagtgttccattgctaacagcgacgtagtcccgcagggatgtcaggaactttgctatggccctaaaatcgttgtagagcttgaggtattcgagcccttcgagaacgatgacaggctttaaatcagagttctcgaatgaacggatgtaatcaaccgcagtttcgaggatccttgggagattggttggagaaacgttcccataaccgccaaggtttgttatcctatatactttccagctacttggcacttcgacgttcctcacaaaagccagaacggggtattccctaaactgctttttgaagtcttcaaactgtgccggatccactaccaggactcctggctgaatttccacctgcgttttaggttcttcaatctcaaagacctccccaagcgagagctgaaccatgaagagggccgtaacgacggtcagaaccaggccaatgaacagcccccagaacttaaagccctcgttccataacacgggataaagcatttgatataccccgtacgtgctcagggacaggccgaggtacgcagtgtcctgatcgtagaattccctcatccgataaagtataagtccgccgatactcaagaagacaccggaggctccgtagacgatccccataacggctgtttcaggcgttttttcgaggaaaaggaggagaatcgctgtgtacactccaatagcggccggtccccacgaaagagcccggatgtaatcctgagacattgagacctcttcgtttacccttaggaccccctgcaggatcagagatgaaaagaagccaagcagaaccgccgctatctcaggatgaatgcctagatccccgattatagcgtaggcatatattatccaggcaaaaccccagtagtaggcggcctttctatgccgctggtgggagaaaaacaggagcattcctcccgcagctagctttactccagcgtcaaacgccgccgccattaggtaggagtccacggtaccaccgggtaaagtactttgtcctgatatttaaccctttttccgcaagccttaaaagccctcatcattctcaagtcaaaaagggtgaggaggttcggaagatatgggcaaatttgaacaaaaacttgttaatgctcttaagggctacaccttcgacgacgttctcctgataccgcaggcgaccgaagtcgagccgaaggacgtggacgtttctacacagataacgcccaacgtgaggctgaacatcccgattctcagcgcggccatggacacggttaccgagtgggagatggccgttgcgatggcaagggaaggcggcctgggagtaatccacaggaacatgagcatagaggagcaggtcgaacaggtgaagagggtcaagagggccgagcgtttcatcgttgaggatgtcataagcataaagccagatgagagcctcgactacgcgctgttcctcatggagcgcaacggcgttgacggtttgcccgtcgttgacgatgaaggaagggtcgttggtgtgatcaccaagaaggacatagcggcgaagcagggatcgaaggtcagcgaggtcatgacgggcgaagtcataacagtgcccgagacggtaacggcggaggaggcagtacagataatgttcgaccacaggatagaccggcttcctgtggttgacggtgagggaaggctcgttggcataataacgatgagcgacctcgcgaagaggaggaagtaccggaacgcggtaagggacgaaaacggtgacctgctcgttgctgcggccgttggccccttcgacctcgagagggcaaaggccctcgataatgctggagccgacgttatagtcgtcgacacggcccacgcccacaacctcaaggcgataaaggcgatgaaagagataaggaacgccgtggatgccgacctcatagtgggcaacatcgcaaacccgaaggcggttgatgatctcaccttcgcagacgccgtcaaggtcggaatcgggccaggaagcatctgcaccacgagggtagttgctggagtgggcgttcctcagattaccgccatagcactcgtggctgacaaagcccaagagtacggcctccacgtgatagccgacggtgggatacgctattctggagacatagtgaaggcgatagccgctggggctgacgccgttatgctcggttccctgctggccggaacgaaggaggctccgggcaaggaggtagtcatgaacggaagaaggtacaagcagtaccgcggaatgggctcgctcggggccatgatgaaaggcggagcggagcgctactaccagaaggggcacatgaagacgaagaagttcgtcccggagggggttgagggagtggttccctacaagggaccggttggagaagttctctaccagctcataggcggcctcagggctggaatgggctacgtgggggccagaaacatccccgagctgaaggagaagggcgagttcgttatcataacccacgctggctacatcgagagccacccgcacgacatactgataaccaacgaggcgccgaactacccactcgggaagtgagggctcccactttcaacatttttaactcaaaaacaacaaatttttaagctaaaattagcaagataatgttgaaaggtggtgctcatgtgggagaacttcatcgaggagaaggttaaggagataagagagactgtcggtgatggaaaggccatcatagccctctctggtggtgttgacagctcaaccgccgcagttctggcgcacagggctataggcgacagactgcacgctgtcttcgtgaacacgggcttcatgcgcaagggcgaacccgagttcgtagtcaagaccttccgggacgagtttggactgaacctccactacgttgacgcgagcgagcgattcttcagggagcttaagggcgtgaccgacccggaggagaagaggaagataatcggaagagtattcatcgaggtctttgaggaagttgcgaaggagataaacgccgacttcctgatccaggggacgatagcccctgactggatagagagccatggcaagataaagagccaccacaacgttgggggactgcctgagaggctcaacctcaagctgatcgaacccttgagggacctctacaaggacgaggtcagggagctggcgaaggagctcggtcttcctgagaagatatacaaccgcatgcccttcccggggccggggctggccgttagggttctcggagaggttacacctgagagggtcgcaatcgtgagagaagcaaacgctatagttgaagaggaaattgagaaggccgggcttaagccatggcaggctttcgcagttctgctcggggttaaaaccgtcggcgttcagggcgacataagggcctacaaggagacggtagcggttcgcgttgttgagagcctcgatggaatgactgccaacgcgatgaacgtcccctgggaggtactccagaggatagccttcaggataacgagcgagattccagaggttggaagggtgctctacgacatcacgaacaagcctccggcgacgatagagttcgagtgaaacccttatttactttgacgactaagctagagcggtgggagaatgggagagaacgtcgaggtcgttgaagcggtttacgagaacggtgtgctgaagccgcttaagccgctgaagctgaaggaaggggagcatctagtaataaagctctacaggaaggacatagttgagaaaacggaaaaatttagaaaaataatatctcctgagaacttcaaagaaagccccgaagagtacctccagaagctcagggaggagcggctatgaaagttgtcctcgatacctctgttgtggttaatcttttttccagtttttatcccgacaggtctgaagtcgccaaaaggatcgccaagctctcggaaatgggcattcttgaaatctatgctccgcggctcggggagttcgagttcgtatcagttctatctagattcctttcccaagagatggtgagggaagctcacgaaatatatatggaactcgttgcagactttgtgggagaaggccttttgtccgataggatccttgaactcgccttttcaaccggtcatcgcattcctgacctctacttcgttgcgactgcacaacatatcaacgcccttctcctgaccaacgaccgaaaaatggccgaaatggccaggtctgccggtgtgaaagctttctacctcactgaagaggccgatgagtttttcaagctcgcgggggtgaatggatgatagtcataatggacaacgggggccaatacgtccacaggatttggagaacccttcgctacctcggcgttgaggcgaagataatcccgaacacgacgccgcttgaggagatcaaggcgatgaagccgaaggggataatcttctcgggaggcccggacataaataaaacaggaaactgctccgccatccttgagcactacgacgagttcaacgttccgatactcggcatctgtctcggccaccagctcatagcaaagcacttcggaggaaaggtcggaaggggagagaaggccgaatacagcctcgtcgagatagagatactcgacgagaatgatatattcagggggcttccgaggaagctgagggtctgggagagccacatggacgaggtcaaggagctccctccaggtttcaagctcttagccaggagcgagacctgtcccgtcgaggcaatgaagcacgaaagcctccctatctacggcgttcagttccacccggaggttgcccacaccgaacacggagcggacatctaccgcaacttcgcggagctgtgtggggagctttaaaaaagaaaggtcagctggtccatccatcatcatctttttctcagcaacgggtttactcatcatcagggactatctcaagggagtatgtaagctcggcaccgctgagctttacgtgtgctgatgccgagcagtatttgtcctggctgagttctatggcccttctagccttctcctctttaacgtttccgtatatcttgtagtggatatggactttggtgtagatgcgcgggtgctcctcgcgcctttctccagaaatctcgacttccagcccctttatctgctccctcatcttttgaaggatcatgacgacgtcgtaggccgtgcacccggccacgctcaggaggaggagcttcattggacttataccgccatcacccaggatgacggagcacttgtcgtcttccatccttccgatgaactgaaactcctcaccaggaacccactttactgcccctttgaccatgagaccaccgagagcgctaaggtttacttttttaaatgtctttccaagtggagaccatgtacataaggccattcgacccctggaaaagccccctctgtacctgccccttcaagtacaccctcaacccttacaccggttgcgaccatgcatgcgtttactgctacataaccagctacattcccaacgccttccgcgtgaggactaaagagggtcttctccccaagcttgaaaaggaactcagaaagctcgacaaaaacgcaatagtggcactttcatactcatccgatccgtatccaaccatagaacgggagcttgggattaccagaaaggtcctcgagctttttagggggtacaacgtccgttgcctccttttgacgaagtccgacatctttgagagggatatagacatcctgagcgagctgaggtgcgctgttggagtaactgtaacgactgtggacgaaaagaaggcaaagctccttgaacccaacgccccatctccaaagagaaggatgaaggcactgaaaaaagcgaaagatgcaggcattcctgtctacgcccggatagacccgataatcccctactacacatgggaagacttcgacgagacgcttgatgcactttcctttgtgagccacataacggtctccaccctcaagctcaggcccgactcaaaaaagaggatgtttgcaaagttcccggagcttatggaaaagctgtggccgctttacgagaggggagagaggatagggggctactactacctcccaaaggacgtcagaatgcccatcctgagggaagcagaaaagaagataaccgagaagggaatcacgtttgggtcgtgtcgggaaggttatcgctcgtttccgacgtgtgatgggtctcatcttgttccgtagtctcctgggcaagcctcttctttgcttcttcttccagctgaatcagttcaatctcgtgcttcctctcctgatgaccgagagccgccttcaccagcgcctcatacaggactttcatctcatccagatactcgggctgccactgaacgccaataacgaagctctcgtcggtggactcaatgccctctatgagaccatcgacggaaaaggccacctgcctgagaccctctccaaccttcttaacggcctggtggtggaagctgtttacccaggtccaggcatcgttcgtgccctcgatgaccaggacgtctttgaggatgttgtagagctttgagtccgtttttacccttaccgtgtggagcttctggtcaggcctgaccctgccgatctcccagtcgtgttttatggctttcggaatttcatatacgtcctggtacagcgtccccccgagggcgacgtttattatctgcattcccctgcccacgccgagaattggaatttccccatcaatcgccagtttgaccagggttatttcgaactcgtccttggcaacgtccacatccctgaggctgagtgagggatcctcgccgtagaacctgggatgaatgtccgggccctcaacgaggagtatgccgtccgcgacctctataacgtcctcgggatctccctcagggctgaatagcactggaagaccgcccgcctcaagaaccttcctgaagtgatgtgtattcgccagggtgtatccatctctggaagtaccgattatggctatgattggacgcataagtctcaccggagaaaactagggacaagcaaataaaaaagtataggtagcagacatgaaagagagttcacttgagcttctttatctcctcctctattacctcggcgagcctcctgactccttccctaatcttctcctccgggacgtaggtgaagttgagcctcattgtgttcttaacttctctgtgggcaaagaaagcctcacccgggacgtaggcaactcccttggcgaccgccttctccatcattagcttggtgtcgatgccctcaggaagggtcacccatatgaacatgcctccgtctggcttcgtccacctgaccccctctggcatgtactcttcgagggcctcgagcatcgcatccctcctcggcttgtagaactcgatgacccttggaatgtgcctgtcgaggtggccgtcttccacgtacttccaagctatgacctgaccgaacgggttcgcacagaggtcaacggcctgctttgcaatctccatcttcctgatgaagtgcgggtgagccgagacccatccaaggcggaagccgggggcgaatatcttcgagaacgtgcctaggtagataacacgaccttcatcgtcgaagtgctttatcgggggtatcggttcgcccgaataacggagctcactgtacgggttgtcctcaacgatgaggaagtcgtactcgttagccagctctattaggtgctttctcctctcgaggctcatcgtcactccagcggggttctggaaggttgagacagtgtagacaaactttatcctctttccttcggccttcagctttttaagtttctcttccaggacgtcgactttcattccatcgtcgtccagagggattgagatgaactcaggatcatagaacttgaaggcgttgagggcggcaaggtaggtcggcgcctcaaccaccacgatgtctcccggatcaatgaagacccttcctatcaagtcaagcgcctgctggcttcctgcgactatcattacctcgaccttgctcattgggattccgtagcgcttttccatccacctagccagggcaaggcggagcggagtgaagcccttggtcgttccgtactggagggccttgtccgcgtgctttgagaggacttccatagtgatctcctttataatatcaacgggaaacgtctcgggggcggggagaccccccgcgagacttataacgtcgctcgtttcaacgagtttgaggagctccctaacctcagaagccttcatctccatagccttttgtgagaaaaatgactcgaagtccaggggttgggccgcgagtttgttctcaagcttttcctgcattaccatcaccacctaaacctaatgaacacatcagttcacgtcatcaaacatatacatcggaattaactaggcaggatttgttataaacttttctcattccgctctgtcctttacaaacgtaaaagaatctcaaaactgagactaaagtgcatcgaggatgttttccaagcgttaatgtacaaaaagtacgaaaacatctataaaccccggcgattatacctgagtttacccggaggtggttgcatggcagttgtaaaggaagtcctcgagattgcggagaagataaagaacatggaaatcaggggagccgggaagatagccaggtcggccgcctacgccctccagcttcaggccgagaaaagcaaggccaccaacgttgacgagttctggaaagagatgaagcaggcggcaaagatactattcgagacaaggcccaccgccgtttccctgccaaacgcgctccgttacgtcatgcacagggggaagatagcgtactcaagcggggcagaccttgaacagctcaggttcgtcataataaacgccgccaaggagttcatccacaattcggagaaggcccttgagaggatcggagagttcggcgcaaagagaatcgaggacggcgacgtcataatgactcactgccacagcaaggctgccataagcgtcatgaagaccgcctgggagcagggcaaggacataaaggtcatcgtgaccgagactaggcccaagtggcagggcaagataaccgccaaggagctcgcttcttacggcattccggtcatctacgtcgttgattcagcggcaagacactacatgaagatgaccgacaaggtcgttatgggggctgactcgataaccgtaaacggcgcggtgataaacaagattgggactgctttgatagccttgaccgcgaaggaacacagggtttggactatgatcgctgccgaaacctacaagttccacccggagacgatgctcggccagctcgtcgagattgagatgcgcgatccaacggaggtcatccccgaggatgagctgaagacctggccgaagaacatcgaggtctggaatccggcctttgacgttactccaccggagtacgtggacgtcataatcaccgagcgcgggataataccaccgtacgcggcgatagacattctcagagaagaattcggctgggctctcaagtacaccgagccctgggaggactgaggcttttcttccttttcttttcgagctcaacggtatggcttaaaaggagtatgccttttatactccagcgacaaaaacaaaggggtggttaatgatgaaagcttacatagccgagaacgtcaggggcatctacgcctttgacgagagcgggaagctcatagggagcaaacccttcagcgggaagccggaggtaagccttgacaagctcctcaagggcgagccgagcgacgagctcatagagtttctcgacgagcttggaagcgaaggctacaccgagttcgtggtcgaggactccgagctgagcagaaacctcaaggagctcggctacaacgccacagccgagttcccgaacatagctggcgaaaagctccgctcaagccccgaggagttcctgggcgagaactggttcgacgagtacttcagcgttggtgttgccctgaccaggctccgcatacaggagcagagcggcgctcgcgataagatgatcatccaggccatcgaggccctcgacgacattgacaaggtcataaacctcctcgtttctcgtcttagggagtggtacggtctccacttcccggagctcgatgaactcctcccgaagcaccctcagtacgttgcgttcgttaaggagatcggcccgagggagaacgcgaccagggagaagcttgagaagctcggcttctccgagggcaagatagagaaaatccttgaagcggccgagaagtcaatgggcgccccgctcggcaagttcgacagcgccataatccagaagttggccagcgagatacacgacctctacaagctgagggagcagatagaggactaccttgagactgccatggacgaagttgctccgaacctcaaggcgctcgtcggggcgaagcttgctgccagactcatgagcctcgcaggtggattgaaagagctcgccatgatgccggcatcgaccatacaggttctcggagccgaaaaagccctcttcaggcacctcaggacgggtgcaaagccgcccaagcacggtgtcatcttccagtatccggctataaaccgctcaccctggtggcagaggggtaagatagcccgcgctctggcaggaaagctcgcgatagcggcaagggtggactacttctccggcgaatacataggtgaggagctgaagaaggagcttgagcagaggattcaggagatcaaggagaagtacccgaacccgccgaagaggaaggccaagcccgagaagaaaaagaaggaaaagaagaagttcaagggcaaaggaaaaggaaagcacgagaagggcaagggcttcggcggaaagaaggacaaaaagaaaaagaagaagggtaagggcggtaagaggtgatcaagatgaaggttaagaagcacaggttcccgggcgtttacatagttattgatgacgacggtagcgagaagatagcgaccaagaacctcgttccgggccagagggtctacggcgagagggtggtcaagttcgaaggcgaagagtacaggatttggaacccgacgaggtcaaagcttggagcggccatcctcaacggcctcaagaacttcccgataaagccgggctcaacggtactctacctcggtgtcgcgagcggaaccaccgcttcccacgtcagcgacatcgttggctgggagggcaaggtctttggcgtcgagttctcgccgagggttctcagggagctcgtaccgctcgtcgaggagaggaggaacatcgtgccaatccttggcgatgccaccaagcccgaaggctaccgcgcgctcgttccgaaggtggacgttatcttcgaggacgttgcccagccgacgcaggcgaagatactaatagacaacgccaaggtctacctcaagagcggcggctacggaatgatatccgtcaagagcaggagcatagacgtcaccaaggagccggagcaggtcttcaaggaggtcgagaaagagctttcgacctacttcgaggtcgtcgagaggctttcgctcgagccctacgagaaggaccacgcactctttgttgtgaggaagccttgatttttcctcttctacgttttttctgtgttaaagcaagacaaaaaagaagagaagacttcagtctctcttcggcagatgtggaacgagccagctcaggaagctgtccatgctcctcgtctggatgtagagcgttccagttccgtagaactccgccacaagaccctctccgctgaagagggtgctcttaagaccgccgacgcgcttcacgttgaagtcaagaccctcgctgaaggccaccatgtgaccggtgtctattataaagcgctcgttgtggagttccttcttgtagattgccccgaagctcgaaaggaaaacgattccccttccgctcatcttaaggaggaacagaccttccctgccgaagaaggttttagcgccgcccatttggtatctatgtcgatgtcaccatagctcgccaggaaggcaccgctctgggcgtagagagttccatcaagctcaaaggcctcaatgtctcccatatatgctggagcaagaccgatgctcccaggtccgtcttccgccctgaacgtgttcacgaagaagctctctcccccgagcattgagcgcttaagcgcaccaaaaacgccgcccttagccttggtctccagctttatagtcgggctcatgtgcaccatggccccggcttccgcctgtaccgcctctcccctctcaagttcgatctcaaggagagaaaagctcggcctgtggattatctcatacttcataaaaacacctcaagctgaataggtctcatcccttatataccctttctcgacaatcgtctaaaaactctttcacttttaccgaaagacttttataaggccctttctcacagtccccagggacttttcaaagtttgaaggtgatgtcatatgagcaaactcctgaagcccaagagggaggtcggcattatcggctacggcgcctacgtgccgatgtatagaatcaaggcagaggagataggaagggtctggggagttagcagcttcccgatccaggagaagtccgtccccggtcttgatgaggatacgataacaatcggcattgaagccgcgagaaacgccctcaagagggcccagatcgaccctaagcttatcagggccatctggctcggaaccgagagcaagccctacgccgtcaagccgagcggaacggttatagccgaggcaattggtgcaacgccagatttagatgccgctgactttgagtttgcctgcaaggccggaaccgaggctatacaggcagctattggcttcgtcggttcgggaatggccgactacgcgatggctatcggtgcagacacctcgcagggcaggcccggcgaccaccttgagttcacggccgcggcaggaggagccgcctacattctcgctccaaagagctccgagaccctggcttacttcgaggcgagctactcatacgtcaccgacacccccgacttctggaggaggcagcacgagcactacccgaggcacggtaaccgcttcacaggtgagcccgcctacttccaccagataataaacgccgcaaagaccctcatggaggagctcggctacacgccgaacgacttcgactacgccgtcttccaccagccgaacgtcaagttcccgctcaccgccgccaaaatcctcggcttcccgaaggagaaggtccttccaggactcctcagcggaataataggcaacacatacagcggcgctaccctcgtgggtgtatcggcggttctcgacatagccaagcccggcgacaggattctgtgggtaagctttggttcaggagctggaagtgacgcattcagcctcgtcgtccaggacgcgatagaggagaagagggacctggctccaaagaccatggactacgtgaacagaaagaagtacatagactacgccctctacgcgaagcacaggggcaagtacatactgtgaggtggttgaaatggagaagcccgtcataattggagttggtatggttcccgtcggcgagcactggagagtctcactcagggacatggccgttgaggcccttctcaatgcgatggacgacgctggaatagacaaggttgattcgctctacgttggaaacatggcctcaggctcattcatcgagcaggagaacttgggtgcccttatagccgactgggcaggccttggaaacatcccagcggtaaaggttgaggccgcctgtggaagcggcggtgcggccgttcaggaaggagcaaaggccgtaatggccggccttgaggacatcgttgccgtcgtcggcgtcgagaagatgaccgacgcctggccgagcgacgctaccagatatctggcctacgcggccgacgccgagtacgagctcttccacggggctagcttcgtggcacttaacgctctcatcatgaggctctacatgaagacctacggctacaccgaggaggacttggcccacttcgccgtcaacgcccacgcaaacggtgccaagaacccctacgctatgttcaagaggccgataacggttgataccgtcctcaagagtccctacgttgcagacccgctcaagctcttcgatgctgcgccaatgtgcgacggtgcagccgctgtgataataacctcaaaggagaaggcgaaggagctcggtgtcccgaaggacaagatggtcgagctcgctggattctggagggcaatcgacaccataaactttgcaaacagagaggacttcctgacgctcaaagccgccaaggtcgcggccgagaaggcctacaagatggcgggggtaacggctaaggacatcgacttcttcgaggttcacgatgccttcacggtgatggctgcgctcagcctcgaggccctcggcgttgcggagaagggcaagggagcaatgctcgcgaaagagggacagatagccatcgacggtgactacccgatacaaacgatgggaggactcaaagccaggggacacccggtcggagcgaccggtgtttaccagacagttgaagcggttctccagctccgcggagaggctcccgaagggatacaggttcccgacgccgaggttggcctgacccagaacataggtgggacaggttcaaacatcacagttaacgtcctgaggagggtctgaaatggggaggccgatgcaggttgctaggcactggagacacttccgtgagaagtacgccctcatcgggggcaagtgcgagaacgatcacgtgttcttcccgaagaggcccgtctgccctgtctgtggctcaaggaacgttgaggaataccagttcagcggaaagggtaaggtcatcagctggactatagtgaggaacccgccgagcggcttcgagtactacaagccgtatcctttggctctcgtcgagctcgaggaagggctagtcgtcctggcccagctgaccgacgttgatcccgaagaaatccacgagggcatggaagtcgagatggtgacaaggaagataagggagttcggcgaggacggcataatcctctacggctacaagttcaggccgcctatgaagtgatttcttcttttcctttctcatgtcttgtacctcttttcaggaaggacaacagcgggcaactcttttaagtcaacccggccttcccgctctgggaaggaaaatgaacgaaaaagaagtactgctgtcaaagttcatcgctcacctcaaggaactcgttgagatggagcggagggccgagatagaggctatgcgcttagagatgaggcgcctcagcggcagggagcgagagaaagttgggagggccgttctcggcctcaacggaaaggtaatcggggaggagctcggctattttctggtgaggtatggaagggatagggagataaagaccgagataagcgtcggcgacctcgttgtaatcagcaaacgtgacccgctcaagagcgacctcgttggaaccgtcgtggagaagggaaagcgctttctcaccgttgccatagaaactgtcccggagtgggcgcttaagggcgtcaggattgacctctacgcgaacgacataactttcaagcgctggatggagaacctcgacaacctgagggagagcgggagaaaggcccttgagctgtacctcggccttagggagcctgaggagagcgaacccgttgagttccagcccttcgacaagagcctgaacgcgagccagaggggggcaatagcaaaggcccttggcagcggagacttcttcctcgttcacgggccttttggaactggaaaaacgagaaccctggtagagctgataaggcaggaggtggcgaggggccataaggttctcgcaaccgccgagagcaacgttgccgttgacaacatagttgagaggctcgcagattcagggttgaaggtggtaaggattggccacccgagcagggtctcaaaggccctccacgagacgacactggcttacctcatcacccagcacgacctctatgctgagcttagggagcttagggtcataggtgagaacctcaaggagaaaagggacaccttcacaaagcccgcaccaaaataccgtaggggtctgagcgacagggagattctgaggctcgctgaaaagggaatcgggacgaggggagttcctgcaagactcatcagggagatggctgagtggattaggataaaccagcaggtgcaaaagacgttcgacgatgcgagaaagcttgaagaaagaatagccagggagataatccaggaagccgacgtggttctgactacgaacgcctcagccggcttggaagtggttgactacggcgaatacgatgtcgctgtaatagacgaggcgacgcaggcaacgattccgagcgttcttatcccgataaacagagcaaaaaggttcgtgcttgctggagaccacaaacagcttccgccgacgatactgagcgagaaggcaaaggagctgtcaaagaccctctttgaaggcctcatcgagcgctatccagaaaagagtgagatgcttacggtccagtacaggatgaacgagagactgatggagttcccgagcagggagttctacgacgggaagataaaggcccatgagagcgttaaaaatatcacgctggccgaccttggggtcagcgagcccgagttcggaaacttctgggacgaagcccttaagcctgaaaacgtgctggtctttattgacacctcaaagagggaagatcgcttcgagaggcagaggcgcgggagcgacagcagagagaacccgcttgaggcgaagctcgtcactgagaccgttgagaagctccttgagatgggcgtgaagcctgactggataggtgtaatcacgccctatgacgaccagagggacctgataagctcaatggtgggcgaagatattgaggtaaaaacggttgacggctaccagggaagagaaaaagagatcatcgtgctgtctttcgtccgctccaacagaaggggagagcttggcttccttacagaccttaggaggctcaacgtctcactcacgagggccaagagaaagttaatagctgttggggactcctcaacgctttcaaaccatccaacttacaggaggttcatagagttcgtgagggagaggggcacgttcattgagattgacggtaagaaacattaaatatcagactgacaaacttccaacagtggtggaagatgggaaaggtaatcacaatctcagttccagactgggttgatgagaagaagtttaaagaggctttcatgcgagcattgttggagagctctccggaaaagatgaacattgaagaaataaggcggctactcgacgtaaaggagaccagtgagaacgttgaagttccagaggggatagaagaaatcaggaaaaaagacaaggggcggttgaagtggttgtcttagatacaaacgttgtcatcgagaaagtcagaaaaggcgaggagatttccgaaaacataacaggggttactttcgtggagttcccccgcatcgtgagatactcgaagtttaggggagacgtcctcttccctgttctcgatgattttattcttgcccataagcttcaggaaaaacttttggagagggggacaccacggggctttgccgacctgttaatcgctgccatctgtgtaaatcgcggggaggagctaataacacacgactccgattttttagaaatagcccaagtctcaaacctaaggctgattctcctagaaaagtgagacaatacacagcgaggtgatcaggcgtgttcctctacactgaaaacttcgacgagcagaaggaaaaggcgatggaaggcctgaggaaggcccttgaagaggacaaggtggatcatgacataatcccgctcctggagaagataaacgccctccaaaactacttcacgacctcatcctgctcgggaaggatttcggtcatggagatgccgcacttcggtgacaaggtgaattccgtctggctcggcaagtggcacagggaggtcaggctcgaagaagtccttgaggcggtgggaaaacaccgctccggccagctctggtttctggtcaggagtccaatactccacgttggggcgagaacccttgaggacgctgtgagactgttaaaccttgccatagggctcggcttcaagtactccaacataaagagcgtgagccacaaaaagctggtcgttgagatacgttcaaccgagaggatggacgtcccgctgggcgagaacggggaactgtgggtcgatgaagcttacattgagaaaatcgtaaacctagcaaacgcccaggtcagaaggttcaagggaaagctgaagagactggaagaggaaattgaaaaactccaggaagattgatgttttcgcccgagaccttctgtattctccagctgccccattgtatctcccaacttcacaccagcggtttccttctcactggccctctcggatactcctcttcgaaaatctcagcggtgaagcggtagaccttcgtatctgggtcgagccagcagtcgggtggaaggccggccttccagcaggtctgggcaaggaactcctcctcgtcccagccccattcgactggaacctgaggcaggagcaggcccgagtaaatgcccttctctatgagaaggccgtccctcccgacctttatcttcttaggcctcccctcaggcgggccctctacgagctctggcggggttaagacgctgacttcaacggtaagctcgtcaagctcctcgggctggactggcggaaagcgcggatcatcaacagccgcgtatatcgccgcctttatcgttgcctcaacgagcgggtatatcgggagcggaaagccgatgcatcctctcagtgccatctggggaggaacgttgtgcctgttgagggttacgaagacgcccatcttctcccagagctcagtgggagtgtcttcaggcggctctatgaccctcttatgcctgacgtactcctcaactgccctcctcgcgagcctgacgaggaactccccccactcgtcctttatgcggtacatctcccatcacctccatccttaattgaactccaaagtttataacatgtgctttagccagggcacaaagtttaaaacatcgccgaaggaatttaagacgggtgccgaaaatggtcatagcggagttcgtcatcgtccccctgggcgagaaaagcctcagcaggtacgtcgccgaagtagtaaagcttttagatagaaagggtgttaaataccaactgacgccgatggccaccattatcgaagctccaaccgtcgaagacgtcctcaaaatagtcgcggaggcgcacgaactcatgtttaagcttggagctgagcgggtttcaacaaccgtgcggattgacgacaggagagacaaagagcgtcacatggaggacaaggtaaaatcagtcatggagaaggtcaggggtggttgatatcagggtgctaatcctggccatagatagggacgacgattttgggaaaaaagccggagttaaggggccggttatcgggagagccgcttgcctagatgcggctgtaaagcttagtctggccgatcccgaggacagcgatgcaaacgttctctacgctgctataaagctctacgacaagctgaaggagaagggcgagtttgacgatgtcgaagttgccctgatcacgggccatccaaaggtcgggctgaagagtgacatggagctcgccagacagctcgatgaagttttgaaagtttttccggccgatggtgtgatcccggtaaccgatggggcggaggacgagcagatttttcccataatagcttcaaaagtccctatcataacctcccaccgcgttgtggtcaagcaaagcccgggcattgaaacgacatggtacattatagtgaagtacatgaaggagatactgagcgacccggaagttgcgaaggtcgtcttcggtattcccggccttatcgttctgctctacggtctgtccaagatagtgggtgtatggtatccgcagagtgagaagatagtgtcaacggtaatttccggtactgtccttctgataatcggcggtctgttctttacgaaagggttcaacctggatattgggggagctttagcagcttttaggcgcgcggttgttgagcagttcgtagttgtcctgtcctttgtggccggaattctaataatcgtcagcggcgcaataaacgcctacctgaacctggaaagctattccctgcagcttatagggagctaccccggaacgtcgcttctggcaacgctgatatacctgaacgcaatatccgggacaataaccattggaattgccgtaatgatagccggaaaagtccttcacgcctacttgaggcgcgactatcacatatggtactatatctcggcgctcctcatgacacctgccctctgggtgaccctcgatctcactacgagatatgccctatcgatattcactgtttccgacattgaggttttccagaagctcttactaggcattctggacgttgggctggcagttttagcgggggcgtacctccgcggaaaagttaagggatggatgaacgttgagaatggaagacgcactcagaaagtatcagctaaggcttgaagagtcgcagaaagaagccctgaaaataagaaagaactaccaaaaatggctctccaagaaaaagaaggaactgaaaagggccgttgaaaaacttgagaaggttaagccccctaaaaacgttgacgagactctccttaagatcgtcgaagccgacaggcgcgcctacgtttcggcttttaaacgcgcccttgagggcatccaggacattgaagacctcggaaagcgccttcccgaactgggaaaagtccatattgattacggaaagcacgtcataatactttttgaaaaggaagttctggcaataaactcgattctcaaggagatggacgaagggtacagggaatacctccaagagacccagaggatatcactccccaagcttgaagttgaagaaaagatagaagagcttaaaaccgtgaaggaaaagctcagtttcatcaattccgagatagagtctcttctagaagaaatatcgctgaaaagaaaggaaatcgaacaagagcgccagaaaccagaagtcaagagcattgaagggcaacttgaaaaccttatcaccaagaagaaaaagctcgagatggaagttaggtcaaatgtttcgaaaatccagaaaaccttaaagaggctccgcatgggtggtcttgccgatcagcttgccagggacagtggtgtggcactcgaaaagccgggggaagtggtctcgctcctccaaacgctcaagccaaggtttgaaggaaaggcccgcaaatcggttgaatggctgagtgagaacctcgaaagcactgtcagtgagattaaagaactggacagaaaaattcatgaacttagaagtgccatggaaaaagaactttcacgcgcggggcatcttgaagacgagataagcttcctggagcgtaggactgccgagcttgagagcgagaagaaaaagctcgaaaaactgaaggcccgccttgaagaggagattcagcaggaagttaaattgcttgaaaaggcccttggggaagagattgaatggggcaacatttaaattaggaaggcctaattcataccggtggtgagtatgttcaaggtggacaggcttcgctttggaacggctgggatacccctgtcaacgccgaagccttcaacgattactggcatcgagcacgtcagaaatctcggattagatgctatggagcttgagttcgtgaggggtgtcaacatttccccagagctggcaaagaaaatcaagtacgtggcaaaaaagaacgacgttcttctaaccgctcacgccccatactacatcaacctcaacgctaaggaaaaggcgaaggtcgaggcgagcaagaagaggataatccagagcgccgagaggctctacgaggcgggtggctggagcgtcgtattccatgctggctactacctcaaacagccgccagagagcgtctatcagagaatcctcgaagcactcaaggacatccagaaggagctgatggacaaaggcgtgaaagtctggataaggccagagctaactggaaagcccacccagttcggcgacctgaaggagatagtgaagctcagcgaggagcttgagatggttcttccgacgatagacttcgcccacgcccacgcaaggaacaggggaaagtgcaacagcgttgaagagtggcgcgagatgctgtccttcatcgaagacagactcggcagagaggctttggacaacatgcacatccacatgagcggcatcgagtacactgacaaaggtgaaaagagacacctgcctctccaggagagcgacatgaactgggaagacctgctcagagtcctgaaggagttcagggttaaaggcgtcgtcataagcgagagcccgaacatagaggaagacgccctccttatgaagaagaagtatgaggagataaaggcctaaagcgcagcaccagagccgtcgtctgaagttcttttcgacctcttttcaatgcaatctatgatgacccgaagaactttctcatcgcccttcgagagtatttccgctatcttctccgccacgagattcttcttgaggaggagttctatcctctctctaaccctttcggcttccccactttcctctccttccagctcctcaagtgccctcagaagactctcgcgggtttctttaacgtcctcgaggattctcttgtagtacgccgccctgcgccactcctggatgttcttcacggctttgtaatatgccttcctatcgcctggcttctttatcctcacgacgagtcccaggttctcaaggaacttgagggcactgctggcgtgggagagcgagtagccagttctctcggctatctctccaaggctcatgggctcatcctcaaaaaagagcacgccgtagatgtaaccgtagagctcgctgaggccgaactttctcgccgtactcgcaaaatgctccatcattatcctcttagcattttcaacgctcaactcgctccctccgcacagattaatgtctctataaggagaacccttcctgtgtttaaaagttctctctgaatctctgaaagttcctcggggtcctccacgctgaccctagctaggatatcgtagtacccgtagagacggtgaacttcaaagacctgcggaaggccaagaacacgctccaagacacagtcgtcgttccgggcatcggtcacgagcaggaggaacgcctccatggtatcatctccatgtgtgcattggcactcggatcttataaaattttcggaaatttccgaaagtttgacaaatagtaaaatatgaaagaaaatgagcttccagaatcagtaagcttccacaaggctcggctgagaataccagcggtgttcttctacctcaatccgaatatcgagcggctcaagaggttttacctcataacctctgctcctgccccacttctctatctgccttatgacgatcctagttccaagcctcgccagcgggtagaacggtatcaggaacgggttgtttttcataacctcgggcaggcccctagttacctccctcatcatgtgcttccaagcgtagtagaggtggaggaactggccgtaggttatcatctcgtcgatctggtagaactcctggttcttgagcaggcccatcggaacgaacgccagcggagtcacggtgaagtgcgccctgttgccgagcttttcctcaagctccctctccatcgtgattatcagctgggcagtcattatctcgtcatcatcagtgtcgccgggcaatcccagaatcgttgtgtatgcggggaaccagtagttcttgttgaggacgtacgtcccgttgaggagaacccagggccactcttcaggtgagaacggcttcatcttgttgttcatgtacttcccgatgagcctcggcgaagccgtctcaaagccgacctgaatgcctatccagtgagctgggcctgcatcaacgatgcgggaaatttcctctatcattccaggaacggccagagcgccagcaacggccccgtgggtcgggttcacgttcttcgtgtatcttctggctatttcaaacagttcaacaacggcctcggcgttcgggtagaagttcttcttatcctcgacgcggtataggaacacgtcctcgctgtggagccaggcgtggtcgattccagcgctgacgttgagccttatttcctcctctatcctctccagcggcatgtagcgggctaccctcaggttcggctcgcagaagcggcagccccttccgcagcccctcatcacctcgacgaggcctttgtaagagggcgccactatcgtcgggatatgctccacccgcggccagcccttgataaagatagtctcgtcggcgctcccgctctcgatctccctgaagagctcccccgcaacgtgatctacttcaccgattaccacgtggtctatcttcagcctctcccgctcctcttttctgaagtcaacctgccaggcccccggcccgccgacgacaagtttgaagtccagctttttgccttcccttatgcggtttatcctctccaccagctcaaggaacttgaccttggtgtagttcgtccacttgccgccgttcgtgaacatcatgctgaccggccccaggccgagtgggtccatctcgtagagggcaacgatggtggtgtcattccctatgaaattctcaatcttgcgagggtgagcgacgacgacctcatccctcctaaagccatccctgagaagggctgcctcgaccttcctgaggccgtagggcgcttgagtcaggacgccgttctcatcaggtagctgggtgtcaaaaaacctgaaaacccacttcgggagcttgtcgtagggcgcacagccgagaaagtctagcaggggcacgtcgtggtacgtgctcgtcagagtctcatcggtcgtcaggactattctagccatttcatcacctcataggtatgaagaaaaaattgcatatttaagaatttctattttcaataaatgccccatatcaatttgtggtaccaaatcgatgcccatagataagcacattgaactcgaaaccaggcgttctttcaaatctgagtgttcctgaaacgataatatccaagcgggtgtgtacttaagaggatacgattttctagaacaccacccactccagacccaataccctttctttgatagtctcatcattcacggcaaggggaaggccagaggaacagttttttaactactcatactattatttatagcacaataatgtccacatatgttcttaattattcaaattgaaggcaagttattttgtttgctagaaaattttatatatcaaaaataaatagttaaaattgcctatacgcaggtgatacctatgaaacttaggaaagtgctgggggtcctcctggttgggggactactccttggtttagtatcggcgtggggactgcctgtgccctcggctgcgtcgacatcgtcatgcaaagaggtctgggatcacgacgtcgatgagaagagctggagttcagaagttctcgtttgggccggtgctcacgccaaggtcctcatctgccactcgagattcgttcgcataattccggatcaaaacccaaaatcaccaaatcttgtcgcagtggcacagggagtacaactgacaggaagggctaaggtgactgaaatagacccggattggaaatgggcctacgctttggttgaatatatcgatccagacacaggaaagaaagccagggtctacgcaagaataccccactactggccacccggataaatggagggtccggccgtgaagagacctctcgcgggcttcttcattctttcattgttttttgtctcctatgcaggcgctttcaccccaccctcctggttcaaaaacggaacgtacgtaacgtacgcggtgttgccgggggaaggaagatacaaggactacttcaattctgtatcgttcattccctcagagctgtccacggagaacaggaagtcttttgaatcctcttttgaaaatggaaagagagaatgccaggaattcagggaaggtatagagaactcaaaaaattactcaatcctccggagttttctagttttcggtccaatctttatcacctttaatcttacggatgtgacgaattcttctgcagtggttcttgtcacattaacgctggaaaacgcgacgccgagtccaggatgctgggttgattcactgacgttcaggggaaaacttttcctcaacctcaccgacggatactattacatcaacggctccaaactgggcagacccacattcttcatcctcccctacaacctccccgaaaggaagagcctactctacaaagcatcaatactgaagagatatggttttacggtggtgggagatcttaaggtgaataacgtaacctttgcccaggacaaactcgtgcacactttcgttagaaccttccgccccccgctagtgaggattagatcaaactggttgccgataatctatcagaaaaaaggctacttaagctcttttataggttttgaatcactctacgacttgaacacggggatagcaattgacatagattctccatatccagaactctacgcagcggggataatgttcgtcgccccattcaactattactcagcagagataaacgacaaaattgacttctctagagagtactggccctacgagtttgtactttataaaaccaacattcggttccctgaggacagaacaggaacgcgtcccgataccgccctcaagtactacatgctcttcggtgtaggggcccttgtagtctcgctcatccggaggtggaaaagatgaagaggctcctcctaatggggttgctgttgactgccatcttcaatcccacaacacagggagcactggccagctccgcttacggtgccctcacgatagaaggggacaacctcacggttgaagttcgcggcgttggagtttttaacaccccaataactctcgttcttccggtggggaactacactgtgagcgcagagggtcaagttaagcttgaggccaaagtcttcgttaacgcttcaaaactcgtgagggtggaattcagtacagttgagcctgatgagttggtggagggaaacctcacgatcctcggtgttaaagtgacgtacgactggtggaaacactacccaaaatacagctctcgcccaagccttgggattccaaggggatgtggaggagcgtggagtcccttttattacatcgacagacctctgccgatgaccctagaagacgctggagacacaatcgcaaagctcacgatcaataacactataacaccatgttacttaaggagtggcatccaagatataaatggaaagctggagtacatcttctatacgattgcaggcccctttggaacatcaggaattgccctcaaggacacaagttttctgactcccctctcatcagttgaagtgtcctctgacgtggagctcgtaaatggctacctttacaacgttagctcgacttcgatggtaactcccttcactataatcctgcccgtggttactcaagatgtgtacaacgtcaccggaacgactaccgacggagacaccatcaccataaaccatatcccaaaaactgacacttacaacttaagcgtgggactcaatcacactctcgtgacggccgtggtaaagccaagaccctgggaaaagtacggtatctcatacagcctcaggaccgcccttgagctcatcagggtgagggaagagagtgtcgagctctacggggttcgtgtgaacaccacccccgcggccagctttgaagtcgtcggaaacgccaaggcagcaggggtctcacctgggaccatctaccttccggaggggaattacaccctcacggccttcacgaacaacagcggcgtcaccgtgaacttttcagttccagaaacaagggagctcaacctcaaactcaagcctctacccgcgcggttgttcttcaacgtgaccccatcaaacgcttccgtcttcatcgacgggaaacccgtgaataaccgctccgttgagacctcaccggggagacacttcatccacgtaacagcccccggccacgtcgccgagaacttgagcgtcctgctcgctccaaacgagtcgagggttctaaaaatcggtctgaagcccctgccggttctctcggtcaccacggtgccatccggggccctggtatcaattgggaacaaaacgtgccggagcccatgcatgctggcccttgaacctggacgctacactgtggatgtatctctggaggggtacatgaacgcgagcaagaccgcatacctggagcccggaaaggtggtcaacgtcaccataacccttgagaaggtcagaaagaatgcgggaacctctaatgagtccatgaactccgataccccgactaagaaactaaccaaaataccagcgccagcgccgtcctcaggaagaaactcctatggcactactcacaaacttctcgcgctcgtcgtggtgatactgctaactgggatcgctctaaggaggaggtgagccaatggggcgcttcaaagagcagctgaaatgggagttggaggacccctacgtggcactcatatttgttttcagcttcctcctgctggcggtgacgttctacaccaatcttttcgacattgatacgaacgtgatgaccatggggctgggaacggccagggagcacgcggccgctgggactgccatgctttttccgggactctccgataagtccacagcgatctttgccattactggggttctcctcacatccctggccatccgatacgacagggacacgggggttgcaaagagcgtctattcccttcccctcaggaactacaaggttgttctggcaaagttcattgcggtctttgtagtcctcttcctctcagccttcagtgcggcccttgttgcctacctttactcctacggggacagtcccaccatgatcaaggagggaatgctcggtcagcgttacctgcttatacacattctctactggcttgaagcggcgctttacgtgtcgtccctgtcctccatgatagccgtgctgagccccggcacgtttgcggcgatcctgggcggaataaccgtgatgtacgtcccggagatccttggctgggactttctgcctcccagaattctgaacgatggactcataaaagcccacgccgtgttctgggatccatgggaaaagctgggcattttctttaacacgacgttttatccctgcctgttgctcccgctggtcgttctttcactcacgctcgttctaagcgagtggagggatgtctcgtgaggctcataaaagcgttcctcctggcccttttgatcttcacactcctctcgttcccactgcaagaaaaggcccttagaacgtccacttcgggcgttgtgagtaacgaaaaaggttttgtactgccatccgccggcgttcttcgcgtgacgaccaacgccggaatgggtgcgaattacagcgtttcgttctacgacccggagagaaatggatttctccttaacgagactcccaagggccagctcaacggatacttgaaaatcaagcacgccggttattattttgcccagataaacagctactatgcaccggttaccctggcataccggatgacttcaaagtatccatcgaggagaatcctggagataaaatacttcaccggcggaacttcggcaataattctcgcgttactgctcttcagggaggggagaagatgatcaccgcaaaaaatctgagcaagcgttttggaaagctcgtagccctcgactcaataagcgtgaagattgaaaggggattcacgctcatcctgggtccaaacggtggtggcaagagcactttcctgaaactatgcgcggggctctacaggcccagctcggggagagttgaagttctcggcgaggccccctggagcaatgaaagggtcaaatcacggcttggagtctcctttgatccacccgcactcccgaagcacagaaccgggcgggagtggcttgattacatcgcgagactcaagggagccgatgacgataacgttctggagagtgccgagatgttctcggttacgggttttcttgacaggcggattggcgaatactccgcaggaatgatgaagcggctttccctggcccaggccttcattggaaaaccagagttggtccttttagacgagcccctcgcaaacctcgactttcggggaataaatgaggtctcagagacgctcggaaggctcgcgaacgatggattgaacatcgtggcggtgtcccatgtgtggaggcccctaatgaagttcgcgaacgaagttgtggtcatagccgcgggaagggccgttctaaagggcagcccagaggaagtcatccccaagatcgaggggctatgatgctcggttctttttgagcgtttccaaaactctctcaaccggaagcgcatacctcacgtgcccgtttccctcaacggtcttggcctgcaggagggcgtttattatcgcttcttccgttgcctcggcggtcgccctgaagaggtagctgagagcgttgtcaggcaggaaactaaccagttccggctcttttccaattggaacggtctgggctgtggagaaggccagcactatgtctccgctcccgtggtaggcgtagccgccagttctcgcaagtccaaccactgccctctttgcaagcctcttaagctgccttgccgtgagtggagcgtcggtggcaacaaccatcgagatgctgcccttccctgaagtccccctaccgggatagtccttcaaaagctcgccgacgggaactccagctatcgttaagtcttctctccttccgaagtttgccaaaaccaacgaagcgaccttgtattcctccccgccaatctcgacgacccttgaggaagagcctataccgcctttaaactcgaaggcgctcattcctgtcccagcccccacagcgccttcctcaaagtcgagcgaggcatttttaacggcctcaaagtagtgatcttccttaaccgccatcttcctgatgttgttcaggtaggagtcgttgcactccataacgacgggcgagacgctcttcaggtctgggtttaggtcaatcatgtgcctgacgacggcactggcgacggtataaacgctcagggtgttggtcagagctaccggcgtctcgatgtagccgagctcgtcaacctgaacgaagcctatcggcttggagaaaccgttcatgacgaatgtcgaagcgaagagcctctccctgaaggggttctttaccggcggtagaactacggtaacgccagtccttacgtcatcgccctcgatgagagttgtgtgcccgactttaactccgaggtcggctattgagttcctctttccgggttcgtggagacctatccttattccaaggtcaggggccttcatgggagtcaccggtatgagtagcccaccagaccttaacaaccttgcccaatcaacgcttataaacccgaagaaccgagttataggcatgagaccaaaagcgctcgcggtcatcctgccgccactggcctttctcgtattcttcttctacgccccaatactcagcatcctcagtcttggagtctgggaaaacgggccaaccctggagtacctccgggcagtcctgagcaacgagtaccaccgaaacgttatcctcttcacgatttcccaggctttagcgtcaacggttttaaccgttctaatcggccttcccggggcgtacatcttcgccaactacgatttccccggaaagagactgataaaggccgtcttgactgttcctttcgtgatgccgggcattatggtagcgctcggcttcgtaatcctcttcgggaagggcggcatcattgcgggactgatagggcgcgacccgggcataatctactcttggaaggcaatccttctggcccactccttctacaacttcccgattgtcgtcaggatggtctcggcgctctggcagagggtcaacccccactacgaggagatggctgaggttctaggggcaaaggggtttaccctattcagaaaggtcacgctcccgctgatctcaccggccatcttcgcctcggctatgctgaccttcgttttctgcttcctcagcttctccgtgccactcatcctcggcggctaccagtatgttaccatcgaggtggacatattttcgacgatagttaccctcctcgacttcagaaccggggcggctcttgcaataatccagctctccctttcggtggtcttcatgtacctctacctgaaggcgcttgaggcgtattcaaagagagaggagcagagaataatgaggaaaccgaaggagctgaccatcaggtcaatcttaagccctaaggggctcgggatagttctctactccatctttgtcgtggtctttatcctggcgccgcttggggccgtcgtctacgactccctgcgcttcaacggaacttggagccttgagtggtacagaaggatattctccaccgagtacaacccgatgttcggaacttcaaccctcggagcgataaggaactcactcctcttcggctttgcaactgtgttcctctcaactctggtcggcctgccgatagcgtacttcctcaaccgctggaagtttaagggaaaagtcctgctcgatgccctcgcgatgctcccgctggccagctcgccgataaccatcggtttcgcctacgtgaagttcttcagtacgacacccctctactacaccatctggataatcgtgatagcccatacagttatagcctatccgttcgtccttcgctccgtttcaactgccctgaagaagataaagccaaaccttagggaagctgcgctcagcctcggtgcaggggagtggaaagccttcctgagagttgagctaccgctggccgctggaggattggtggttggagcaatattcgccttcgcgatgagcattgcggagcttggtgcgacctacatgcttgccacaccggaatacaccacgatgacgatagcgatatacaagttcctcggcgcgaggcagttcgggagcgcttcggcgctgtccgttctcctcatggcggtctcggctctcggcttcataatcatcgagagaaccggtgaggaagtatggtgagggttaggcttgtgggaataaggaagtcgttcgagggctttacactcgagattccggagcttgaagtggagagcggggagatgatgacgctcctcgggccgagcgggtgcgggaagacgaccaccctgcggatcatagcaggacttgaaaaacccgactctggaagggtgtttttcgacgagacagatgttacgaacttggaaccaggaaagaggaacattgggatagtcttccaggactacgcgctctttccgcacatgacggtctttgaaaacgtcgcctttggccttgagatgaggaagcttcccagggacgagataaagaagaaggtcgagtgggcgcttgaactggtcggcctcaaggggtttgaaaaccgctacccagaacagctctcaggcggccagcagcagagggtagccctcgccagggccttggtcatagagccacaagttctcctcctcgacgagcccctcagcaacctcgacgccaagatacgcgagcgcctgaggggagagataaggagaatccagaaggagcttgggataacgacgatctacgtcacccacgaccaggaagaggcaatggccgtgagcgacagaatagccgtgatgaactcgggaaggatagaagggataggaaaaccgcttgaactctactaccacccgaaaactgagtttgtcgccaagttcttgggtttgagcaacatactggagcttgaagctgagaacggaatcgcccgccttggcactctggagttcaaaacgggaagagatggaaaagttagggtcttcttcaggcccgaaaacgtcctcgtgaagcccggaaagggcgccagggtcattgactacgacctcctgccgggcaggatacgcctgagactggggataggtggcgagaccataactgcggagcgcttccttaacgaactgcccttcagcccggaagacatccccaaggaagtgagcgtcgaggttctttcgtattctgtcctcgaatgaagtggccattctgatgccattgctttttcctgttttgcccaaacgcaccagaccttcatctgcccccagttttacatttctacgtcaaaaaaagatttaaaaatcggttttattagcaggtaatagtcaaacgggggtgacgctcatgggatggtttgaggagtacttcgagttcgaaaagtatggaaccgatatgaagaccgagattttagctggggtaaccactttcctcactatggcgtacatactcttcgtgaacccatccatcctcagcgatgcgatgggaaaggaggccttcaactcactcgtcgctgtgacagctctagccgctggattcacgactatctttatgggtatctacgccaagaagccctttgcccttgcaccgggaatgggtctcaacgcgtacttcgcctacacagttgctcctaaatacggctggaaggtggctctcgcggccgtcttcgtcgaaggtctcatcttcatagtcctcagcgtcaccaaggtcaggagcgcgataatccacgcgatacctacgggccagaagtacgctataggcgctggaatcgggcttttcctcacgcttatcggcctgaacgacgttggtctgctcacggcaaaggtaacggcccctgctggaagcgagttcgtcataaacggggaggtaaacctcatcggaaagctcgcctttacgggcctcaacgctcaggccctcacgaccaaagcgggccttctcttcgtttttggacttctcttaaccggaatcctcattgcactccgcatcaagggtgcgctcctcatctcaatactcacgacaagcttcctcggctggataactggggccgctccctggcctgagagtctcttttcgatgcccgacataagctacaccttcatgaagatggacctccacggactcctaaacgcaggagccctgggtgttgtcttcgcgttcttcatggttgacttcttcgacacgcttggaaccgtaactggactgagcgcgaaggctggtttcctgaccgaggacggaaaggttcccgatgccgagaaggttctcctgaccgacgccataggaacgaccttcggtgcggtcctcggaacctcaacggtgaccacatacatcgagagcgccgcgggaatagaagaaggcggaaggactggaatgacggccctcgttaccggcttcctcttcctcgcgataggtctcttcatagctcccctggctggagcaatccctgcctttgcaacagccccggccctcgtcatagtcggctactacatgctcaccgccctcaaggaagttgacttcagcgacccgacagaggcacttccagcgttcctcgtcctcgtgacgataccctacacctactcaatagccgacggaataggagtcgggttcatcagctacaccatcctcaaggtcttcagcggccgctggaaggaagtccacccgctaatgtacgtcttgaccatagtcttcgtcgcgtacttcgcttacctcggcggcgtgttttaatccccttttagccccttcttttattttcgggaggagatgatagaaaacaagaagaaaagtcagaaaagcttagagctggaactgctcaacgttctggcggagtgacctcgcgatttcgcgcagctttctggcctcttctgctaggctctctatctcagccctctgctcttgcatggcggagcttacctcttccgcactggcggtcgtttcctcggcacttgcagcgaggttctccagcgccttcagggctttctccacctcttccctcgtcctctcggcctgctccttaacctccgagaccctggaaccgacggcacttatcatctcggcgatgtgacccaggtagcccaggctctcctggagaccctgtgttgacctcgaaacggtattaactcccctctgcgtctcctcaacggccctctgaaccttctcctccatctccgcaatgattctgtttatggtttcggcagcctgcttgctgtcttcagccagactgcgtatctcctgagcaactactgcgaatcccttacctgcctcacctgctctggccgcctcaatggccgcgttcagggcaagcaggttggtctgctcggcaatgccgctgatggcctgggttatctcaccgatcttcctgctcatctcactgaccgccttaacggcctcatctatgaagtgcattgagcgctttatgctctcgacatctttaatggccagctctcccttgctcctgccctcttcagctatcctgacaacttcccccacggcactctcaaactcgttcattgtatctactgtctcctctgttatggaagaaaccacgcgcatgccctcggttatctcgttgatgttctcctgctccctctgggcctcgatgctcacctgctccaccgcctcgccgacctgatccatggaatgcctgacgttctccgcgatttccgccagtgtatcagcctgcctatcaagctcaaaccctatctccctgatgtttccgatgagcgtcctcatctttgctgaggtctccctaagggcgaggattatgttctggaggtcaccgcgcgcgttttcatcgagggtgtagttcagcctgccctccgccatgtcttgcagacgggcgatgaccccgttcagcgtgcctatgacatccttcgatattgcctcaaaggcggtgaggagttttcctatctcgtcgtccctgtacgggtagtcaatcgacgacacgtgccgttttgcttcctccaatttcccttccccaatcaattcagcagccttggtgagctcttctatgggtctgagagagtcgcgcagatattttacgctgaggagagccagcactataccagcagccaaagaagcgaggaggcttaaaacgagactctttgatgcctcacccctggccctctccagggcgctgagcagggaggccatcatttcctccttgggcacgactgataatattatccatcctgacacactgctcttcgaaaatgccaccagcacgtccttcccattgagggtcgtctcaatgacgccagtatctttcctctccagagccttggaaagggccgaatacgatggatcttcaaaaatgttgagcttcccaacgaggtcgctgttcggatgtattatgacggtgccgtttgagttgacaacgaatgagtaacctgtttttccgagttttgctctcagtatttcctcctttatgatggagacatcgacgtcaaccccaagaacgccctttacttctccctcatacttaatggggacgatgtaactgaccacagttttgttagttatcatatccgtatacggatccgtccagaaggacccctcacttaccgccctctgataccagctagttttcgtcgcgttgaaatcctctggaagctccgctggcgggattatttccagcctccccctgaaatccgcgtagtaaacgttgattatcctctcatcggaatttttaaagctctgaagaatctttttaacgtagttccagaacggggggctatccgtatatccggggatgtaggagccaaacgagtattccttctctatggacttagcataggaatcggccaacatacggagcgcatacataacaccatcaatctcccttgagtagctttcactttccaataacgccgtatgtttcgcctgctccaatagggccggactcattgtctcctcgacggtttcccccatccggctgatccccctaacttggagaaccgccattatgagcattatcaccgtgagagttccaatgatcgcgacgtaaatcttctgcctaaacctcaacaacaatcccccctttaagggaatcatcaaccaatctgaattactcttcgattatttttaaggtatttgtgtatgtatttgtgtaggttgcaacgattggagatatcccccgaagacccaaagcggactaactaactttttaaggcaaccttcaaacttaggccggtgagagaagatggttgtgaaagactgtcccgaatgccacggaacgggcaaagtaaaagttggcgagaaggagtgccccgtttgcgagggctggggatacgttccagctgactttaagattggagacaaactcaagggttacagaaacctagatcaccttggagttgaggatgaagttgacgagataccctgccctgagtgccatgggaagggtactgttccagtttacgacacctgcccgacctgcgggggaactgggaaagttctagcctgcgacatctgtggaaagataaaaggcccctgggagccgggcatggagacaacgtgggtttgtcctgactgtctgaggaaatacaaggtcgtttacatcctcgataagacatgtgattatgaagacgttgaagttggtagcctgtacaagggcacgattgacagggtggagcgcttcggcgtcttcgtcaagctcaacccacacgttacgggtctcatcaagaggaaagacctcctcggtggaagggagtacaagcccggcgacgagatagtcgtgcaggttctcgacgtgagacccgacaagagggaggtcgacctcatagagtctgccctcaagcactacaagacggtcgttgttaggaaggagcttccggtcactccgatagccgagctgagcaaggacatggcgggtaagaccgtcaggatacagggaagaatcacccaagttcaggtaaccggcgggccgacggtcttcacgataaccgacggaactgggataacctgggtagcggcctttgaggcgcccggagtcagggcttacccgaacatcaacgttggggacatagttgaggtcatcggtaaggttgccttccactcgggcgagatacagatcgaagccagcgacatggcgaggctctggggcccggatgcagcgagggtgaagcaacagatagaggccgagctcgacaggagggcacagccggaagacgttggtttcctggtggagagcgaggttcttgagaagctcaagccgaagataatgaaggccgccttcatgataaggagggcaatcctggagggaaggccgatactcctgaggcatcacgccgatgccgatggctatacatccggcctggcccttgagtacgctatagtccccctcatcgagaagatatcaccagacccgcaggcgaggtggaagctcttcaagaggagaccgagcagggcacccttctacgagctggaggatgttcttaaggacattatcttcatggtcgaagaccacgagaagttcggcgacccgctcccgctggttgttatagttgacaacggtggaacaagcgaagacattccagcttacaagcgcattcgcgcctacggcgtcccgatagtggtcatagaccaccacgacccgcgcgagtgggtgagcgaagacaaagccaaggttgatgactacgtcgatgttcacgtcaacccgcaccacgtcaagcgcggctactacgagctaacggccggaatgctcgccaccgaagtggcgcgcttcatcaatccagaagtagaggacaagataaagcaccttcctgcgatagctggaacgggcgacaagagcaaggccccggagttctaccagtatctcgagatagcgaagaaggcgaagggcctcacggaggaagacctgaagaagatagccgaggtcatcgaccacgaggcctacttctggaagttcatggacggacacggcattatcgatgaaatactcctcctgaccggcaacctccagaggcaccgcgagctcatcaatgccatctatcccgaggtcaaggagaagcaggagaaggcactgagggcctccctgccgcacgtcaagagcgttgtcctgccgaacggggtaaggttcaacactatagatgtggagctgttcgcgccgaagttcagctatccgtctccaggcaagctctctggattaatccacgaccacttcaaggagaagtacggtgaggactcgccgatactgacattagcctacggcccagacttcgcggttgtcagggccagcgacggtatggctgcctacggctttgacctcaacgagataattccaaagctccaggagaagcttccgtcagccggaatcgagggcggcggtcacagctacgccggctcgataaagttcttcgagggcatgaggaaggaggttcttgaggagttcgccaaggaagtcgtgaagctgaagaagatttcctgatgtctttttcttttccctggttttgttcctgcaaacgtttttaaccttcgggacaacccagagatggtgacagttatgaggggagacctgataaggattctgagctctgttgaagagaaggcgaacgagctgaagctggagggctttgaacccgatgtcgttctcgtcgggaaggaagcttatgagtttataaaagaacaagtaaacgaggagtttggcggagaggaggaagtttttgagctctccggcctcagggtgagaatccttgaggagctcggcggagatgcggtcgtcgttgacaccaaagcccttggatacgccccagccacgaggcgctttaaggttgtcccatgattccccatgcttttccgtccacaactttgattttcaggcccgcgagggctaaaacgctgagcgatgccgccatgatgtcggcgaggcttccaggattcctcaagtcacctttttccctgagaaaggcgtcgaactcatcaacgctgagccttccctcgagaacttcacgggctttttccaaaacgagctctgcttcttcctttccggctttcctgactatgagtgtgtcctccctgcttgccagaagttcgaggaaagccctgacggcagcatcttccagagggtactcttttatgagctggaataacctctcagcggtcgagtacgtgagctcgtagccggtgagccactcacagaagacaagctccctctcacagcttatctcagcgagcttccacaggtttatcccgtccctgaagagctcctcaaatgagtcgtcggaatatacgtcgtacttgacaccgccgggtattcctttcgggttggccgtcctgattgcccggtaaagctccattgtgtctctaaccgtcgaggcccggatgagctcgcgggccttttctccagcctccagggggttcttcgagagggaagaacccatggccagaggtatccccagtacgagaactccaaagttagggttggcgtcctggacttccttcgacgctatcaccgcccgttttatcagactcccaataccagcctcagacgggaagagctcgcccctcctgaccagctccgcagtcctcacggcctcatggtaaacactcacaacagccgtgttggcgaatatgaagttgtagagggtgaggtcgctgaagtcgcggtagcggttcacgttgccgggctttggaagtgccgcctccagcagggggccaagcagaaacgctctcacaatattccaccgctccattcacaccaccaggtacaggattagatagattatgtagagcactaggacggctttcctgagggtctttctggtaagcatgtacaggccgagggccagcagggtcacgccccagaaggcgttctttatgtagggcgcgtaaaccctcagcggctcgagtactgccggctgaaactccttcaggaggagcaataatccaaggaaaatgaagatgtatccaagcgtcctcatatcactcaccctccttaaggagcactacgccgattaccagcaggacaactgcaaggagcgtcttgaagcccaccacagggagcactctaaaggcggaatccaccagaaggatggctccaagaagtatcaggacaagggcgacgattctggatgtgctgtcctcgtgaaccacggcacccaggctctccccagcttcctttatgacgtcttcgagtttcttgccgaggtcagagctctcttcctcagagctctcttcgggcatcaccagagcagcaagcaggtaggccagcgtcataacgcctggattaaccgcgaagagaacgacgaagataagcctgacaatagtcggatccacttccaggtactcggctattcccccaagaactccaaggaaaatcctattcttttttgatctcacgagtctcttttccatactttcaccgatgataaaaaggagcgaagcttaaaaatcattccttaatttcgacgcacccaacagataacatccaatccaaaagggctagaaagttcaaacgcttaatgttctttagaaataaggaaataatgaagaagaaaaagcccatcaaaggctcctcaggtattcggcgtaggcttgggcgtccataagctccttgagctcttcctcaaggttggtcggcttgagcttggcgatccagttctcgtagggatcctcgttgaggagctcggggctgtcctcgagggcctcgttgacctcgatgacctcgccgctgactggggcgtagacctcgctgactgccttgacgctctcaatctcacagagaacgtcgcccttgctgacttccttgccgacttccggaagctcgacgtaggcgaggtctcccagctccttctgggcgtaatcgcttatgccaacgagaaccgtgccgtcatcaagaacttgagcccactcgtggtctttcgtgtagtagaggccttccttgaccttgtattccccgacttcgatcatgaacatcaccgtccatggttgcaactttgagcatttaaaccttatcatgtccaagctgttatcagtgctttttggtgtggccggaaatagggagttcagtcgaaattcctgtagattattgagagcgccgtcaaaaaattatcatgggcggtcaaacgcagtatccattggggcgatttgaatttgaacggatgggaaagaaaaaattgacatttgaggatgggttcctgtttgggcttgtttcttcacggcgggcctgatgttctacataatcacgcttatcataaccttcttcgttctctactcaatggcatcgagaatgatgttttagcgcgttttccccccatgggccttctatgctacaaaaacacccccaaatcgcctcttttagatatagcgaaacgtttttaagctggtaaagaagtcgcgtttgattaaacagtctgctcatctaataacaggaggagagtatacctaaagagaaaaggaggaggttgagatgagctggacaaccccaaagagagcttttataggtgccgcaaccgctgagggagggactaagctgaacgcctttgacaacgcactcctcaagctgggcataggaaacgttaacctggtcaagctaagcagcgttattcccgcacatatcgagtggatggagaaggtacacgacgttccgataggaatgctcctgccgacagtttacgcccacatcgagagcgacgagccggggatgacgataagcgccgcactgggcgtcgggataagcaagaacaacgaaggcggtctgatctacgagtattcgggctactgcaccaaggaagaagccgaggaaatggtcaggaagatggtcgaagaaggcttcaggcagaggggctgggagctcggtgagttcaaggttgcaagcgccgagataaccgtcaaggacaagccagccgccgcaatagcggtcgtcgtcatgttcccctactgaactttttcttttctcaccaaagtgtattcgtcttttcccgttctttcgaagctcaggtggtacttcactccacttttggaaacccaagcgtcaacgtaatcgtttcccgcaatccagagaacctcaaagcctctcttcgttaggttctctttaaggggttcctttatcttttcaccgggttctagaatgctgggtgtcgtcccttccctgatgaacttcagaagggacataaacagctccttcgggtcagtggcctcgattggaaaagtaaagctaacgctaccgtcctctattgttctctcaaacgtgtactcatcaaagaacactaaaaacatctcgacctctccatctgaggaaatactaccaaccaaatggggaatcccaactatctcagtgtttaaaagctcatcccacacctctgcgattttctcggccacgattcttgcaatacctgttccttccatacataggacaatacgcgattttcttaataaacctctcgccacgctaagctttaaaacccaacatcgtatccaccggtggtgagactcatgggatacaacgagcaggagagggctttcatcgaatggtaccctcgcggctacggagtcgggtttaaggtgaagaggagactgtttgagacccagacggaataccagcgtcttgagatatacgagacggagggctttgggaagctccttgtcctggatggaaccgtccaacttgtggaggttggtgaggagagctatcacgaagtcctggtacaccctgtaatgcttgcacacccgaacccgaggaaggttctcgtcatcggcggtggagacggtggaacgctccgcgaggttcttaggcatgacaccgttgagaaggccataatggtggagatagacgagggtgttgtggaagcgtcttacctctaccttgacgtcgccaaagaccttttggacaggctcataaagaaggaagagccacgggccgagctgataatcggcgacggcgtcaagtacctcagggaaactgatgaacgcttcgacgttataatcgtggactcaaccgatccagtcggccccgcgaagcttctcttcagcgaagagttttacagggacgcctacgagaagctgaacgagaagggtctttacgttacccaggccggcagcgtttacttgttcacgaacgagctcctcgacgcgtataaggccatgaagaaagtctttgacagggtgtactacttcagcttcccggtaataggctacgcctcgccctggagcttcctcgttggggtcaagggagacgttgacttcaccaggatagaccttgagagggcaaagaagctcgacctctactactacgatcccgagaggcacgaaaccctcttccagatgccgcgctacgtcagaaagctcctagaggggcagtaaattgggcaacaagagaaaagctctaacaatagtactgacgataggcataacctcctacctgatataccgcgttcactcggaggcttcgtcggttgagctcagtccggggctgttgctctctccatattttcttctcgcctgcatcacaggtttagcgggctatctcctctacactacgctctggtacgtctacctgaagaagaggggcatcagtttcaggagaacgctactcgcgacgctttcagggacgtatctcgggttttccctcaactctgcggtcgggttcttggttaaggttcgccttcttgggactgactattggtacaccttcggcattgggctcctggcaatggccacggagtatatttcgggccttataatggtcgcagttatggcgagaaacccaatagccggcatcctggcggttatactgggcgtcactatgatctttgacagggtcgcatactacgctgtttatcctctcttctgggtaatgaaatccgttgaaaggctcgacaaaatgtacaaaggatggagggaagccaaagggggaagttctgtacttctagctattctggtgggggtctctatggtattctcaaacgcaaccacactttttctcgtgggcaaatcggtcggagttcaaatctcctatggggaagcattcaaaggtgtcctttattccacgtttttgggaggagtcctagggactcctggtggaattggagcaaatgaactgggtgttaccattgccataggcaacggagcggcccagatcgttactgcattcctctacaagaccctcacaacttacctctatgccctcgtcggagcaattgcattctacagggttgtcgccgctggaagaccagaagactattaatcttcgagcaccaagtatcggggggaggtctatggacgtctttgaagaaatagaaaagcgtgaaaaacggctcaatgcaataatagaaatagctgaggacaggctgaaacacatcgaggagttaggtgtgaaagctaaggggccccagattaaggattactccgcttactacgttctcataacactggtgggaatgatccttggaacagcagtcctcgttattgtgtccagaaggatagaaagcggaataaaaattccgataaagctctacgttgtgctcatgctcctgtttgcgatacccgtcgtttactaccttctcttcaaaaggaaacccggggaaagccccggctcagacctcgttgagagggagcgcatggcgagaactctccttgaaaggttttacaaaccgctcaaggaggcagtacaggcagatgacaaggcgaaaattgaggaactggcaaacagactgcttgaagacccaatacttgcttcctccatggagattctgaacgagggagatccaaaggtagtagcctatgcactccttctatacgctagatacgaacccggactggaaaacgaggtgaaagagactctcagcatcgtgacgaacaagccagcgaaagctcttcttgagaccctgctgaggaaaggttataatcctcaagaacagtctaagataggtggagaccgtgaggcttgaagtgttaagccgtgaggatatgaacgaactctctagaaagctcagcagggcaggaataatgaacaggccagtcgaggaaacgaagccagagatagagcactacctgatagttaggggaaaatactcaaaactcgttgaactcagtcccaaggcccctatcctcggggaagaacttgaagcaatccagcttgcctatgaggagcttatgcgcgactgggaagtcggccaggaaaagcccttgagcgagctttttgaagagccagatctctcgaagctgtccctgataacggccctgatagaggagggagccgttgaggagcgcgacggagtgctagttttaagagggaaaccaccattggataacctagagcttgagctcaggtttccaattgacgggcttgaagaggagcttgacgagctcgatgatctgaatgcaaccctcataacggagtacactctgagcaagcactactacgttgaagtccttgaagttgacagggagcttctcgagaatgcgcttgaaattgcagaggagtatgcaactgaagagagcctggttgaagcgacttttgatgcgatagcccgctctgtactggccgaaaagattcttgaactagcggagaagcacaggagaaagaacgaacttatagaggcgcttatggagatagagcccataacggtggaagccgaaggggatagagtgaacatctactacgatgaagacgccatagaggacttcctcaaaaccttacagacgcttggatacctgaaagtcaaggggaacaggatttgggtttaaccagcaaaatttaaaagtccaaacccaaaggatgggcgggggtggaggagatggcggtgctgaaggccatcaagatcgaggacagggacggagagatactcttccgctgcccgaggtgtgggatggtcttccgcagtgccaaggcatacacgaggcacgtgaacaaggctcacggccatctcttccgcaagtgattcgattttccctcttttttggggatgaggagacagccaggaccctgagaaaagtgatgagcggagggcttgtccgaccctcagtcacgcatgatgatttccttcgtcagcttcacaatgaaagtcttccctgttttctcgcgctcgacgagctgtttcttctcgagctcctggattatcctgcttatggttgggcgcgaatagcccgtaagctctggaagctcctcctgctttatggttcccccattttcgaggatcgccttaacgaccgcacgctccttctcggttaaaacctcaattgggaccctgttggcggcccacttcttcttggcatagtatagcgaagcaggaattgcaacggctagtgtaagtacaacagcccccactacgtagccccagtttattccctcaggaacagtggaagtcggtacggatatagttatgttctcctggagccaataggtgttgtatcccatgtcttgtagttctttctcaatatttttggagagacccgctccaatgagaatcaccgtttctggtttcaatctggcgagggtgtccttaacggattgggatatattcgaagggttggtgaggagaaacggcctgtcgtaggccattgcccatctggcggcggcgagagcagaaccgtagtcactcgcactggccaggacgacggcgtcgattccagaggggtagaactcctcggccagcttagcggcggtatcaaccctggtctcaccacctatcctggtgacctgaaagccaagactcataagctgctcctggactctctgacttatcgcctgatagtcacctataactaggacgtggtaccagccgaactgctcatagctttgaagctgggccagggtagcggggtcaagctcctgcgggtttacggggagaatgggaacatccagatgctttgaatagggaagcgccactatgtagtcaatgaggtcgtcgttacggactattatgaggtcatattcgtagtcttgattctgcccgctcgcagtggggagcaacaatggaaataggaacagcgctattactgccaccgctgggatttttctgcccatttcaccacctagaagtaagctaagaagagaaatttaaaaggtttttcaaagctcaagctcctctccaggctggaggataacaacctccgccttgtcaccgacgagcctcttgaactcctcggggtcctgggcgatcggcggccaggtgttgtagtgcatcggaacgactttcctcggcttgaggagctcgacggctttggcggcttccctcggtcccatcgtgaagtgcccgcctatcgggaggagggcaacgtcaatcgggccgtagagctcgttgaagagtgccatgtctccgaagacgaatgtatcccccgcgtggtagatggtcactccgtcgagcttaactatgtagccgcagggattgcctatgttgtgcactccatcactgcttgagtgccaggctggaacctggacgatgaagaccccatcaatagtggttggcccgtagttcatgccaatggtctctacatcgctcgccttctgggagatgtagttggctatgtcatacatggcaactatttttgctccgcttctcctcgctatctctatagcatctccaatgtggtcgccgtgggcgtgggtaacgagtatgaggtctgcctcaacctcctcaggcttgacggcggccttcgggttgccgctgaggaacgggtctatgagtatcttcttgcttccctcgatcagaaaagccgcgtggcccaggaacttcaccttcaccatcgccatcacctccagagttaaaataaccgaagcttacttaaaggtttcgggtgctccctttggctgaggtgaaggtaaaagggtcttgcagcattgtccgtaacttaatcatcctaaatgtcttcaaaatcctctagatcccaggccaggaagctctttcctcttagctcctcttttcccttgatctttttcgccacaagcccgtaacgcttctcccaccctctcagttcaacgagtcccgccttcctctccaagtcctttaaaattcccctcgcttccctctcgcttaactccttccacttaacctcgacgaaaagggctttcttctcgtgctcgttcaaggcaacgagatcaatttccttgtttttatgccaccagcggccgattttagtgaacctaaaggggagctttccttctttgttcagctcgatgagaaactcctttgaaacgtcctcaaagcggaaggagaaaatcctctggagggtttccccaacatcgttgagggttatggttccaagctctatcccggtcctgtttgaataaacgagcgagaaccagctcataagcattggatcggagattctatagaggcctcgtttttcctttctcgcaacgggaagctccctttccacgaaaccgagcctcatcagggtctcaaggtagggataaattttcctcccatccaagccggctccgctcgctatttcagagggctttcttctcccggaggccatcgccgagaggattgaaaagtaggtcttcagctccctgagttcggagaggactatgtatggctcatcgtagaagtatccctctggagtgaggaactccccctcaacgaagtccccaactgtcttgtaacgggaagcgatgatgagataagctggaactcccccgaggagcatgtagaacttcagaccctcctcaaagtcctcaaagaacccgagtgacgggaagagcccaagtgggcggagcctgaagccagctgttctcctgccgtagagcggggatgagtggctcagaacctcatcctccatcattcccatcagggaacccgagaggacgagcatcactggtttgctgctcagctcgtggtcccagaccctctgaagggcgctcaagatgcctttatcgcttttgattgcgtaggtgaactcgtcgaagaccagaagcgttttattgtcaatttttcccgaaaggtacttgaagagggggtaccagtcggagaagctcaggaagacctcatcgtcgaagaaatctgcaagttcttctgtgaggcttttaatttggctctctttcgtcccctccatgaatgtgtggaagatggccctctttcccctggaaaactccacgaggagcctggtttttcctacccttctccttccgtagatgacgacaaaggacggagtgttcctccattccttttcgaggatccccagctccctttccctgtcaacaaatttcctaatcatgattagtactaatccagattagtatttaaggctttcgtaaggtcgttgcttaatctgcctcattgtctaggaacctcaccgctcatcaacgtctctttgagtccatcaaagcccttattttctccgatgcccgttttgggaaagcttatatacgctctaaccgagatttaaacggtgagtgattgatgacgttcgactacttcttcaagccgagggggatagcggtcatcggggcatcaaacgacccgctcaagctgggctacgaggtcttcaagaacctcaagaagtacaaagccgggaaggtctatccagtgaacgtcaaggacgaggttgttcagggagttaaggcctacaagaacatcaaggacatcccgggagaagttgacttagctatcatcgtagtgcccaagaggttcgttaagggggcgataatagacgccggtgagaagggcgtcaagggcgccgtcatcataactgctggcttcggtgagaccggcgaggaaggcaagagggaagagcgggagctcgtggagattgcccacaagtacggcatgaggatcatcgggccgaactgcgtcggcgttatgaacacccaggacgacatgaacgccaccttcatcatggacgccaagaagggaagcatagccttcatcagccagagcggtgctcttggggctggaatagtctacaagaccgtcaaggaaggaatcggcttttccaagttcgtcagcataggcaacatggccgacgttgacttctccgagctcatggagtacctcgccgacacgaaagaggacaaggcgatagccctctacatcgagggcctcaaggacggcaggaagttcattgacgttgcaaagagggtcacgaagaagaagccggtaatagcgctcaaggcaggcaggagtgagagcggtgcgagggcggcatcatctcacacgggttcgctcgccggaagctggaagatttacgaagcagctttcaagcagagcggggttctggttgccgacacaatcgacgacatgctcagcatggcgagggcatttacccagccgctcccgaagggcaaacgcgtagctataatgaccaacgccggcggcccgggagttctcaccgccgatgccatagacagaaagggcctcaagctggccaaccttgaggagaaaactatcgaggagctccgctccttccttccgccgatggcggccgtgaagaacccggtggacatgatagcctctgcccgcggagaggactactacaggactgctaagctcctcctccgggacccgaacgtggacatgcttatagccatctgcgtcgtcccgacctttgcgggaatgacgccgactgagcacgccgagggcgtcatcaaagccgtaaaagaagtcaacaacggaaagcccgtccttggactcttcatggcaggttacgtcagcgagaaggcgaaggaacttcttgaggccaacggaatcccgagctacgagaggccggaggacgttgccgccggagcctacgccctcgtccagcaggcgaagaacgttggcttgctgagggaggagtgattatggaaacccatgcaaagcctgagggtaagggggcaaagcttcctaaggtggctccgcctactatcaacgacctctacgaaaggatgagagaactcattggagaagtcgagaaagacccccacaaactcctgaaggagatgcgggatgctcgtggttgacacttccgctctggtggacgccgtaataccagtgaagggaaaagagcacagaaatgagctggcaagacgagcgatatccagtgctgagagcgctgaaattcccttagctatgccacgactgggggtagttgagaccataagtcttgtcaaacggcttactgggaaggatgaggcagtcgctctcattgaagagtacctatcgagcagggttctccaggttcagaggattggatattcgaagacgcaaagatatcgcaagaaaaatccatcctcgggctgctgatgcatactttatctccactgccaagaaatttgatgcaattttaatctcctcagacagagatatggttagcagggcccgaaaaatgggcgttaaggcgttttacattttggacgaagctgaacttgaggatttcttgaaagaggtatctggaggtgcagtttagatggcgaaagttaccgacatagtgttgtgggacaagcccggggagagggttctcctcctgggcaaccacgcgatagcgaggggagcgcttgaggcgaacatagcggttttcgccgcctatcccggaacgccgagttcagagcttaccgatacgatggcagccgtcgcaaagaaggcaggagtctacatggagtactcgaccaacgagaaggtcgcctttgagacggctttagccgcagcctggagtggcctcagggccatgacggcaatgaagcacgttggccttaacgtcgcggccgacagcttcctcagctcggtcggcatgggcgttgagggaggcttcgtcataatggttgcagacgacccgagcatgtggtcttcacaaaacgagcaggacacgcgcgtttacgcaaagttcgcaaacgtcccagttcttgagccgagttcgccccacgaggcaaaggagatgacgaagtacgccttcgagctgagcgagaagttcaaacacttcgtcatcctgaggacaaccaccaggagctcccacgcgaggggcgacgttgttctcggcgaactgcccgaggagataaagaccggtaagaggaagttcggaaagttcaagaaggacccgacgaggttcgttgacgtccccgcccacgcgaggaagttccacccgctgatcctcgagaagatcgagaagatacgcgaggaactcaacaactgcccgttcaactggatcgagggcaaggaagatgcgaaggtcggtatcatcgctcccggtttaagctacgcctacgtcaaggaggcccttgcctggctcggagtcgaggatgtcaagatcctcaagctcggaacgccgttccccgtcccctacggcctgcttgggaagttcttcgacggccttgagaaggttctcatagttgaggagctcgagccggttgtcgaggagcaggtcaaaacctgggcctacgacaagggcctgagaatcccgatccacggaaaggacctcgtgccgagagtttatgagatgaccacgaggagggcggttgaagcgatagccaagttcctcggccttgaaacgccgataaacttcgccgagatcgacgagaaatacgagaaggtctctcagatagtcccgccgaggccgccgagcctctgtccagcgtgcccgcacagaaacagcttcttcgccataaggaaggcagctggccccaaggcgatatacccgagcgacataggctgttacaccctcggtgtcctcccgccgctcagaacggttgatacaacggtcgccatgggtgcttccatcggcatcggtcacggactcagcatagcgatgaacggctcactcgccgaggaagagcacaaggagggcaaggagaagcagattatcgtcgctaccatcggtgattcaaccttctaccacacaggcctgccggcccttgccaacgccatctacaaccgctccaacgttctcatcgtggttctcgacaaccttgttacggcaatgaccggcgaccagccaaatccaggaacgggacagacgccgcacggcatgggtaagaggatacccattgaggacgttgccaaggccatgggtgcggacttcgttgcggtcgttgatccctacgacataaaggctacctacgagaccataaagaaggccctcgaagttgagggtgtgagcgtcgtcgtctcaaggcaggtctgtgccctctacaagatcggccagatgcgcagaaggggaatgaagtggcccatctaccacgttgtcgaggacaagtgtaccggctgtaagatttgtatcaacgcctacggctgtcctgcgatctactgggatccagagaccaagaaggcaaaggtcgacccaacgatgtgctggggctgcggtggatgtgcccaggtatgtccgttcgatgcgttcgagcccatgaaggagggtgagtgagatgaaggagtacaacatcgttatcaccggagttggcgggcagggaatactcaccgccgccaaccttctcggatgggcggctttaagggcaggttacaaggttcgtgtcggcgaggtccatggaatgagtcagcgctttggaagcgtcatagcttacgtccgcttcggcgaggacgtttacggagcaatggttcctgagggaaaggccgacgtcatactctccttcgagcctgttgaagcactccgctacatcaactacctcaagaagggtggcctcgtcttcaccaacgcgaggcctatcccgcccgtccaggtctcgatggggctcgcgacctatccaacgcttgacgagatgaagaagatcgtggaggaggacttcggcggcaagttcatggccttcgacgccgagaagttggctatggaggctggcaacatcgtcaccacaaacgtagtcctcataggagcactcagccagactcctggcttcccgctctcggaggagcagataaaggaggtcatcaggatcagcgtcccgccgaagacgatagatgtaaacatgagggccttcgagcttggcgttaaagccgctaaggaaatgctggggctttgagactcgccgcttttctcttttctttatcagaactcccaccactcccccagtatttccttcacccgttccataatgctcagagtctcaaatgacggacggactgagacttcgaaacgctctccgctcaggtatcctgccataaaaacaggcagacccttttcgagtccaacactgtagccaccctcgagaacaaccactagggggtattttgatagggtcgtccctgcgtaggcatagaaggcctcacttaggcggagcgtcgtaagaccgtctccatggaagccgtcaaagccagccgaaataactatgaccttcggcttgaactgggcaactatcggcagaacgacctcattccaggcgtagatgtagtcatcgtcgcccgaatagtggggcattggaatgttgaccttagttccctccgcgcccttacccccaacctcgtattcgtagccgctcacgggatagatgtccctctcgtggaggtctatgtggactgcatttggatcgttccagagtatctcctgcgttccgttgccgtggtgggcgtcgaagtcaataaccaaggcctttccggtgagcccttcgaggagctttgaagcgtaggccgcgttgttgaagatgcagaagccgagagtcggtgcgttaaaggccctccccttcctgccggcatggtggcctggtggtctgacgagggcaaggtaaagccctttatcctcaaaggcaagttcaacagccttcttaacagccccaaaggcgtggagcgcggcattaaacgtgcctggagaaacgtaagtgtctggatcaaggtagttaaaagaccttcccagctcttttaccagctccacgtactcttcatcgtgaaccttgaggagctccttttcctgaactgcttcaggttcgataacgtttttccacagaccggcttttttcagcccttcaacggctctttttagcctagcagggttctccgggtgatatccatcgggcctgtgttcgaggaaaatcggagtatagagaatcccgaacttcaaatgtaccccctctcgtcctctctgacagcttttttaagttcagccagaagtgcttcggcatcttccttgctcataccgacctttttcgtaaggaactcaattatctccctctcgctggcaccgttctgcatcctctcaaacaccatgagggcgagcctttcgaatactatctcctggaactcctgggttaggccaagggagtccattagaacgttcatgcccacgaggagagctgttaaggcgtcgttgaactcatcctttccgaggctcttctcgtccaggtcaaccctgagggtcacctcatcgttcatgccgctgagcgtgaatttgagaaggttcatgcgctcgttcaggatgaggagcgtgtggtagaccttcaccttttcctcaagcctcatagctatggtctcgatgccgctcggaactgccagccggacaaatccgtccatgaagatgacgttcaggagaaacggtatcttcgggtgctcggcaacgtagtggttctctcccacctgcctgacgttccaggggaggtcaactatgtcctcggcatcatcgttacctgccctaagccattcaagaacttgagtgttcatcaaataccaccttggaaacataaggcgtatgtccttaaaacaatattggaggttataaaaagggcagggaatgaatcaccattcttcctcttcctcgatgaggccgtacttctccagctcgcggaggagcttcttgacggcctcccaggcgtcctgctcgctcttggcgccagaacagacgatctttccagaggagaagagcagtataacagccctaggctccttgacgcggtatatgacgcccgggaactgctcgggctcgtattcacagttcggcaggatcagagcaacggcatcgaggttgaactccataccgatgtcaccgctgaataccatgttctggatgtctatctggggctccctggtgaatttggcaccgattttcttcagcatctctatgagcttatacacggctctcttgatgtcgtcaacactctttgcgccagttacaacgagctttcccgagctgaatatcagaagggccactttcgggtcgtcaaagcggcagattatacccgggaactcctccggattgtacttggagctcgggcagatctctatgaccttctcaaggttgaggtctgtaaagagatccacagaagcgactatattttcaatcctgagctttacattgctcatgtccaccaaggtttacacctccgaatggtgggtttaaaaaccctttataaatgagggtcgttgctttttaaaggtttaggtcagaatgcaataatgaaagtaaggaaaaaggcctcagaggtaggcctcaacgagaacttttccggcctcggtgaggctcttggttccaaggaagccgagttccctgagcattgtcagggccttctttatctcgtcgtcgctgaggctgaggtgcttcctgatggcgtcaacctcttccatcttgtagtccctagcctcgcccttctccttccatatcctgttgaaggtctcgatgttgtcgtatattaccttgagcacgttgtaaagggtcggcgtgacgctgaacttgaccttgactatctcctggagcttggcgttctcaatggctgtcttgaccttgtctccaagctcggtgagcttgaccataccgttctgaagctccaccacgaagcccttggcctctgcctcgccaatggccctgattatctccttttcgtctccgccaacgtagtcctgaacgagcgccaccagctcgtccctgtggatgtacttcttcctcggggtctttgcaagtattgcggcatcatagcgggttatgaagggcttcctctttatctccctgctgagcctgaggtagaacctgcccttgtcggtgacgccggcctttacaacgttctcctcctgggccttgagcacccactcggctataggcacgtcaccgctctcggcgtaggtaactgccttcatggcatccggactgaccgttccgaagttgatcgcctctttgccccactcggttagccagtaggtgtccttctccttgacgagcctcctctcgataagctccttgctctcaaggaggtgcaggatcgcaccaaggtctttgacatcaacgcgcctctctatctccttttcggtcgggagtatatctgggttggtctcgtacttcttctcgatctcctgaatggccttgaggactgagagctcgtcttcaagcaggtacatcggaaggactttctcctcgactctgcccatcgcctcgtaggtgtccattatggcctttccgaactcggtggtgcccttctcgtcggcgaggcccatgctctcaagttctgcgttcctcttgccagccttgagcatctcaaagtcctctttcctgagcacgatggccctcgcaaacactgggatcatattgagggctttaagcgccagcttggcagctggagtcgtggcgaaggccctgcccttctcggtcggcggcgagataaggaggagcctcatggcctggagtgcgttgactatgttgtcgccgtagagctttgagttcttgtacgttacaagctcatcgagggttccaatcttgggcattcctctgaggaatgaggcaatctcgggcgtgaggtaaacaactggatgggtctcgcgatagacctccagaagggccttcccgaagggggtaaggccgttctcatcggcgagctttctctccctgagcttctccatccagctctcggggattttgcccgtctcctcgaggagctccatcatcttgattatctcggtgtcagcaattacatccgggagctcctcaaggctgagtttatcggttatctcaagaagcttcctgcctgcatcggtcagctttatcttgcccccctcaagctcggcaaagccgagtatgtagagctctatcgcccttatctgaaagtcctccgggagcttcgcctctatttctgcctggctctcggtgttcttcatttccctgagtatctcgatgtgcctcttcttcaggtacattccacatccctccagaatttttccgcacgcttttattaacaacaggtttttaaaagttttggtaagaaaaaatgaaaggtcacttcttgctctcctgcttcacggggtagggcatgaactcgacggttcccctctgcttgacaggctgtttgtagagctccatgagggcgtagacttcctcgggaacgtcggtctcgacattgagtccaagctccctggcgtggtcaacggttatcgggtagtcgtgcgtccatctgccctccgtgagtatctgggccagctccctggccttttcctcgccgtacttgtccttgagaaggctaaacacgaagtcctgaacctgttttatggccttttcagcaacatcggccaggattaaggtctggtcgtcaaccttctccgggcctttcttctcgacagcccttagtatgctcggagctgggtactgaccaagctgtgggtcaactgggccgaggactgcgtttggatccatgataatcttgtcagcggcgagtgctatgagtgtgccgccgctcatggcgtagtgtgggactatgacgcgcgtctcagccgggtgctccttgagcgccctcgctatctgggttgccgctagaactagtccaccaggcgtgtggatgatcaggtctatcggcttgtcctttggtgcgctcctgattgctctgagcacttcctcgctgtcctcgatgcttatgaacttgtagactggtatcccaaagagtcctatgctctcctgcctgtggatcattgctattacagtggagttcctcttcctcgcgagctgggccatgagccttgccctggccgcctgaagggccctgaactggagctggggccacatcagcaggtagaggaagaagagccaccacagcagagaccctaaaaatccgctcaatgggtccacaacctttcacctccagttattttcgtaccaatcctttataaagatgtgccagaaacttaggcccggtgagaacatgagaaacacgatagtgctcgtgagggccgacaacttccagaaggctagtgtggctttagctgacctcgtccgctacggcgggatgaagataaggggggatcccaggataataccgccggccctctcagagtgggtctttgagaaggttagcggcgagaagccgaggaggaagtttaaagcccacgtcattgcccagatagaccttcctccgaggaaagccataggcaggctgatggacattcatcccccagcccacgtcctcgtagtccctcccgacagcgaggcatggacggagctgatgaggctctggggaactttcgagaagctcaggggcttccaccctccgaagagaacgaaggccgaggagatcgagaggaagaggaaaaagcgggaatatgaagatttggacttataggagttctaacccctcttccctagccacttttattaaatctccgtccaaagtagcgagccgctcaatgttgttaactttgcacgccgccaagattatagcgtcatttggaagcagattgtacctcctcatgaaattgtaggcctgaagtaaagtttcttcatccgttgggagaatatgaaactgagttatgaagtcgagcggttcatcctcctttataaactctgatatctttccagagcttttgactgtaagcggtgatactccagatttcagacggatgtaatgaaacagaaactcgcttaccactatgtcatttattattgcaactgcaccaccatcagcgaggtaattcagaatcttgacagcctctggattcccttttagtccttcaataagaacggaggaatcaatgaagacttcgatcattgaaagtaccactcctcctcgtttatcgaaccagagaacttgccgagatactttttaaggatgtctttttttaggccctttttctcttccttcctcaacagtagggatatttttctctggatgatcttctcaagacccttcggaaccacaatgactatctcacccattgcccctcaccaataaagttttttgaagaagaaaaatttaaactttcacttcttcttcctcttcttgatccttatgttggctatgtcgccgagcgttggttcgtagtcccttggaattgtctttttctcctcgaaggactcttcgccggcactttcgatgagctttatcttgaagtacctctcaagctttcttgcctcttttatcgtaggctcgcggtagccgtgtgctattgccctgaggtcgttcacggaaagcccgatctcgtgtgaaagctcctcgtagctcttacccgagcgctggattgccctgtaaaccctctccgcaaagtcctcaacgatctcctcagtaacgagcggcttcggctggtatggtctcggctggggttttggacgggatgccggttttgcagtcctcctcggctgccttccggtgggcattatgctgaaggttcccggcttcttaccgccgtacttttcgtagcacttatcgcagacaagaacctccgccctctctatccttatcctgtggcccggtcccctgatgggggcaccgcatatttcacagtacttcggcttggcctttcccatctcaaccaccttctctctgacatagagagtactggacaggctttttaaacccgacgattcaatcaactttgatgacagcgaagaacgaagaagtgaagatagagaagctccagaagctcgaccaggaaactcttgagaggctcattgagatatacatgagcgcctacgagggcatgagggagtacggtggcgagggggagagctacgcgaagcgctacctccgctggtgctggggcaaggccaaggacggctttttcgtcgccaagattggagataggatagtcggctttatcgtctgcgacaaggactggtacagcaagtacgaggggaagaccgttggagcgatccacgagttcgccgttgataaagcctatcagggccacggtatcggccacaagctgatggataagtgcctcgaatacctgaaggatacgggcaggatagagctatgggtcggagagaagaactatggcgcgatgaaattctacgagaagtacggcttcaaaaaagtcggccagcacgggatatgggttcgaatggtgaaggacaccaaaaaggagataaagcgggaagagaagtagttttattggtggtggtttatgccgtgcatacatcccccaactccagagaaggtgaaagacatgaaggaagagagttttatccgtgaaggaaaggggaagcttaaggtgaccatcgagggtgaggagacccttgaaacaacgatgaacggctcgctcaagagcgtggaagaggtagcagaaatgctaggagtcgaggccaaagacggaaagatagataccgtcgttgacggcgtcaaggtgaggatgcagaaaggaaagctcgagcttgagttcgagagcggggagaagatgaagatagagagggcctgacgttttctttttagcccacatctcattctggaagtcttagagccaggacgaacgctattgagagaggcacaaccgtgctgaagaagttgagcgggaagcttatctccgagaggtagccgcctataagcggtccaaccacccatccgaggctcatcatcccgtttaggagagccatgccctgtgccctctccgaaacactgaccttccttgccacgtatgttgaagtcgagtttatcgtgagtatccacttgattcccgagaggaacgccacaccgaaggccagccaaacgtttctaacaactgcgtagaggacgaatgccatagcgtagccggcaattgatacgaggtagaacctcttcgccccgtacctgtctatcagcctgccgaggaagtatccggtcagggcagcagcgaggctctctattccaaaaagaacgccaacactccactctccgaaggcctccttgaagtagaccgaggagacactgtagaactgtccgctggcgaccatcactaggaagactgtaaagtagaacagcccaaggtggcctctcatgagcttcttgaaggccgagctttttacagttgccctccagctttccctgccctcctgcacaagaatcatgccaacgaggctcctccttccagcgggcctctccctgatgaggagaactatcccggccgaaaggaagaggagaaagccagcgatgatgaagagaacctttatgccgaagtattcaaccaccgcggagcctatgaagttgcccaccatgtagccggcgttctctatggagttgaacaggccgaagattgatccagccctcgttgaaagctcagagatgagggcagaatgggccggagtcatggccgagccgaacgccccctgaaacgtccggagcaggaggacatggacaggagatgttgcaaatgccattatcatataaaacagtccaatggaagcagcaccgaacgcgatgaagccctttctgttcctggtggcgtcggagagccagccgaagggatactgaaagacggtagaggttagattgaaggccacgctcagaaggccgaccatgaacatcgtcgcacctaggtactgcatgtagacgctcagatacgggaaggccattccgaaggccacgttggcaatgaacatggagacggctaggataacgatgttcctccgcttaaccctgagctttttgagcttgagggttctctctcgcttcccctgcgttatcactcgctctctcttccttaaaggcatgtctcgggctacgctgagaggatttataaaaatttccgtcgaaatgttaagaaaagaattgaaatcaccccatctgaagtgcctgacccctcagttcacccctctcgaagcggtaagggtcgtagaagtcgagcggcttgtcggtcttcccgtccacgatgagctcggccagggcctctccaacaaccggggcaagcatgaagccgtgcccgctgaaacctgccgcgatgtagaactcgtctatctcgtttatcctcccgatggccgcgttgtgatcgggggtttctgcataaaagccaccccacacccttatgatgttcacgtacttgagcgcagggattatctgggcgaagcggtagcttacaccgcgaaggaagtcataggtcggtgttatgtcgtaagtcggcccgtacttgaggccgtagccgcctatgacgccgccctgattggcctcctgcgtcatgtaaacgccaccgtgcttgaaggagatgaccatcggctctatctggccgggctttatgggttcagtcttcacgctctggtgcttatatggttctattgggatttttatcggcactcctgccattttgtttatgagcggcgcccaggcgttggccgcgttgatgaccctgcccgtccttatctcccccctgttggtcacgacggcctttatcttcccgtcttcgaccttgatgtccttcgcctcggtgtactcgtatatctcaacgcccagcctcttggccgcgtttgcataggcaaataccgccttaaacgggttcgcctttccgtccgtgtggttccacgcggccgctatgaccccgtcggtgttgagcggggggactatttccttagcctcctcgggtgttattatcctcgaaggaactccaaagcggttctggagccggacgttgttattaaaggcctcaagctcctcttcgctgtagatcaggaagaggtagccgctctgggtaaactcgacgtcgtatccaagctcttctttcagccctttccacaactcgacggagcgcttcatcatcctaatgtttgcttcatcgccgaactgctgccttattccggttccacagcggaatgtcgagccgtttccgaggtagcctttttcgagaaccacgatgtcgctctcgccgagcttggcgaggttgtaggctatgctgagacctattatgccgccgccgatgatgaccgtctttgcctcactcttcatcgtcatcacccatctcgcccgctaaaactcccatcatcaccggcctaacgggaacgcgcgttgcgggaagtggaataccctcctgtttctttccggtcttcctcgcgagaattcccatcacgagcggaaggcaagtccttccctggcagggccccatgcctatcctcaggagcctcttgatttcctcgatgtcggttatcccccgatcaatgagggcctctatctcctccttcgtgacgtcgttgcagcggcagatgattattttctccctcggctcttcagtcatcttcttcacctccgagcacgtggatggtcctcacttcccaggcgagctcgattggaacctccaccgtgactacggcggtgtcccccatgctcttctcgcgcggtattacgagcgtgaccttcccctttccaacgggttctcccacgcggttgaggagaaccacctcatcgccgcgctctggaaccggaagaagctcgtagggcatcgttattctcgctttgtccccaacatagtgaaccatgaaaaacgccaaaccggggcatatctggacgcagagggagcagccgacgcacttctcgtagtcaacgattggaaggtcgttcggcgtcggcatgcttatcgctcccgtagggcagacctccctgcacggggcgcatggtatctcctgcgggcactcgggaacggcaacaggcctcgccctgagcctctcatcgctcggctttgggattatcttgaagagctcttcgggcgttatgtagcccttcttcaggtattctgggatctcagacattggaaccacccccagcgggcagaagagccttctttattccctcaacgatgtgctttccgaaggggcctgaacggaactcctcgaggtcgcgctgggccttctctatctctcccagccactctggagtagcgactccagccttgagcgccgcggcaattcctgctatcttcccttcgagcatcgccgtagttgcctcctctattccagcagaatcgccagcgacgaagattccctggacggtggtctccattctctcgtccctcaccgctacgtggcctcccagctctcggacgaactttatctggcaccccgcctggtggaggagctctatgctcggcctcaatcctacggcgagggctatcgtgtccacctcaaagaccttttcagtcccgggaatcggcctccagttctcgtcgagctgagcaactaccgccctctcgaccctgtccgtaccttctgccctcaggatcgtgtgcctcgtgagaattggaacgccgagcctcctcaccttggcagcgtggacgaagtagccgccgaccttgggcatggcctcgactatcgccttcacctcgacgccggcctggatgagctggtatgccagaatcagccccacgttgccagctccgacgatgaggactctgtcgccaggcttcactccgtaggtgttcatgagggtctggattgctccagctccgtagattcctggcagatcgttgttctcgaagggaatcatcttctccatcgcgccggtcgcgacgacgagggcctttcccgaaaactccacgagctcgcggttcttcctgacaccgatcacgagcttctcgtcgccatcctggaagattccaacggcggaggtttctgtgaagacccgtattttctccctctttctcacttcctccgtgaggatcctggctatctccactccccttactcctgcgaactgctccctcttcccgaagaacttgtgggtctgcttgacgagctggccgcccagctttggctgttcgtcaatgaggatgacactcgcgccggcgtcagccgcgtgtatcgccgccatcaggccggcgggaccgccgccgatgacaacgacgtccgcctcgtatctggttgcatccttccactccggcggcttcgcagtccttgggagtatctcttttcctttctgcatctcaatcctcatgccgtcctcgacgagggttatgcacgagcggacgttcgggatgccgtttaccttaacgaggcaggaagagcacttgcctatggcacagaagaggcccctcggtctgtgtttctcaccgctgtggctgaggactctaattccagcggcgtggagtgccattgcaatggtctccccctcgtaggcctctatcggccggccttcaaagtagatggtgacctttctgcctcgctcaaaccgcagaacaggatgttcagtgatgcgcatgaactttcaccaatgtgggttaagaaaagccctttatgaggattttttcataaaaaggttttccacctttggttgagaaaggaaaatggcgccggattctctttacttggctatgaatatgacgaaaacgttatcaaacccaacgttcaacgtcttgtggggatgtggatggacgtgactttgagggtgagggttcccgaggggattgacgaaaagctcgttggagaaatggccgagatatttgcacgcgctcaggccttaaggatgctcgcttccagcaaggggaaggtgagacctgagagggcatcatggggggagcttcgtgagtatctacaggagtacagggacttttctggacagtagcgtgcttttctgaaggaatacccttcatcgaagtcctcaaagaagaataaaaagaagcttcagcgttcgtgtactttcttcaagggtgaagaagagagaaaataaaacttcaccccatctgcagggccttacctctaagctcgcccctctcgaagcggtacgggtcgtaccaccaggcaggcaggtcggtcttgcccttcgtgatcaggtctgccaccatctccgccacagcaggggccatcatgaatccgtgcccgctgaagcctgcagctatgtagtagtcgctcagctcctcgattttgcctatcgcggggttgctgtcgggtgtcttggcgtagtagcccgcccatgtcctcaggatgaggagctccctcagggccgggattatcttggtgaagtagtagctcacctcgcggaggaactcgtaggtcgggttgaggtcgtaggtcgggccttcttcgtagccgacgccgccgatgattccgccgtggctggtctgggtgaggtaagcgtggccgtacctgaacgagatgaccatcggcttaacggagcccttctttatgggctgggttatgacagcctggtgcttgtagggctctatcggtatcttcgtccttatacctgccatcgcgttgatgagcttggcccaggcgttggtggcgttgaccactattccggtctttatcgtgcccctgctggtcttcaggccctttatctcaccgttctcgattatgaagtccttgacctcggtgtactcgacgagcttcgcgccgaactcttcagcatggagggcgaacttcgcagttgagtggaacgggctggcctttccgtcggtggggttccaggaagcggcaacgacctcgcttatgtcgaggagggggactatctccttggcctcttcgggtgttatgagcctcgtcggaacgccgaatttgttctgtatcgctatgttcctcttgaaggtctcgacttcttcgtcatcgtagagcaggaagaggtagcccgtctgctggaacgggaagccgtattcctcgctgtacttcttccagagctcgacggagcgcttcatgacctggacgtttgcctcatcgttgaactgctgccttatcccggttccacagcggaatgtagagcctgaacctatgaagcgcttctctatgacggtgacttcctcgcccctcttggcaagctcgtgggcgatggtgacgccaacgattccgccgccgattatcgttatctcactcttttcgggaagctctctcgtcggcatttcaatccctccccgcgacgaccttcattttgacgttctttataggcggcctcgcaacgggtatgtcaagcctgtccatgcccattccgctccgctgggaaacgagaagggcgccgttgaataggcagaacctgccctggcagaagcccatggccaggtgggtgagcctcttgatgatctgcaggtctgttatgccgctcctgacgacgtcgtccaccttcttcagtgtgacgccacagccgcatatctggacgtcctcgccgttgaagttatcgagcgggagcttcggaaccggccttgccaccggctcgtactccttaagcctctcctcgtaaatgcacggctcgctctcgtagccgaactccctcaggatgtaggccccaacgagctttccttcgaggtagttcgcgtagtgcggctttatgctgaccgcgcttcccgcgacatagattccgtcccttatcctgtgctcgtcgtcgagaatcggcatgtagtagccgcgcttgaagcggagctttcctcccgcctgggttatcgggtttatatccggaatcctcccatcggccattatcagtgcatcaacttcatagacgttgccgttctcgtctatgacgcgctctattctgtcctcaccctcaacgcgcttgacgttcgggacaattatgtattcaatgccccagcgctctaattcggcggtaatctcctccgggaatgcccctgtgacggcgaccttccttccgggagcgacgccccagacgttcatgacttcaagtgcatcggccctcctaaagacgccgggccagtcgttgttctcgaagagcattatattatcaacagccccagtagctaaaaccactttcttcgccatgaactctatgagctggtcgtttctaacggctggaacgaggaagtactcgcccttgtcatagacaccgagcgcggccgtcttgaggaagaccctaacgttctcagggaagttggtgagcctttctatcgcttccctcgggtttccaaagccctcctgctcaacgcccttgagccacatatctccgccgagccagcccttctcctcgatgagggcaacggtaagctttccgccgatttcctccacgacaccgaggcctgcaggaccagcaccgatgaccgcgacgtccacaacgtagcggagaacgggcttcccttcgtctatctcaacctgctcctggaactcatcgtatctctgcctctcaatcttcatgccgtccttgagcttgagcttccttccgttgatgttcttgactccgtttaccgtaacggggacggggccgaaggtgaaggctccgcggtgtctcccttcgttgctcgtcgtgagccagtaaacgccgttcgctaacatcgccaccgggaacttctcgccctcgtaggcctcgtagggctccccgtcgaggtagatcgtgatcttcttagaagggtctttctctgttaggtcaagcggtctcatgcttccaccccgcttttgtacatgcgaataaagatgaacaccgatgcttataaaccctaaggttctaaactgaaggttaaaaagaagagagatcaggcgagacccttctcgatcaggaagtcggcgacattctcgacctggctcttggcccttgtttccataactgtcctcttgccgccctcaacgggaactttcctgaagagctcttcgtgaagcttaacgatgtctcctggcggctttgtgaggaggctgacgattatgataacgaacagcgttatgaagaagttgatgaagaacactggaacgccgttgaaccagcttccgagagtgccaaagaagcccggagcgtcagggttgaaggcccagccgtatatcttggcctcgaatatgacctcgctgaccagaccgtaggccattccaacgattccgccctccttggtgacgcgcttccaccagaggctcagtgtgagtatcgggccaaagccgacggcaaggccaccccatgccgttgcaaccatctggtagataacctttggtcctgtaatagcgaaccagaggccgaccagtgcaacgacggcaactacaaccctggagatgttgaccatctgcttcttgccgagttccttgccgagaaccttgtggtagaagtccctcgctattgccgaggaagcgacgaggagctgagaatcggcggtgctcataacggcggaaattatgcccgctatgacgaagccagctatccagctcggcataagctcaactgccatggcgggaactacacgctcgggatcgctgacgttaagcatgcccgcctggtagagggcgaagccgaggaatcccgcgaagaacgctccccagaggactattgtagtccagatgccgctgatgaagatacccggcctcctgagctttctcgggtcctcaacgctcatgtagcgggtgactatgtgaggctggccgaggtagccgactatccaggaggcgtagcctatggcaaagattattgccgcccagccggttgcgccgccgaaggggtggagcttgttggggtctgcggaggctattatctccgtcgccttgtcgaggcctcctatcttggccagggccaggaacggaacgataacgagggtcagcagcatgaagagggcctggacaacgtcagtccataccacggcaaagaagccacctgtgataacgtatgcagtcaggatgataacggttattatgattccagtgttcacgcttacgtcaaagccctccgcaaaggtctttccgccggccgcgaactgcgcagctacgtaggcggtcatgaagatgataatgatcaaagcgctgaggatcctgatgagcttggtgtcgtccttaagcctggcctccagatagtccgggacggttattgccctaaatttacctgcgtagatcctgagcctcggaccaatgaggacgtaatcagccagcgtaccgaagagacagcctatcccagcccagaatgctccaaggccagccttgaatgcgcttccaggataacccagcatcaaccagccggagaagtcactggccttgtccgagagtgtagctgctaaaacgtgaaccttcctgccgccgacgaagtactggtcttcggtcttggtgtacctgttggcccaccagcctatgtaagctaggagggcaaggtatatcagaaatccaaagagcacacccgcgttcatgccttaccctccttctttagctcttcaatgagatcctcgtcgtaggccagaatgtcggcatctacgtagtactccttccccgttatcttgtcccagtagccgtacagaaccattaccaaaaaacccaaaatcgttggaaccagaagcaatgcccagccttcggcgccaagtcccatatttatcacccctgaatgtatatgctggttggaagccagcattgtacatatatggctaaaaaattataaacctatcgtttgaaacgtttggtgtaagagaatatcaagaattgcagaaaggtgttagaatatgggcgggatcaaggttaaggtcatgaggccaatctttaaaccagaggtcgctgaaagctttgttctatatccctacaggatataccacctcaggctcttctacaagaggctgggcatgaaggacagggtctttgactactatgcttacatagacctctaccgcctcggtgcggagaggggagacgactttatagacctcgaggaatgggaagttgacgagaaaaacgttatggagcccctcgttacggaagaagaagcgaggatgaaggccttcgagagcgcaataacttggggaaactcaagggtggtctcgtggtggctgccaaggattgaggtaataagggaagagctcgcctacaaggtcttctgggtgtacgaggaagacggaaaaaagctgataatggacagcctcgacgggaagagctacgaattaactggcgagagaaagtgcaggggctttccgtgcagataatcagtaaaagagggcggagccctcagatcctcgaaacggtctcgacctcagcgctctcgacgttctcgacctgtctgaagatatctgcaacctcgtcgaaggagtagccttcctcgtcccttccgaggacgtagaacttgagagcaacgagaccgaaggctatcggctccctctcgacctttgcaaggccgtacttctcggggatgactgccttaagcttctcctcgagctcgtcgaggttgacatccgggtcggtcggcatgacctttataacgccaacaaggttgtagtcgctcatatcattcacctcctaactcacggcccctcccatccgcacttggggcacttgtagggcacgctgagcaccctgcagctttcgcagcgccatatgatcgcctcaccgcagttcgggcaaacgaagtgagtggcgtgctcccttggggttatctcctttccgcatgaggtgcatacgggtacctcgaacttcatctccactgcgaacacctccaagaaaggtgggtttttaaacctctggtgagcgttgcccagtcgatttataagcttttcccatatccccagttagcatatcaaggacttcgggcagctcaccgattgagggtatctcaaagcccctctcggagattctcctgacgccttcagcctcggggtttatccacgccccccacatgccaaccctcagggctccttcaaagtcctccgcataggtgtcgccgacgtgaagggcctcctccggctcaacaccgaagacctccagaggctttctaaacatctccggaagcggcttgaaggccccaacctcatccgcgaagaacgtccggtctatgtacctcataaggccaaccctctcgaggagcagtctcgtataggaacccggccagaacatgacgttgccagttacagtaaccttcagaccgcgcctcttggcgtccttgagggcatcctccgccccgggtaggacgaggtcaccgacatttagggtggccctcgccgcggccctccttataacctcgatgtccacgccaaggatttccgcgagcatttcctggctctcctcaagcgcccttttcggatcgccttcgcccctggccctcattccctttatcctcgccctcgtcagcattatggcctccacaacgtcgacgatgcaggtgcccatgatgtttgagagctctgctgagaaagcgtcgagcatcccgttcatatcgagaagtgtgttccagacgtcaaatgagaccagcttcatggacatcaccacctggagatgggaaagggagttaaaaactcagcgctcggcaaaggcgaggaagcgcaggccctccatgagacctgccttcctgagcacgtccttgatgtgcctgtggcgggagcgcatcacgaagagctcgtagaacccctcgaggttgccccagtgcccgtaggcggagagagccagatacatgacctcctttggcttgagtttcctcccaaggctctcctcgaaagccccaagggcaggccggagcttctcaagaaggccctccgcgcttatgaggtggagcatcaaatcctcaaccgtcggcttcttccagtcaataagctcgtcctcaaaggggagacctataatgagcggcacgatgaacgtgttccagaccaagtaaaaatccccggctttccttggactaaaggatgccagtttgccagttattgacgccatggccgcttccctgtcctcatcgacgtcaatggcaacccctattctctcaacgccgaagccaaagacgtccatggctttgaggaagttgcccaggttccttatgacaccggagtttccctcgctcgggattacggcaacgtactttccgtccttatggaggaggtcaaagttgtcgcgctcaaagaccttctcaatgaacttcaggttccttggcgcggttctggattctctgaagtcgaagagcttcttcatgactgccttgaagaacttggagtccgtcttcccttcaacaaagagaaccgagaccggagcatcttctccagaaaaaccaccgcggacatcaaagtcaaggtacttcctgagttcatagacctccttgagagtcaggcttttcatagtgtccgagtaaacgaggatgttctcctcgcttttcctgaagcgttcagcgagaaggtcgataacctcaaggctcgatgttaccagcgtctcttcgcccgaaagggaatcaacgaacttcaagaggtcttccctgttctttccatactcgggaaatagaaccgcatctccaaactgctcccatttgtttccagtaacaaccctcattcacttcaccatgtcaacagctattgcaccgataaccgcgaacgcgctcactatgaccgtcgcgttcaggtactggacgggtgtgaagtgagcgacaccgtttatgtcgtaaaggtagatgagaagcgccgaaatagtgtacgagataacggacacgcttatgagcctctttggcaggtggaacagctcctccctcttcatattcccgagccgggacttcacgaggaacaggtacgcgatgcccagggtgagcagaaatatcacaacggctctttcaagggaaatcgccttggcaacgtcccagagctcgcctgtgaaaaggaatgggagtgcaaaggtcacagccccgatgatttcctgagtgatgtcgtcccacccgagggtgtccggttcgtttttcttttcctcggcctctttaatggcctgaagttgcctgctgatgccgtctatcttttgggacagcttctccagttcaatcacctcttgctcaggtttggggctcatcatctcatcagcattggattcactcatcatcgcgtatcgggattggaataaaggggttaaaagaatagtggatgagaaaaccaaaatcagttgaaccactaagccccttcttcaggctcggcttcttcgagtttctccttcaggaactgcttcaggacgtagggacactgctcctggatgaattccgcaaattccctcatccgtttaacggttatttcgcttacgtagtgctcgaactggcacgcgtcctgctctgcgatctccggtggtatgccgagtatgtccgtgaagaacttcgtaaggaatacgtgcttggaatacgtgttttcggcaatttcccttcccttttcggtcaggagtattctgtcgtacttttcgtattcaatgagacccttttcagcgagttttttaagggcatcaacaacgctcgggggcctgacgttcagggccttcgctatgtccttgacgcggatgactcctttgttcttgtggagaatatacatagtttcaaggtactcttcctccctcttcgttacttccacgtcaaccacctggttttaggttcaccaaaaacctttaagtagttttcccaaaacttaaaagttttaggaacacctttgatgtggtgatagaaatggtgctgtacttcattgggcttgggctttacgatgaaaaggacatcacactcaagggactggaaacggcgagaaggtgtgataaagtcttcgctgagttctacacttcccttttagcaggtaccacccttgagaaaattgaggagctcatcggcaagccgatagttcgactcagcagggaggatgttgagctgaacttcgagagaatagttcttcccgaggctaaggacaaagacgttgcgtttttaaccgccggagacccgatggtggcaactactcactcagacctcaggataagggcaaagaaagctggagttaagagctacgttatccacgctccaagcatttactccgcggtggcaatcaccggtcttcagatatacaagttcgggaagagcgctaccgttgcctatcccgagaagaactggttcccgacgagccactacgacgtgataagggataacaaagaaaggggtctccacacgcttctgttcctcgacatcaaggcagaccagaaccgctacatgacggccaatgaagcgatggagatacttctcaaagtcgaggaaatgaaaggtgaaggagtgttcacccctgagactctcgttgtcgtcttagcgagggctggttcgcttgagccgactctgagggccggctacgtcagggagctcataaacgaggacttcggaagacagccccacgtccttatcgtcccaggcaggcttcacatagttgaggcagaatacctggtggagttcgctggagcacccgagaagatactcgaagaagtttagcgaaagctttatattttcccaccctttcactacttcgggcgggcccgtggtctagactggttatgacgccgccctcacacggcggaggtccggggttcgaatccccgcgggcccaccacaacgattctaaaaagctcataacgtccccctccccaaaaagaatgattctgagcaggtcgttgatgaactgagactttctgatgtacagcctgtcaagaacttcgccgacatcttcatcaagcgtgatgtggagccttgtctttcgcttcttttctggcttttgggctgtgtgagagccgcgttcaggagtggccactttgcccatttgtcccactctttatcaccgaggtcatatagagtattatgatatatatgcatgcggcatcacctcaggtccttgagaagctcttctgccttctgctgttgggtgtagtatagaatgtagtcgagcgtcttgtggccggtaatctttgctataagctgtggagcaacgcctttctgagatagatatgatattagtgcatacctcaaggcgtgggtgttgaacccgtaggtccttttacaataggttgagaccttccacttgttggcctctttgatgacgtaggagaccctcatcagctctttcttatcaatttcctctggaagaaccatgagcctttcatagccgtctttccgcttttcgactttgatgtacttctggcgcttgaagggcttttcttcaatgagctttttgaggaagttgatggcctcggtgagcctggagccgttgcggagttgagtcaggagtatgatgtcgtaggctttggatgtgtcacgggtggcttggcgatagtggttgaggatctgtcgataggttttctcatagtcgaggcctttgtcccatgcgaagggtttcaccacgtttctcacctcatttcttaactttcgtctttatttcgccttgaatgttaaaaataagtgcgataaatggcttaactttcgtatgaaagttaagactcactgacatcacgctcctcaacctcaggccctagcttgagaagggcctttttgaaggccttgaactccgaggggtcaaaatcaatagagcatgctacatcctcattaatgacgaggatcttcgccttgtcctgatccacttcaattctgactgccttccttgcggcgagaccaaagtacaggttcgcgacccctgttcgctttatgtcgatcttaccaccatatatatgggctagtactaagaggacaaagaacgttgcgcccgcaccaactatgaatccattgacaaacgacaaatccacgctcatcgccccgtcacctccctccgacggcataggctggaatctgagccggctttgccaagttcacaccaaggagaaggccgaggtcatccacaaactcctcaaagctcctgctgacgatcacatcatcgaggctgatgacagcgtagtaatcccgcgccgagccgccgcgccggtactcgaaagaaggctcgacctgctgcacgttgaacatcacaaactgctcctcgttgccgatctgaatgaaatagtacagcgggaccgcgaggagttctgaaagccgcctgagccgctggaactgccagccgttgatctccaactcaccctgcgcccacgcgtccttgatgaccctccagctgatgaacttcagctcgaaggccgcgagcggctcattcgagtttttcctgaagacaagctcatccaggtcgtagagggagaacttgccagggaaggcgtcttcaacgagagtgctgaatatgtacctgttctctgcgctccggatttcccgctgcatgtagtcaaagaagggtctgtagacgtgacggccgtatttcgccgcctggcggatcatctgagcccgagccgcgaccatcactcgccacccccgaggaggacctccatgatctcctgcatgatgtccttcctgtacgtccgcttgaacgcctcagcgcgcttcttcagcccctgcgccgccgcaaggatccgccgcctctcctgctgctccctttcagagtatagttcaagggcagtctggaaggaagtgctcatgacagcacctccgcgagggtcgcctggcgtgttggcgtgatggttttcttctcagccggcttttcgaggagcttcttcagcagttcgagctcctcggcccaaacctccttggcgtctggctcagggtggttctggagggcgcggtagaggtcgcgaggcgagacctccgcgaagagggcctccaagctctcatagcgctccgtcttcgttgacaccgtgtagccgttgaagccacgctcgacaatcctgaacgagtacccgccgcgcttcagctttctcacgaccgcgtagacgttcgtcttgtgggcgtgcaggcccccctcgccgagcttgacccaaacctcgcgggagttcatgagcggtcccccaccgggcgtacttttgttatctgcggcttctcaatcccgaactcttctctcagcttcctcttgaccctctcaacagcttcttctgccgtatctgcacgaggggcaaaccagccctttgcgatgtagtcccctgcatcgtacttgaaatacaccttccacctcatgctcccaccaccttcatcaggagtgcaatgaacaccagggccagctcgcccgccacgccgccggcgagggttgccaagatgatgtccatgaggcggtcagaggtcatgagcgacccctcctgcagagatcccgaacctccttgtcaggccaagtctcaatcttgacgtggagcttgccctccttgacgacattcctgagaatctcgcagactttgtcgacctctgaagcgtcgaagcagtcgccagagtacacccacaccttttcgtgcgggtaacgagtgaagacgagaatcttcgtcatgccctcacctccctgcgctcgatcttcttcagcaggtcttccaaggcatcggcgtaccctgtccagtacgccgcattctccttctcaccgcgagcggagagtgagaacgccgtgtcgcgagctacctggagctcgcgctcgatgtactccagcagggtcggcacttcctcgacctgctccttcctccaccgggcctcggcgaccatggccgccaaggtgtcgcccggatacaccaacaccctcaccatctccgatcacctccttctcaagcggtaaaagccgggcttagactgctcaaccatattcgcccgctccatatcctccagaagaaccaaaacctcgctccgctcaatcccctgctgctccgcctcctcgattatgtcgttgatgtggacaccctcaccgcgctcgtccagggcctcatagtacttcagaatgctccagagcttgtccaccttcctcttcttctcctcggtccagatgacacccgccagccccttcatcacctcctccttttcttcctcgtcagatgaaccggcgaggcgcgtaatcatctcatcaaacagctccttagccgcgagaaaatcagcaagagtggcctcctttctaaggtgcatcctcgcgtgggcctcggtgagcctgataatggcctccatagccctcggcgcggcagaacctatcgcctttgcaaggtcaaccatatacttcttcatgactcctctcaaggcctgaggaaggactacacgcgggatctcacggcgagcataagcaatgaatttggtgagaagctcagaatcataaggcggttcaatcttcccctcatgcttatccaaaactgcatcagcaatctcctccaaaacagaatcctcagtattcctaaacgtcgggatgattaaatcgaaacggctgtaaaacggctggtcaaacaggcgcttaagctcatcaaacggcttataattgtgcctgtcaaactctccccccggcgggttggccgccgctatcacaacagccctcgccataagcctcgtattgaagccggccttattgtacgggaaccagccctgctcaagagcatcgagcatcttatcatagtcctcctccctcatcttgtccagctcatccagggccgcaacgccgcggtcggccagtacgaggacgccagccctgagaaccctcactccatccatcgaatcaatagcagcggttaggccaactccagagctatgggttcctgtggagtggaccccaccaggagcgatctgagccgcgtgcctgatgatctccgactttccagtacttgcatctccaaagaggagaacgtgagagcgcttcctcacatgagttccggtgatgtcatagtcctccccgctaaagagcgccagcaggacggcctttttctcaacctccctgccagtgatagccggcgcgagggagcggatgagtttcgagtcaaactccggatccttcaccatatcctgaaacttctgaacgtcctcaggggttatctcaaggtcctcgatgtccttcgtcaacttcgtgagagagttggcctcaagcacccacccaagagcaggcttcccgttcttcttcctcatgatgcccctgaccacaccagtgatgaggacctcgtcgccagggttcacgtccatcctcgcgttgtcgtcgaggagaatcactctcacataagaggcagtccctgccgcgtggagggcatcagaggggtcttggacaaaaatctctctcatgtctataacagtactcttctcaacgctcaagttgtcagcactcagcctcgccccacacgccgggcactcctttgggacaacaaaattctcatacggcttttggaggagagaaacctcatacccacacttaggacacacaaaaacagccttctcgatgaagcccttcacgccattgctcttctccccctcagcgattgctgagacgacgcccctggcctggacaagcctgccgatgtgctcactcctcacggcacgaggactgatcgtcttcggcaggttcacaaagcggacgtggatcctcgggcgctcctcatagagcatgaactcaggctcattcaggacctccaggacggccttctctgcggccgagatgacaacatcgggctcgttgatgagccgctcagcgaggctcgggttcaccgcgtcgaggacatgccagtccaccctcagacccctgtcctctccgaggaccaggagattcctgagctggtcgaggaacacgtgcttgccgtcctccacgtagttcatgaagaagtcaaagaaagccctgaccagcttctcctcatccgcctgcttaagttcctcctgtttctggagaacctcacgctcctggagaaccatctgaagctcttgaaggatggctttaacagtctcgtccttcaggcggtaaacaaacatacccgtcgtcgggtccttgctcgaccagacgtgcggagagttacggacgaaggagattacattcttgatcgttttgaccttgtacggttccttgttcttggagaaatactgacccaatggagcaagttccttgcggagatcaggatcatacatctccccgttcttcaagaggagatagattgccagacgtttctctgttctatcagcatcagtgacaactctttgtattgcttcaagatatggagttatttctgaaattatactctcgtcagagtccccaagactttcatcaactggtgaatcttcttggggacttggggactctggttctaattgtccccaaccttcttggggactcttggggacttgaggatttggggatatatgtccccaagtcttttcaaggtactccttgagtgtgagaagtgggactgtgtcatcatcctcatacccgatggacttggctactttctgaagcgagttgggtagggtcgatactttcatctctgtcttgccgttttggattagtccaatgaggaacttccacgcgaagtcaaaattgatgtcctcactcatgcttcatccctctatttgcgccttgatctcagaaggcagaaactggagcaggtagcggattgtgtcgtcataggtgagtttctcacccctctggagaatcagtagggctctaagtttctcgacagttgttctcgtggcttttttcaccggcaggtattcccaatcttcacgccccattccgaccaccttgcggtatattttaccgaaacggtaatttttaccgttaatttgtaagcaccaacaatatataaggtttttgggtacagaacagcgcttacttatacatcattgtgaagaagtgatcactttttggtttctctcacgtacctgaactctcgttcatatccagttttcagtttgaatacattttcaataatgacttcaactaaatcaccaggatcaagttggagctcctcacggactttctgagggatcgttaccatccctccacgccccaccctcataatgacccctgtatcttccccgaggatgaagatagtttttaacccgagatcaacataaacgcgccggatggttgctttgatataatcatctttgttgatgtgaaatactgtcctaacgtgacgtggaatagtgaccctcccgtccctgtccaacctggcatgaaatttcgctagcggctcggcgactctggctttgctggtgtcctggtctggcattggcctcaactcctactcatatattatgtatatactctggtatcctgctagaggtgttcatctaaaaaaggttgcgaaattttgcaccttcccgggcgcacttgcggtcatattctcaacgagtttataaatcaaaaaggaaggggttttcaacccgccacgacttttactattcccccctatttcaaaacaagtcctatcaaaaaatggaaaacgaaggaagagatgagcctcggccccccatcgagacgtcactcaccaaagatctccccctgcaacgtttgtgaagaaccaagcgtcaacaaatatgccgagagagatcaggctcgtaagggctactgcaatgatccagagtagagccattggcaagcttgtgagccttgccttgtaccagagtggtgggatcaggtctagtgcaagccctactggaatccctattatgaaccccacagctccgaggagagcacaaagtatcacgaaaggcagaactgccgcggttaaccctaacaagaatactgtccggggagtaggtagtatatgatgtactcgtagagcagtccgttcttccagagatatattactgtgcctatcagtactgctaggctaataagaagcaaaagggccgaagcgtcttgggtaaatactgtaaagttgctaaacgggcttagacttagtgatttgtccactaactctgcagcctccggcgtcattcttcatcccctccgagaagtccgtaccagtcaactgaatccttactgaagaagctactaattgggttcaggccgtcgagcgggttgtcccctctgaactcgacgttgtagtcctgcctctgttttatgctgtacccctttggcgcagttatgtcaactgcagcagtccagatgataccatatcctcttgatgggtaccagctccatctcaccacctttggcgacaggcttagcctgtctacgttctttgtgctcactgtccaaatgttgccatcaagaggaacctcttcacttgtgaagattcctagaaacgtggttctcttgacgatcttcaccctcataactgctgaaagtattcggccattggagaactgtgtaatcttccagttttccgctcctttgtaggggataatgtagtaatcagttgctttcaggcctaagttggccaaaaagctgttatcccataggatttgagtataatagttgaagtggtgataatcccgagtatcgcggaggagtctgtttgtgaaagttatctcatctccacggattctgaaggattcttctggcattagagagtcaatcaggctctggttgttcgtgaatattatcatatcatagctgtcttcgtttttgatgaaggttagccacccgtcgaggtttccgtcgttgttcaggtcgatcctttgaccccaaactccatcagtattgttgtctctcagtgcgagtgtattggttaagtttccaatgctgacgatgcttccgaggtcgcttaaggctccaatcctgatatcgaggggatctagctcaaagtgatcgtcgtcttttacgttgaagaactggatggcgtattggcctccgagtatcagggtctcgatggacaactccccttggtcaataatctcattggtagtgctgttctttgcgatggctttgattttcagagaataaacaccgggttcagcattagctccgagagttatgtttgccttccaaaggcctggtacgtttgggtcttctgtgcagttccatatgtcagcggttccgtcgttatcaatgtcaagggcattcccgtagtcatccacgaactcggctgtaacgcttatcacgtcggcagttggaaaggttgcagatgtgaagggatctcccgaactgctaactatagaaaacgttacctctgtggttgtgttgggcactaaaaccagcccttcaccttctggtgtgtcctggattgttattgttgcgctctggacgtggctagctgttgctggcatcactactaacacaaaaagcaaaaatagacccaccgtcttttttagaccgacctccagttttctcatggggattcccccgggggattttccctatatcaaaaaagcaaagaagttaataagcaaattcgagaaaatctcttagttgggagttataagcaaatgcgaacattttgggtaggaacctcatcgccatacaacccttgtggctgaaatatgcaaatgataagttaattacaacgtttcaaaaggggacttctattgtcttgtttttagatttgaaaagctctaaaggaaaatgtaaaagaaaagtcagcctactatgaccttgactattcttccatctttgtccactatcacggcggtaacctggaacttgaatgggttggttgggtcgaggttcacgtcgaaggcctcgagcgggttctggccgaagagaaggagcattctcccctgaagctggaggaaatactcgagttctggttttggtttttctccgaggagcggcttcaagaactcgccttggaggagttcgcaggcggcgtatgtgccgactctgtcggttcccgccacgacgacgtcggccatcttgatttttccgttcatgagccttatctgaagctcagctggattctcggaggcggggattatgaggatgatgccgtagccattgtcccatttgttaccttttctgtccttgatgtaccatttgccgttctctttgatgaatttgactggtagtctgtcggcgttcttctcgaggatcagtttggtgtactcgttggcaaccggcccgccgacagtgtaaacgatgggtgctattctgtcaggatctttgacctcactgtcgagcatagcatcggcgttgaggttctggactggcgcagttactgccttggcgatgaggcctccaaggtggccgagtcctggaatggcaaactcggcacctttctccttgatgatgtcaatccacttctggactgctatgccgaccttggcacccgccgccacgtcggcccccgccgcgtgttcaccgacgacgatcatcaccgccggaactttcgccgggtcgatgaggggtttttgaggtgtagtctcgttggtctggttctcgtttggtgagtttggctccgaagtctgctcttggtatggatagatctccaccgttccgctaacggctgtgatgtgttggagtatgaggacggccttggagccgaagaggctggtttctatgctcctcagctcaagaatagttttctcacgccaggcatcggcaagctctcccgagatgtctatttcatctccaacatagagggtgtatgtttcgccattgtagtcgttgtctatgacaacttttccactcaggggatcaatgaacttcacgacgagctcatgccaactctcaagaacgccaagctccctggtttcaggattgtcttcagtctggacgttcttaaggaaccaaatgtatttcccgtctgcgtcaacgaagccgttttcggttgccgcgaccccatgagtgttgcccgtctctgtaaagtaaaccgagaaagctgcttcccacccgtctctttttgagtagtcaaatgtgccagtccagttcacgatggcgccagggatttcctttgtccaggtcttgccagctgttacttgaaaggttgtgacgagttgctgttcagctcccactatcccggccggcaccatggtaccagcgaggaggaaaaggagaaaggcggctagccgcttcattttgaatccacctcttcttttttagtggtttgtccaaaaaactttttcctctttgatgtggaaggcttttcggcgctgattttgaaactgcggatcttgatcttctggtcctttgcgagttgcttgatgaggtactcaacgcgctcggcgtctccctcgacgttgagggtgatccagtagcgtccgggcccgcggactttgtcctttgctatctcatagatgagccaaaaaccaagggcgagggagatgtataggagccattcaaacattctccccaacctcctcctttatagcttccttcagctcggcgagcttcttcttgaggtattcaacacggttctccttgaggaggaacttcttcctggcgagctcggcgacctggtcgatgtcaatgttcaggatgtcgcccttggtgatttctgtggagcctgtgatctgcgggattatcgtgcgcagaatcacgagcaggttcgggtcgtccacgatggtctcgatcttggccctcaggagatccttcttcaggtactcgctcaggagctcctctttgagctccctggccttctggtcgatcatcacctcggcgtacttcttcgttgtcttgtagcgcctgtaatagacgaccagcccaccgagaacgacagggaagagatagggcgtccagaggaggtactgttcctcgctcttctcgcggaaggtttcccaactccactgctgcgcctgcagttcctcgatctgtctctctaattcacgtatgcgctggttcttctcttcgagggcctgctcgagtattctgagctgcttcttcagctgctcgttctctacttgtgtcatgttgcaaaatgtggcttgttgtcggagatattctatctgtttctcaagctcagctctctcttgcttctccttctcaagctcgttctcgagtttagctattattgcctggcactcctcgacgcttgagcaggtgtaattggccgtgatgttggccggctcagaagttgtggagttcgtcaggttcgccggggccggcgcggtggtgttggtttggttcgctacggtcacgttgctggcagtcaggttctcttcttctggaaacctcgccgtgaagttgaagggcgcggagatcatgaggtaaacgtagtccttgaatgggatgacctcgatggtgtagtttccgattgttttgttctggccttcaaatacgaggaacgtcgagttttggtactcgatcaccgcagcggtgcggttgtccactctgctcttgtctataaatatgtgcatatcatcaatatatacctcatcgccgacatggagtttgatggcttggctatacgccgctacatatccaagagttcccattatatataatatgaatatcaggctaaaagttagcttcctcattctcccacccctcataagcatctaagaagtggattggtgcgtactctccagccgcggctttgcgggaaattgggggccgtaggagcactttgtactttgtcagcggcccgacgtagattgccttctctattgagagcgtcctcagaagcctcggctcaaccccaagtttttgggcgaattcccgagcatacatcctcttgacgaaccactccttgcactcgctgacgatgctcgggcttagatcgtcatgtctctgtgtgtcaagcgtccaggccatattctttccacgggagatcttcacgtagatctgaagttcctgcctcatgagagtctggaagtaggaaagtttctcgatgatatctcttggtgaacttggagcgaggaggtttgcatcggcgacgaagaagctcatgaggtagtcgcgcttgaggttgccgatccagtttgagtacaccgtgacgagtattgcaaaggtccatatgtatcggtcttcaggcctctcgatgaagtgtgttgtgaagacgctgatctcctttgggttcttcatcatctcgttgagagtaaccccgttctcgacttccagccctttcaggacatggtagaagcggttgatcttcatgagtgtgttgtctatgttgacgtttgtcccttctccgatctccttgacgtagttcttgaactcctcgatgttcctcttcttccgcttcttgactgtgttgacgtactggtcatatgcatcggcaacgatcaggccctcaatcgagcctgttgggagcgtcctcgcgatgatgtcaatcaggtcggcctcggtgaaggttagcggcttgaagaactctattcctggatggttctcgtacttctggaggaagttgatgaatctcggcgtcgcagggctgtacacaacggccctgaatggccactcattgaggtcctcaatatcaatcccgaacttttcgagcaggactcggcgcatcctgctgtcgttgttggggaggttcatgaaagctcgctctgatttggcctcaagcgcgggttctatttcgaagaccttgcggcccctcaggaagtcgatttccatcagtgtttgggcgagggtcgtctttccggctccagtctgccccattatgagcctgtggcttgggccgctcagaggataggcgagtttgccccttttggtgaggccaaaggtcaggagcgggttctctgaatatgaagttttttcttcatatctctgcaagtcttcctccagcacgtcccggggccagatctcctcgaggttcgctctcattcatccgctccctccagggtctgctcaagaagtatctcctcgagctggccgaagatgtcgtcgaaaagctcccacaaggcgtcttcaatccctggccggagctttagtccattctcacccctcaccacgtagccctcgaggagaaggaacttcatcgccttgctgattgttgattcgtcctttctgagtatctttgcaatatcttgggacttcatctctccatggattagtagtgtcatgaggatcttcgtcctcaggtgggctttccttccaaaaacgcgcctcatcgagttgattttctcttcaacgtcctcgccagaatagatgcctttaaatgcatactcgagggcttctttcaggcgctcgatggtttcgaaggcgagctcgagcttcctggtgacgtagatgttcggcagtcccctggcttccttttctgttgcctcggccttcttggcgactgtcttagctatgtcaatgtacttcttctctggcgtaagtttggcgttcttagagcgctctataatgacatctatactctccactaacccttttgatgagtttcccactaccaccgtatggaccccctttcttttcctcagtcaggatgcgtcaacttggcgtggggtatacgccaactcacctccgcggtgttctggcccgaatagggccatccagggggccggaccgttcggaatccctacttggcccgatgcccctttctggatggcaaaaatgggagaggtcaaagctctccctcctttttgagtgcgtctatgatggcggtcagctcttctttcctcatcttgcccatctctgcgaagaagccctttccgaggacttccttcatgattctcagcgcgtcctcgtagcccttctcgcgtaggctgtcgaagaattcccttggcagggccgcgatcgtcctggctaattcgtagcctttctcggcgtaggccctcagtgcggtgttctctgccttgaggtattctatctccttgagggcgcggaggtatagttcgtctccaatgttcaccggttcccaaacgtaaactggaatctgctctccagtggttttgtcaacctcgtagtaggttggcctgctcggcttctttgctgcgattattctcgtgttcccatagccgaatattgcgtcgcccggaatgaagtggactgttccatcccactgctgtgagagaagtgacttgttcggatagactctccacccgagctctgtctcgacaatgtggggctttatcctgcggcttttgacttcttttgatgtgaacggtagctttattccaagaagcggcttttccttgacccaaatttccgtttctggtgatgtgagcggtatgagcctctttgagcgggccttcgcactctcgacccacgtggccctcatgaactcgacgaagagtatcgagccaatgaggacatagaagctataacgaggcttggccagggcttggtgaatcttgacgagcgtgtcgtaaaagcccgggaaggcgagcatgatcagcccgacggctattccggctccgattccgagcagtgtgaacttgagtatcctgcttttctgactgtcttttccttcgacctttgccgcgagctcggcgcggatgtcctcgcggacttcaggcgcggcttccatgactatcacccttctcaagctgtttcagttctctgttcacgcgcgcgagctctttctggagattcgtgaggactcggtgaaggatctcgcgcttcctcttgaggtacaccttcctgctgaccatctcaatcaccctccatcaggccgaccaggaataccaaagcggtgggcacgatgtagaagccccacatcaggctgaagatcgggctgaagaggagcgtcaggatcggcgagccaaagaggaggagcagaccccaaggcacaaagtcaacattgaagactttccaggcagtgatggcaacggcgaccatgatcatcattgaggttatagggtagaggaaccacagaaagatcgctcctggtgagtttgtcgagtccggcggtaggagtagggcgaagggtacaatgtaagcgagtgcaaggaggacgccactcttcaggctcatgcgcttacctccttgcggtggtttccaaggtcttcttcaattgcccacatcaggagcagcccaacaatcatgccgagtgcaaaagctgcctcagggctcaggttcaggaaagttagtccaaacatcagatcacccccttttcaccaagtaaaggccaccaatcaggtggcgaaaagtcacgttctcgactttgatcgggagctgtatcgtggtgttctggagcgctgtggtattttccacgctcatgtcctgtgcgctcggcaggttgtaggcaatataggctttctcagcatctctccagccgcgtcctggcctccagctgaagccccgcacgaagaacgctccgatccaaccgtcgccgactggtgctttcttccaccagatgtcggcatactggtcgttttcgactggaaaagcaaatatcccaaaatagaccttccaaaccctcaccttgacatccacgtcggtagggattaaatagctccagtagactttgctctcgttaagctggacgtagtagtccgggttccagaagtgctcgccttcgatccagaagccttcgccaggcttgagccctttatagccgtccaccggcatgacttccctcttgaagagaccgagggccttgtcggcagtactcttgaggaggtctttcagtgaccaggctccaaccggcccggccattacaaccagaaacaaaactgcaactgcaacgacttttttcctcacttcaatcaccccacacgagcagataaatgtagatgagcacgaggctagctcctacaggaccgaggaggtggagggccgcagtattgccatagtttggatacagagagtacccaatgacgtcatcaagccaaataatgaatccggagacaaaagcaaccgttgaggcgaagcctgcgttaagatactcgaggatgacaccgaaaagcatgatcgccgctccccaaatgatgtgtgacaccccaaccatgctgacgaatgctagggcaaaggccactggaatgaggatggcgagcgcattctcccactcgaagttgaactttcccttccagtcgctgatgagcacgatgaggaagcttggaatcagcacgatgtagacaaacgcctgatcctggcccatcttgattgtctcgggcataacgtagaatatcatgagtgaggtgaagaggcctattccggcccaaaacagcgccccggatactgtcccttcatcatagctggtgatgtacgcgacagtagcgaggacaagcatcgcgccggcggcgtagacgagataatagtagttctttgcgaggaatatggagaggagcatgaggaggatggccccaaagatgtcagcccttcttgaggcgatgaagtatgcaaagaacgctgcaactacaacgaagacgctcagcatgactgcctgtgaggtcgcggcggcgagggaagggttgtacatcacttaccacctccgacctggacggcatccttgatcgcgctcaggtcgccactcgctatcggcccgaggaggccgagggcatagaggatgatcaatgccagcacgaggaagacgatggcttttccccaatttccgaagacatagccacctaaggtcgtcaggaagaggaagagtgccgtccagagcctgatgccgagccagtcgccgatcataatgagtggtgttgccaggaactggcctccattggacgagagatcccaaaagaagacaaggcccactattcccaacgtgatgaagaacgctgcctcaccgctggaataccacatcgtcgcaagtgcaaacgtgatgatgaatacgaggaatatgatcgcaagcagtcccatttttctcacctctctcgcaagaaggaaaaacgaaaactcagatccagccgagctcgtcggctatcaccatcaccgtggcgctcgggaaccagtctattggcgctggaaggataccgtcaactccacccaccactgcggcttttgggttgtcggtgagggcgtaggcgatgaaagcgttgaatggagtttcgatgaggtcgcccactcctggtattatgttgagagcgtcaatgacgtccgcgatgatcgcaatccctaaacgaattgggagcggtttgtcctccaaaccccacatagttcagtcctccacaacctcgtcaacgatgcggagtacaagggcgatcgctatcgcaagactgacgttcttgatgaactcgttgaagcctacgaggaacgctgtaaagaggaggatgaccaggagaaagatgataaacttcttcatccgagcaacctcctgaggaagtcgatgagccctccactttcgcttggctcggctttgaccgcggcgtaggcatcaacgactccggctcctgaccacgttggcagggcgtcaatgccatcgagcggataggccgtcttctcgagaatgagtttgatcgtctcaggtgtgaggtctccgtgcttctgtaaaatcagcgccacgacgccactcacgtgaggagttgccatggatgttccactcatggctatgaactcgtttctcgtcccggccttggcgcttagtatcttgactcctggagccgcgatgtcgggcttgatgtcgtagatgttcaggcccggcccctttcctgagaaagatgccaccttcatgttcctgtcaaccgcggccacagtgatggctccagtagctatgcctggactgtcaatgaccgcgaactcgtttccggccgcgatgacaaccgggatgtgctcctctctgatgatctgctcgaccttctgaaccattgggtctcttgggcttccaaatggggaacccaagctcattgagatgactatcggctcgccagggtgcttctttttccactcaacaacatagtcgaggccttggatgatctgcgtcatcgtgccgccgccgtcctggccgagaacctttaccgcgagaatgttggcctcgggagcaacaccgcttacataaacttctttcccttcccaagtaaccttagtaggccttcctgcgataatgccagctacatgggttccatgaccgttcagatcttttgccggctcgtcagttacaaagttctcaaagcccacacaagccccctggagcatcacgtggtcacagtccacaccggtatcaagaaccgcaaccgtgacgcccttgccggtgattccttccttactccaggcgaggtcagccttaacgagcttgatgttccagattgcgccggaaacctgttcaggagttatcgtgacgttggcaggcgtgaacgtagtctcgttctcaagtatagtcgggccggtctcgacgtaaaggtcgggccaaacttcgcggatgtagaacctatagtcgaagtcaaaagcctggctgtaaacgaggtttttgatgagtgatggtcttgccttgagtgagattgcattgatgtcgtcatcaacataaagtacctcagcaccgagggcttcaagtgcctccttgagccggtcatttggcttcgtccaggtgatgaaaatccactgaatcggctcatcgttctggactttctggtggaagacctgagcccactttagggcagcatcggtgaggttagcactctcctgaattgaacccgaaagccagtcccaaaacctctcgtcgacatagatgcctgtgtttgtcttgataaggccttttgagtcgaagcgccaggctttgaaggcgataagggccttgttcacatagtctgagattgtgagtgatggcatttcgagagcaggcgtgctgatggtctcgttggagctgctgtcagctactgcaacgctgagggttgaaagaagcataatgaaaataatggaaatcactggaagggccctcatttaatcaggccccctttcaagagcttgtagagtcctcgtcctcgtcaaggccgaggatggacttccagtcgagtgaaggcttgaagaggccgcgcccacttggctgtagtatgggattgaatcctctaaagtcctcgcttgaaacgctaagctcatttagtgacctttctcttaagctgtagctgtttggaattgtgatgtcaccaagcccctttgtgatctcccattgtccccacgcaaatctcgcccaattgccgacccactttccgaaaactgttattatgtcgtcgatgttcacgttcttattgaatatgttgccgctgtaaacctcctcttcgttaccaaacaagccccaaaggtatgttgttctctttatgactttgacgtcggttctgtcaacatttccgaagccctctttccagtgctctctaccctttaggggtatgatgtagtaatcaacagccttgatgccgagctttgcaagaagactctcatcccaaaccacgtatgccttgtagttgttgtactctttgaaaaccttgttcgtgaacttgacccttccatcgtcactcctaacctcgaacttgtcctcaaggttgaagtcgtcgaggaggtttgcatcgctggagtagaccatcatgacgtatctgtcgctgtcgtcgtcgctctttgcgaagacaatccagtcgtcaactccatcgctcgtgacgtcgttcttccaggtaaagatgccatcacggtcatcgtccgtgatcgtggtggtgctcaggtttccgaggtctagaatcgctccaaggtcggaaagcccgcggatggtaaactcaagacttccgatttcgacagtatcgccgtccttgatgtcagcaacggcaacccaatacgggccaccggcgatccaaacggagagctcaagggttgcgttgtcaactatttcgccacttgtgctgttctttgcaagggcctcgatcttgagagtgtacgcacccggagtgacgttcgagacgtttattgtagcggtccaaaggccaggcgttgaggtgttcgtgaaggtgtagacgtcagcaacgctgtctccgttcatgtcgagagcatttccatattcatcgacgaactttgcggtaacctcaagcgtgtcggcgttcgtgtagctgctcagcgcgaagggttcgccagagctggttagtattgtgacgttcatagtcgccggatagccagggatcagctcaatgccaggatcggttattgcgttcccccactccgtctcggtgatggtcgctgccctcactacggcaaagacggaaaacacaactacaagggctacaaacagcccgaggggctttttccacccaaccattttctatcaacctccattcgtgtgagttttccgggtggcgcaaacaaccaagtcagccacctccaaagccgaaaaagctcttgatcatcttgaccatgcccataatcctgtccagaatgctcttccaccacgaggtttccttgttgtagaagactttgatttccgcttctccagaaacaaatgcatcggctggaaccttgaccgcaatggtgccgtcctcaagctcttcgacctgcagggtctctcttgagcctgtcaaggcgacggcctcaatgacgtcgttagtgtcttcgacatccttgagcggcacgtaaatagtgacgttgctcacgtcagcgttgcttgagaccttgatgaccttgacccacgtgtcggcttttcctttcacggcgttctcggccatcttctgcgcagtctgccagtcgaggatgtttctaaagtcttcgagcttcgccgggaagttcagctcttctttcgagagcgtccagatacttctgatccagtgagtactgatctcaccgggctcaagcgtgtcggtgcggatgaggtagagctgacttgagttctcatcaggcctccaggaaaccatgcggacgccgtcaagttcaaactgtgggtactggagcacggagaaaccgagcgcagttggatcgagggagtacacgatgttcagctttgcaccggttgggtttgtgactttgaactcgcgctcatagacgtatgtcttttgatcctcgtcaaggattatgacgtcatcaaagtcgccatttgtgcggatggtctcgaactgaattggcaagttgaactggatcttgtcggcgcggtaccagtagtgaccctgatagtaaaagtcggcgttggtgtagtcgctcttgagcttctcggcgctcgtgatgctcatgttgaccgcgctctcaggaacgggcacgtagccgctcgggtcggtcgtgctgacctcaagccccgcgtagaaggtcgcacggtcgcgagtgaggtcgatgagcgggctgaagatctgtctgaatgaagcgggctcggagagcttcttgcggccggcgaggtagaggaggttgacttcgtcctgtgaaagtgctttcccgtcgtaaacccgcacttcgtcaacgatgacatcccctccattcgtatcaggatgtattttgaaagtcgatgacgtcagcgtgtaaccccctgtgattgatgtactagcatctacatctgcatctatgtagatatatgactctcctgtatcaaaactcaaaacaaacgttgcaaagtaccacttgccaagttcaagcgagctctgcgaaataaacgccttaccttcaccactctcagaaatccattgtgcgtatattttgttatctgaacttctccatacaatcgccaaatctcctatatcaaaaagtctgatgtagttgcgatcactgtcgtctatgactttgaaccacaatgcaatcgtgatttgttgcgacgaaagagttgctgaaccggaaactcctgctcctgttttgaactcaaacgcattcccgattttgcccgtcaccagtttcggatatcctgtcgtcgtgttgaacactatcgtcgcattcgtcagcgtcccgctgtagtagcaaggtgtcgtgttcgtgctcgcatcgtacgcgtccagcccgcagaacagcgtcacgtcgctgaagcttgagtcctctggaacgatgacccactttggcaagtcgattttaggaacatgtgtttctgcggcgcttgccgtgcccgccagggccgcgagaaagagagccactaccaataccccaagtgctttccgaaacctcacatccacatccctccggagggttgctcggcggcctcatcgccgcgggcgtggccgccctgccggctcggccttgctatgaatttgagagaagtgatttgagcgaaagagacttctcaacgtgttactcacaaaaaagaaagctaaaatacattgtaacaaaagaaatcacaagagaagctttttcacgaagtcctcgaatttctgcgtcggttttcgcctgccatcggcgtctatgatgacatagcggggatcatcgccatagatggagtgatagaggttgaacaggcgccacacgcgcatatgattaaggccgtatttcctcgcaattccccttatcgagacaatccgaatccgatccaaaatatatcacctcccacatttcttcaaatagacggccgtgaaaagaagaagtgtcatggcgagtacaagaatgaaaagggaagttagagtgatgcagatcgtataccaactgacttggcggagagctttgtcgagggcaggcatgagatcaatcatgagtctgcccctccaacacctttctaagatcatcaaccaccttcgcgtaggcctcgtcggcgagaaccgtcaggttgaggtagtgccgctctagaactgagcgaggagcgcggccctggatgaagtcgatgacttccatcgagacttttctctgcgcaaggaaggttgagaaccacttcctcactgtagatgccgataccctcttgtaagtcgtcctcggttgcgcctggaagtaggttatgctcatccgctcaaggctcctggcaaagtccgccggcatgtaggcccaaaatgccctcttcgttcctttgccatgctcagccatcgggtacctggcgaccttctcgttcacgatgacgagcttttgagggtcataggtattcagcatcttcacgatgtgcttgagcctcaggccagtgaaggccagaagcttgaagagaacctcagcctctttgccgtagtgctttgtcagctcgatgtaggcttcacgtagctcctcgttgctgatgaaaacctgccttggtgttcccctcttgaatgtcagcggcttcttgaagagcgccgcagtgccctcgttgatgaggccctcgtcgaggaggaagttcacgaagtttctcagccccttgacgatcttctcgttgtagttctcttgctggagcgagactttcagccccttgatgtctctgattgtgtgccgaccaaaaaagcgttcgagcgcgctgatgtagtctttcattgtggttctggctattctgtgggagagccattcggcaaactggcctttgtaggtgtcccaacagtcgtttagactgccctcacacggcggaggtccggggttcgaatccccgcgggcccaccatagaaactttgcagagcaaagtttcatcaaagagtgaatgtcctttttgagtgtcctgcttttcagtgattctcaccataaattgggcaatcctcaagggtttactcacaatataacgcccgaagggcgttaaaaaagaagaaaacccgcacttccctactcatctatcacagagaatctagctacatcaagccaacttcaagaagacattcgagcttttggtaagcttttcacaaaagcttcctcgcgaagtttgatcaaagttcgtggttcttcttagaattgctccactataaggattttcaaaatactcaagccaaacatcagtgaattcctctaagtttcagcccgctgaaaaggagtttctaacaccttgacgccctacgggcgtcaattaaaaagcaaactcacagagaacaagcggataaaagtggaattcacaacctaagacagcattcaaaaagaaaatcctctcgaaagacctgtcaaacaagaaccacaaactttgatgaaactttgcttgcaaagtttcagcgccgctttcactgtcgttcaagcgtccttaacggatggcggaagaggagtatgcgtttctaacgagctaacttttgaggggttttactttcaattggcctgattcaaaaggattttctcaccgtatagtgcccaaggggcactaaaaagaaagttaaaatcacaattagtggggaatttcaatattaaacccatgcgagcttgccttatataggagcatacactcatcgaagagcaagttcgagaagaatggcacacttttagtatagcttttggaaaaacttggtgaaaagcctaatctagagaggtcttccttataaagtgttagattcgcggaaccctagtcgctgatatttccatgaagtatgttgtttctcctcgatatccaatattgagccccgtagagagtacgagatacactggaggataacacaacagcttaatgtttcggtttttataaaacagaacttctttcgatgagcttataatctttgattcgaaaatccttcgaggtgattctggtatggaagccaagggcggatactggggaaagattctgagagttaacctaaccaccaaggaagtcaaagtcgagccccttcccgaggagttcccgaggaagtacctcggcggcgtcggttttggaacgagggttctctacgaggaggttccaaaaggagccgacccgctcgggcccgagaacaagatgataataacacccggtctcttcgttgacacaggtataggaaccggctcaaagaccgcttttaacttcaagagtccactcacaggcggctacggtagggcaatggccggtgccgagctcggcgtccagctcaagagggccggctacgacatgctcataatcgagggccagagcgaagagcccgtccttctggttatcaacgatgacgaggttaagatagttcccgccgatgcctactggggcctcaccaccggtgaggcgaggagcaaggccaaggaggagtacccaggctacgcaaccgctttcatcggcccggccggtgagaggctcagcctcatctcaataattgagaccgacgagaggcaggcggccaggggcggccccggtgcggtccttggaagcaagaagctcaagggaatcctcgtcaagggtagcaagaaggtcccgatagccgacccagagaagctccgcgagctgataaagaagtgggcgctcatcttcaaggaccaccctgctacaaaggccgacatggagtatggaagcggcgagttcctcgactggatgaaccgcgagaggggaaccttcccggtcaggaactggcagatgggcttcttcaagaaggcctacgagaaagccaaggaggagggaagggagcacatcggcatagacccctacttctgggcgccgaagtaccgcgctggaaggaggccgtgcccgctctgtaacaagccgtgcagccagtacgtgaaggtcgagagcaagaagtggggcaccttcatggtcgacggcccagagtacgagaccctctactcctttggcggtgtgctggaaatagacgactttgagacagtagcttatctcaactacctcgccgaccagtacggtctcgatacaatctccgcgggtgtcacaatcgcatgggccatggaagcctacgagcgcggtctcctcaccaaagaggacaccgatggcatagagctcacctttggcaacggcgaggcggcagttgaggccctcagaaagatggcctaccgcgagggcaacctcggaaagctccttgctgacggtgtcaagagggccagcgagaggcttggaaaggagagctggaagttcgccatgcacgtcaagggcatggagccgccagcttacgatgtccgcggcataaagggaatggcgcttgcctttgcggtcagcgtccgcggtgccgaccacctcacagccggagcctacggaaccgagctcgtcggcaggtggtggaagttcgacggcgttgacaggacgaagggcgagaacaagggattcgagatagccttccacgagaacctcatggcgatctacgacgccaccggaacgtgcaagttctcaaggcacatgtacttcctcgagggcttccctgagctcatcgaggccgttaccggcatgaacatcggcgaggcagagctgatggtcatcggcgagaggataatgaacatagccagggccttcaacgtcagggaaggcttcagcaggaaggacgacacgctcccgtacaggatcatgtgggagccgatcccggagggagtcagcaagggcctgcacgtcccgccgtgggagctcgacaggatgctcgacgagtactaccaggcccgtggctggagcagggacggaatcccgaccaaggccaagctcatcgccctcgacctcccggacatcgcggaggacatcggggctggaatttgagccctctttttatttccccttcttccccagtgatcccaatgaatcagaacctaaaagcctgcaagaactgccgctggttcggcccgatagattcctgcctgccgaaccacgggatatgcaggaagcacatgaaaaccgttcacatgaacttcgtctgcgacgactgggagcctctctggggagaaagggagtagctacctcttgtaaaccccgatatcgacaacaacgtgccagactcctggggcgtagcgctttatcaccagctccttcagcttctcagcctcgtagccgtgctcccttgcgattctcttgaaggttgcgaagggttcctcaggccttagcctctctggaacggtgttgtgatagtggattattgcctcatctttcgctatgctcagggcttttgggatgaactcatgggtagtgacaacataccccatgagaatcctgtcggcgatgttttctgcgggaaagtcgcggttgtccatgttgtacggcgtcatcaaatcctgaacgccgttgagccagatgttctcaaccaaaaagcggaaggtgtaggggtctttttcgattgcaatgaccctagcacccttgtggacggtcatcggaagactgagatgaccgattccggcgaacatatcaactacaagctcgccaggcttggctacctctgccatcctaacgcgctcctttacgttggcgggtgaaaacattatcctagcaacgtccagcttgtacttaacgccgttttcaacgtgaaccgtaatagtgtcgttcccatacaagagctcgtagtcgggcttccttgtttcgccgtggatgtggccttttctcaatactgcctttgcgccgataacttgagcataaacttcggctatcctccttttgtaaggctcaagctcgggtcttagcgggagaattaaaacgtcccctatctgaacccagtgcttggggaggagagatacaagctcaggaggaagctcctttgagagtatttcccgtattcgaggcttgattacctgcgtccgcatcggagtaaacacggggatgagctttaaaagggttccgtcgtttcgtcaaaaaacgatgagaaaggcttaaaagatgaaacggcgagagataaaaatagacaacgtttgaaccggaggtcgatgaagggtatggaggacgaacccccgaatagtcggtttttcggccttttgggtaagaagaaagaagaggctgttttggagcagaccctcagcagggaggcctacgaaaactaccgccggcttttgatgagggccagacccgaagttatgggctcgaagctcgtggtacaccttcccgacgcggatattgagcttgacgagggcagactgagggtcaaggccagaaataagaagaacgccgagaaggttttaaggaatttgcaccactatgaaagccccccgagcctctggccggcctacgggctgagctattcgataaagcggaaaagacgagttgtcctctgattcaaaccagaacctttaaattcttccctccctcaacttttcttcgcggatgacgacccttgcccagtctgaactgtgatgacgtcggtattagctgacgcaggggcggggaggtttgcgggccgatgatccgccccgcttatggaggtgaagcgatgaacggcaacgaagagggcgacggcctcatcgagttctacgccagcgaggccctaacctgcccgaggaggatttacttcaggctcaagggatatcctcaaaagtggccggagttcgtgagggtcaggctcaaccagggcatcaacacccaccagatactcggacagatacttcaggagcgctttggcgttgaactcgaaaagcaccttgtcctgcgctccagcaagctcggattcgagatacacgggcggatagatgcatttaaagactttccaatcgagattaagggaaagaccagcctgccaaaggtgccctacgactaccaccttgcccagctcaacgtctatcttcgatgggcggaggctgaatacggctacctctattacataaagctacacgaagaaccgatgaaaatcatcaacaagctggacatctcgtctttccccgtgataaagggccccaacttcagggtttttgaggtgccctacgacaaatccctgttcaaggaaacacttcgccacttctacaaggttaagaaagcctacgaaaacgaccgtcttcccgagggctggaagagctatgcctgcaggttctgcccctacaggcacatctgctatccggatagggactgggaggactcggaatgaggcttaaaccccttatgatctcaacgctcctcctgaccatctacgggctaatgtttatggcgtattactatcgaacgggctccgaggtttatctggcgttctcactgtttgctctggcactggcatacgggacaggtaaaggaaacagaaccgctgttaaaattgcactcgtctttgctggccttgagttcctgatggcgcttttctacctgatatcaggagcgctgttgtacgcggtggacgccgctatgagctttttcataattcacgacgtaatgggctacatcgggaaggtttatcaggaagaaaaagaagagacgcccgagcaactttaaaattctggaatccttatcggcgcctgaagctccttctccgagctttccaggttcgttgcaagcatctttatcctctcaacgcccttgatctccctaatgaactctgcaacgctcctgggaacgagctcttcccagggctcaccctcgaccatgcgcctccttatctcagtagcagagagaatgtccttcctgaacatcggctggacgatgacctcgtagcccttctctctgaatagctgggcaacgagggagttaccagtgaagaccacgtcaaagcgcggaaccatgctcacaacgtaggtcgcccatatggcgttgaagtttatgtcagggagcgggattaggtagtatctcttttcagttagctccgcctcctcaagcgcccttatcagcatctccattctctcgctcgttgtgaacgggttcttcaaggtatggctggcctgagcgctaccgatgccaatgattacctcatcgacctgcgaaaaaacgaattcaagagcctttatgtggccgttgtggacgggctggaagcggccgacgaagaggcctcgcttaaccatttgaatcacctccattgcccaaaccacaaacgcactcaactccctcctcagttgatgctttcttaaaatccgagtccatagtgactagtgaaagctcataaaacttggctgtggcaaggataattgcatcgttcggcaggaggccgtatttctttagaaaaccaaaggccatatcgctgatttcttcggtaatcggcagttctacaaagttgtcccttaagaagaggtagagcttttcgattttatctccgtatgcatttatttccctaacgctgtttctgagtgtcaagtaactcttcccggttacctgtttaatgaacacaaagagaacctcgctgaagattatgggatttatgaactttggattatcttctaaggactcaagcagttccttcgcctggggatttcctctgagggcctccagaatgaccgaagaatcaaccaaatacctcttcatagaactccatcctcagctcttttgccgatttttctgagggcatcattccaaatatgtccttaactttcactctcggctttttcttggccttccaaagagcctccaggagcaccgaaagttcctttttgaaaatttcttccatcccatcagggactactaccctaacgttcacctctcccatcttcccaccactcccatgtcttcctcaggactgataacgttttctcataccagcttttcaacaactcctataaactcctcaatcttcggaaggatgtccgtgatttcctcagggtctggagagaaacccacgtcgtactgggtttgatgtctcaggtttctgacgtagtccagatacctcacccacttaacgtcgagaaggccaggttttacgtagaattccctgagataagctgaaatgcaagcgtgactcttctcccgccatccatctttgaaaagcaaagccctcgcagcatgaaacattgcaaggtaagccattacgagtgcaccgtcgtatatccccatctcaaggttctttcgggatgactccaagaaggaacgtgccttgcgaatgctaaggcgagctagttctcgctggggctccattcgcctcagatagcccttctctacgcactcctcaaacctcaccgagttcaccccacaggacaagggaggaaagtttgataccccaatataggtacgggttttcttccttcaaacgggccagtttttccctcgtaagcacgagaagatcgatttccctctcagtaacagtttcaagctcctctttgaattccataatcctgagcgggtcgtttttttcaactaaaacccatatgtcgaggtcactctcgggcccgttttcaccgcgagcgaagctaccgtaaacaccgagggcgagcatccactcttctcttagtggaagaattttatccctgagcatccagaagttgaggaacctcttcgtttccctgagctctgccccagactttaagaagaacttcctcccctttttctccagcagcccaagcccaaggagttctttgaggtaaagcgaaaccagccccttgctgattcccagtgcaccacttacctcctcaaccccaaactcctctttctccagtatgtattcaagaatcctttccctcttttccgttgatgcgatcctgtggatcatggtgaacactcccgttcaagatttttgaacctttcgttcaatatttttaaacgagcctcgccctcacctcatcaccaaccttaagtccgagcctctcggcagcggagccctggtttacggctatctcaaggtaaccgtggcttccgggcagggcaaggagttctccgggcttgacctgaccgtaggtgtcgaggtacgggattctcaggccaaagtcggggagttcaacttccctcggccttctgtagtcctcaaggttcagtatgacgttgccgaagtcgtcaacgtagataactttgagcaaccattcatttcccgcattctttggcttgacgtcgagtttgactagatcctccagcggaacctcaacggcgaactcttctggcgatactcccttatcgatgagcgctcccgccggtccgaagacgtccctgccgtggaaggtcgagctaacctcccaacctgtgaagcgcctgagttcctcaacctcgatcgcccacgccttcctcggtctgatgtgcttgagaggaagcgtggccagaccgttgtcaggaacgacgagccactgctcgccttggattattacagcccgcctcgaagtcccaactccagggtctatcacccccacatggaccgttcctttaggggaatattttactacctgctccatgacaaacgacccttcgataatggaatggcgcgttattccatgggtaatatcaacaatggttgcgtttgggtttatcctaagcattgccacattcatctcgccaacgtagggccccctcagtccaaagtccgtcgtcagggttatcactgccatcacccaaagcttattaactttcaaagaatttaaagggtttgatatgagatggagaaaacgtgctgtcctccccatggcagttgtcctacttgtggtagcgtcgggatgcctattcaagcctcccgctcaggtgacattttctgtggacaaaacctcggtttatcccggcggaatttttcatattatagtcacgataaacaacaccggaaaagttggaataaccggtgtcactttagtgctctcaagagatgacttcagaattcttcaagaacctgagttccccaaagttctgaaagtcggagaggctacccagctaatatgggttgtacaagcccccgaaaaacctgggatatactctctccaggtatccctcgagattaaggacgagctgaaaagaacgtggacggggttttacgggaatttcaggataacagtcacaaagcaaaacctagtgccagctaaaataggtttggaagtcaatgcaagcaaagaagtcaggggtggggaggtcgttcaggttgtgcttaaagtcagaaacgaatacgaatctccgataaagatatttgacgttaaaatctctccgctccctggaatggagattcgcccagtatcgcaactgcccattacaattgatccccacgatcaagccattcttaagtacaatatatccaccccctacgcatacagggagggctttgtgtcagtaattgtccattatactttgggaacatcaagagggacttcaataacaagttttcctctgaaagtcatttggaaaccctgggaggcaagtagagaagaccttctcagagcatatggcgaatactacaacatccttcgggagaacagaatagtcgacgggtactgggaagacaagttcaactcaacatcggcttttgaggcttcgttctttaaacccattgcaacggccatagttgaaaatgcaagctccgaatacgatgcagcactgaagctataccaatggataaatgccttataccccctctcagaaaacacaactacccttgatcccggcagaatctttagaaaagaagccataagcccgacagaagagcaaatactcctcacggcatttctcaggtccctaaacattcccgcgcgagtcgtgtcactgtttgatggagacgactgtaccttaagacccataacagaattttacactgcagacggctggtacatagttgatgtaaaacacagtttcatcggaactctggacgagtacatagcaagcccatatttcccaaggatataccagacgatctcacaggaaaactatagaatagtagctcagatgccggaggacgcatacctccacgaacacgaagacgttactgcggacttcacggtaaaccttgattcccgtatctacggcatcataaggaaaaggcttcacccgcagctggtttccaaacttgatatggtgctcgcaggcctgagtgaagaagaacgtctttatgcactcttcctcttcgcttcagcccccaacgatgaactcaacatagtgctgagtacgaaggacgttgacaccattcagaaaacgataaaagcactttatgaattctactgggacgtaccatggaaggatgactttagtgcttactgggagatactaagagggtgaggaagatgatcgcagtcctcagacttggacaccggcctgagagggacaagaggataacgacacacgtagcactgacggcaagggcctttggagccgataaaataataatagccgcagaagaggacgagcatgtcaaagagagcgtggaagacgttgtgaaccgctggggcggtccttttgaaattgaattcaaccccagctggaagaaaatcctgagagagtggaaagataggggaatcatagttcacctcactatgtacggaatacacattgatgacgcaattccccgcataaaggatgagctgaaatctggaaaagacctccttatcgtcgtcggtgcagaaaaggtgccgagagaggtctatgagatggcggactacaacgtggccgtcggcaaccagccccacagcgaggttgcagctctggctgtctttctagacaggttgctcgacggtgccggccttaggaaggaattccataatgcgaagctcaagatagtcccccaggagcgaggtaagaaggtccttcagctcgaatgaggtggcagagatgctcaacaggtacagggagaacgtcaaaggttaccttgaggccatcgtaaaacctctagcaaaagccggtgtcacaccgaacacgataacgttcataggcctcctgataagcctgcttggagcgtatctcttctacctccagcgcccaaggctcgccgcagtgatcctcctcataggctctgccatagatgccctcgacggaacgctggcaagaatgactggaaaaacgagccgctttggagcgttcctggattctacctttgacaggataagcgatggtgcagtcctctttggaatagccctcggcaacctcgcggactggcgcttgactttcctgacctttatgggtgcatacctcgtcagctacgagcgctgtagggcagagcttgcaggctcaggaacgctcgcagttggaatagccgagagggctgagaggttattgatcctgatggcgttctcccttgctggggcagagtacgtgaagtggggtgtttacatcgtcggcgtgctcgcgtggataacggtcttccagagaatgtgggcggcctatcagaggctcaaggagtgaaagaagaggggaatgatgataatttcgctaaacgaggcaaacgatgaagagccctgccgttgctgaccccctaaccctttagacccttaattatccccacgacctctgaaagtcttgagacaatgaagtcgcagttttcccacagctccctcttttccccatttggatcgaggagcacactggtcattccaatgttttttgcccctacacagtcctttttcgggttgtccccgacgtaaagagcttcctctggcttgacaccagccttttccagagcgagctgaaacggcctcggatggggcttgaaaaagccagcttcttcactcgttgttatgctgtcgaagaggtcgtatattccgagggccttcaagtgggcagtgatgtaatcgttgtcagagtcggtgattatacctacatgaaggcccatacccttgagggcttttattgtatccactgcatctggaaagagctggccgtatttttcgtgcatccttatgcttatctcccagaagtccttgggcactgtaaagccgtatctctcagcgaccctcctcatggcctcagtgtccacatcccttattttcactgcttccttacccgcgagttctgagaagagcgcggagctctcttcctcgtaggccctccaaacttcttcagcgtccaggtcgccccggccagcttttttcagtacttccctgactatgttcaggtgagtcacgttttcgccagccttcgttatgagcgtgccaacgaagtcaaagaagacagctttcattagtatcaccagcactccttattctccatatcttaaaagagctttctgacattatgacaacaatagaccgaaaatagttggacaactgggcacaaattcagaaaatctttggaaaaagatataactcccagttgagcacaaaccagaggtgatggatatcgaggcgatactgctcgtatggggcgtgagggacgaaatcctgagggaacttcccgtcgaggggcagtggctctacggagagtacgacttcatagcaagggtggacttctccagcgactccgagatggaggactttgagaggctccttagaaagatcataaacggcaacacgttcaagctcatgccagtaaagctctcggcgagtaaaactgatgtaaacggagaggagaagataacgatcctggagagcgttaaagtttcggccccatgatacccttctttttcagctcttcataggccctcctcagggcctcccttatcaggtaccttttgttcaatccgccgagcctataggcggcctttctcaggcttcccgttctgaggaacagctctatcagttttctgtcctcctctgggagatcgagatatttaagggccttttccgcgatttcaaccggcaggttgccctcgtaggcgtagtcagagctcataacgggcctatcaaacttctcaatgagccgaaagacaataacatgagcaggggaattatcgtttacgtacttatagtgctccttgagcgcccttatcagctcttccctgctggagaaaccgtccagaaaggcgtcttcgtccgtaagctcaccgacggtcttgctctcaactctctctatgactgccttcccaagggcatagccaccagcgtggatgagcactgtgtcgccctccttgaggtttggcttcctgccaagtctaacagtcgcccgctttttccccctcagtatgtcctccgcatacctcccgtcgaattcgaggtgcctcatctcccctcaccgaggagcttgaatttgatagcaatcacaccgtagcggttctccttccatttggggtagaggttgtgaaacctcttcacagcccgttcgaaactcggctcatctggaaagattttctttattggttcttccctgagaacctgtctgaatgtctcgtacttcttcacttccgttacgacggccgggatggagtcgttgaatattatcttgtcccccggcctaatgttcctgaactgggggtatgcaaccctaacctcaatcctcttctcacccgaacggatgaaatttagatactcgtccttgacaaagagcctgtagaccttcatttttccctaccgagataagctcaaatagaaacttttaaaggtttggagtctaaaaaatataaggtgcaaaaaatgaggcgcagggcacagggggcactggagtacctgttcatgcttgcggcggttctcgttctcgtagcgatagccattagagtggcgacgaactcgacaaacgagctgaacaagtcggttacaaactatacaaaggagattaggaaaaaaatcctagaagacctgtgatggcggtgatagaatggagctgatacctcttctgatgggcctcctaactggtattttaacgtcatatacggacataaaaacgggctttgtcttcgatgtccacgcgttcccaacacttcagctcattggaaaactgctcggatgggaagaggaggaagaggacgttggacttcccagatggattgaaaggataatcataccctccgccgagatcggaattctttactacctatacctcggactcaaaagcggggacgttctcctggcgctctccggactcattgggctttttgtgggctttggactcggccttttcctgtattacatcggcgcctgggccagcggtgatgtagtaatactagccgcgttctccgcgcttctccccctggcccccccgaccgccaagattgtgccaccgtacggcgatggatacccgttttatccagtcgcaatactgttcaacagcatccttgcggtctttccgtttataatagcctacgcgcttggagtactggtggtgcggaaggaaacagaagatatcaaaagagttttcactgaaggcattaggacaacaattgaagcaacgctgtggataatgttcgggatagcagttactgccctgctgaacctcaacagacccctgctcggacttctcgtgaccatccttgcgtttccgatattcctcagataccgcacagtgggggacatcctcggaattgcgggcgttctctacctgacgtacctccagccagatacgaccctcttcgccctgctaaaggtgcttgcaactatttacgccgtgaaggttcttctctcgacggcaaaaatactccggggaaaagtcctcgtggaagaagtcccagttgaggagctccacgaatgggatatccttggtgagaccattcacgagctcaacggcgaggtaaagcgcgagagagaagggaccattgagaggttcaagagagcactctcgacatgggacttctccgagattaggccaaaagtgggaagagtggtagcctcaccaaccgccgagggcctcaccaaggagcagatcgaagagctgaagaagctcgttgaagaggggaagctggaaaacaggttcctgagaaagaaggcgatgccctttgcacctgccatattcctcggcttcctgataagctacttctggggggacatcttctggtggctggagcttaaaatgatgggcctttaaagttttaaagattgaaaccaaaagtctctgggcctggcgtcccgccctccccggggaaacgtgaaccggggcttcctgccaggcctacaccgggggatgaagagcttttgctttgctgactgtgatgagcacgcccttcactgaccccgtatcagctcttcgattatctccctgacctcgtagaggctctcgacgttgtggtcgccctcaacgccttcatgggggtttatggctattgccacatcggcctccatgaacatgctgatgtcgttgtagccgtcgccaacggccacggtcagctccggcttcagctcctccttgagcctgcgaagtatagcgccttttccctggaaatcaacaaccgggttaacttcgccggttatcctcccttcatcgtcgaaaatcagctcgttagcgtaaacgtagtcaacaccaagttcttcgccgaccctcttagcgaggcacataagtccgctgctcaagatggctattttaaagccgttttccttgaggagctcgattaactccttcgcaccctccatgtactcaacggagctgacccactccagtatctcgtctttggtatgccctttccagagggaagcatccagtctcgccacgtggcgtagtctatctcgcccttgaaaaaggcctccgcgtactcctttcccttctcccaagtcccaaacctcttatggagttcgacccatcccgaaactgacctaacaagcgtgccctcaaggtcaaaagctatgagcctgaccattttaccacctgaataaatggaggaagtagtctacttaaaaggctactccctccacccatactccccgatgagggggacaaacgcaactccgccgtggttccagaccttaattgagccatcgggcttcttaactacctcaagcaagtcctgccagaggtggtagcttccaacggggattatcagcttcccccctgtttcagctgttcaacgaggggccttggaatatccggagcgccggccgtcactataatcctgtcgtaaggagccttcggcggaaagcctttggtgccatcgccgagaattacatggacgttcttaacccctgctctctcgagattcctcctcgcgaattcaacgagttctggaattctctcgattgtgtaaacatcggtcttcacgagctccgagataagcgccgcattccatccactcccagtaccaatctcaaggacgttcatgccgggcttcaagtcggcaagctccagcataatggcaaccatatgcggagcggatatagtctgacctgaggggatgggaagcggctcatcaacgtgagcgtatttcttgtagcggtcctcaacgaagagataccggggatatttgagaaatgctctcctaacggcctcactctttattatcccttccctgaccaagttctcaacagttcgtttccagagggcatccaagtccacgattatcaccgataagaagtgaaagagagaaaaataaaaatcctcatgacgacctgctcatgtaccaggcaattcctatgatcaccccaacaccgatggcaacaccaaccccaaaccagaggagctttgtggtaaggggcgtgtaaggcacttccaccgtggacgttgtcgtttctgttttgtattcagtagttgtggttacgttggttatggttgcagttacagtagtcttattgccctgagaagtttcaacaggggagacagtctcagtgacatgttcagtttttgttatcacggtcgtttttgacgagataaccgtgaagaaaaacttaactggtgagtattcaccgtagggagtctcaacaagcgccgtgatggagtagttacccggagatgatggaaccaattctaatacaagagtctctttgtctccaggaccgaggctcaggggaacgacaactgcaccatccttcagtgccatatccttggagagttcaacaccaaccccaggaggtattcttatgcttagattcgctgggatgctgacgtcacctttgttctccacggtaatggagaggttgaaaggagtccccactggaacgctttcggggcccgttggagagacattgtacttaatggtggaaggctcaacggtgacgtttgcagtattggacgtgaaagttaagatagtacactgaccacaagccagctcaaagggcgccagcactgttgcataggccttcccgagctcaaccgtcccattttgaattggaactactttgaacgtaaaagctgcctctttacccggggcgatcgagtcaatggaaacagtgttatccgaaacgagcttcaggccctttgagggctcgaaagttatgagagcattcttaagagcgacactgcccgtgtttttcaccctaagcaccacgtcaaatggaacgtactgcttaattttcgtatccttaacttcaagagacatcaagagatttgcagtcttggtaacatctggaaactcgcttggatccaagaacacaatgaattcggcactttcgtcagagatgctctccaatcctattatcgcaccgggatatgccagaacataggatatctcacccaatctaaggcggccctccgccaacttctggccacagttattgaggagcgacgccttgacagcgtcccccagtggataatcatatctcagaatgtaaggcccaaccgaagccgtttgtccggggctgagctttatctgagcatccgggacagtctcagcatctatagaaactgccaggagattaatggaaacctccgcgtatcccttacagttgtcgcagtcttcctcacccagctctccaactatggtggcactcttcagatccaccacaaacgatcctacagtctgggactttccagattcaagggtgtaagagtttccatcaatttcaaacaccgcacccgagactactttctcgccggactttgatgcccatattttaacgagcttaacgtaatgatccccaaccgtaacgttctcgccgggatttagaatgccgtcaaacacattcggggtagaattgacctttacttggagatggcctatcttgaaactcgattgtgtgaatattttgctttcccctttataagtcgcgttaatcttaaaacccttctgatcgacgctcaaaaccctaaagcggtagtcgccgataaccaacttatcaccagcgagcaaataagagtactgcaagctaattaccgcaaaagactcagagccaatgtacgcaccctcgtacttaaatttaaggtcatttatggatacgttttcacctggcgaaagagtcagtgatctgtagtgagagccgtccacgtagacatcaaccatcagtttgccatcaatggagaggtccccaaacctcaagttgataccatcaacagtaacagacccggggagctttaccatggcttcggcagacagcgaactcactggaacgctcgtagaaaccaagaaaaagagggttaaaaacagaagaaccttcttcatggcatcacccccagcagataccccacaagttgggcaacttctgtacctccgctactcgtgcccatcatcctcgccatcaaggtctggccgagatacatcccgacggcgaatatccaagccagaatgacgaagtatttggcggagcctagtatgtgccccccatcggccagcttgataaccagggccgagagcaatgagtggagaaccatcatcgtcagcattatgtacatcagaaaagtcataccagtcggaggtatcacgtgtattatgtcgccaatgtagttcgcggcagctccgagatccatcttcgagaacagatcgtttattgaaacagccacctgaaaggacgccgcgagagcaaaagcaaacgctccagtaagaccgtagattatacctataaagctcgctatgctctgctgcctcttcctcctgagcctaacgatcctctcgaagttcctgcttatgaccagacccacgtaatctggctcggcacccatgtgcaggctctccctgaatatctcggagaatattcctatgagccagcttccagttccggcgatgaagaagtcccaagccctgtccctgtcaaccctgatggcgagcctcctgtagagagctttgatgtcgtccgtgagtgacccaaagtcgtgggcgctgaggtacttgagaacgaggacgagggatgcaccgctggcggcaagggaagagctgaggctcctgatgaaggccgggaagttctcgtccttcctgaagatgcgcttttcctctctgtcgaccaccattccgaggtagtagaacggggtaagaaccatggccaccacgaacggctcgggaatgctgaacctctgcctgataaacaggagataaaccaacgtcaggataacggttccaatactggagtaaatcgccgccattttgatgcgttccctcttgggatcccttattcccctgctgtcggcccagatcgggtcttctggcatcctgaacttgacgacgagcagaacaccgacttctgccgctatgatcatgaggagcgcgtagaggcccatcctgcctatgtccattcccgtaatgatcggaccgatgatgatgaacgacgctatgaaaacgactgaaatgatgatcgactcgtatatctccttgaaaacatcgagatcataaagcgctccctcgtagaaggtctcatagtcgtccataacggtcttctgctcctggaagaggtattccttcaggtcaacaccgctgtcaagggagtaggcaagcctgtcgagaaagtctgcgaacatcttgctcggggttctcctggcgagaaagcggaatgcttccggcatcgagaggtggagtttgttaacaatcgtgtggactttcttcagctcacttgctattgcacccagctttggatccttggcgagtactgccacaagatcgcttctgcccatctcgctcgtggagagaaccgcaaagtacgtgatgaagtacggcatcttcgagtttatcgaaatcttcttggagtcggccactacgtacggataggcagcagcgtagattatcagaactatcgggattaagaacattaaaacttggagactccgggcaacaggaagaatcctcgttataaatccgatgactatgaaaagcaccgctgagattccaaggtagggcagaagaatgcccttaaggtaagcctccatgcttaggtcggccttggtgaagacgctggctttctcttcgggcatttgcatcacctcagatcctgaagctgaggccctcgatacccttgagatagaaggccttgatctccctgtagacgtcccagtagttggttatgccaagctcgaccatcctttggagtatccttgccctcaggaaaagctcgttatagatgtccttgggatcctcataacccgctatctccgctatcttcctctccaggatgtacgagttgttgaatccacggaagatgtgtctgtcagataccgagtcccactcgaagacgttcctcgttgccacaccgccaagctcctcgtagtagccctcaatctcaacgacgctgattgttctcctgaggaacttgcccttaacgtagaccgcctgctggaagaccgctatgttcaggttgtcgatgaaggttatcggaacgttgatcgggtggccagtaaaacgctggatcatcttcttgatgtcgcccgcgtggaaggtcgccataaccgggtggccggtctgcattgcttggaaggctatggcaccctcggcaccacgaatctcaccgacgatgatgtagttcggcctcgaacgcagcgccgccttcaggagatcgaagagcgtaaccctgctctcctcagggcccctctcacgggttatgagtctctgccagaccgggtggggaacctggacctcaggagtgtcctcagcagtataaatctttgacccaggcttgatgaacgggattatggcattgaggagagtagtcttaccagaggccgtctcaccacagacgaagacgctcatgccgtactcaagggcaatccacaggtaggctgccacctcggcgctgagcgtgccccaacctatgagctggactatgcttattggtgtcgccgagaacttacggatggtcgcgctcggaccctttattgagatgtcaggtgagtagatgatgttgatacgggagccgtctggcaaggcaccgtcgactataggcgtcctgtcgctcacaggccttcctatgcgctccgccatgttcttgaagtagtcggccagcttgacatcgtcgccgaagtctatgttggtctgcatcatctcgaatatcttgtggacgagggaaacgttgtgggcacctatgatgtggatatcctcaatgtacggatccctggctattggctccagcgggcctataccgatgatgtcgcgctttatgaggtagcggaacttctccatctcgtccttggttatggtgaactttgccctccttcccttcgccaggctgaggacggcctcatcgaagagggcatcgaggaatctctcgaactcctcctgatcctcggggatgtccctggtcggcgcaagctctagtatcttgtccttgatgagcttgtacttttcctcctcctcagcgctctctatcctcggctctatgacaatgtagcgcttttcggcggtggcggggtccgtatagatgtggacgaatattgggtctccgacggggtagagtatgttgggatacggtatgtccttcatgtccctgctgagctgggcgtgaaactccggcatcttaccgtacttctttctgaactgctcaatgtacctcctaaggtgggggttcctcgccattgcgtcttcgagggtgtcactgataaccgcctgcgccatatcacaccaccgccgctatttctactataagcccggccttcggctcaacgcggaagggtattatcttctggaagactcccttagcgttgttgtacttcacaatagtcgcggagttcttcagatcaccgccgaagactttgacgttgaggcggatcagcatggtcgaggcttcctcaaggacgaagagcgagtccctgtctatttcctcagtgttggcggtgaggattatcaccttgtccagggaggccatcttcttgacgtagaggagaaaatccctcacggcatcggggtcctgctccctggagagcagggatgaaaacgcatcgatgatcataacgtttggctcccacaaccttggctcgccgaaaagcctgctcaaaaacttcctcttctcgctcacacccgagagaagggggtaaagcgacacaaaaaccagcttttttctgattagaaaagggattatgccgtaacccagagactccatctgtttgatgtactcaacggtggtgtactgacttgagatgtagctggccgtgtagccgttcattaggaagccgtagaggagcctctggacaaatatagacttaccgctacccctatcaccctcgactagcattattgtcccggcggggattccaccgccaaggcgcctgtgcagctcgtctcccttgagctctatcttgagtagttcctcgaccaacgtgaccaccaccgggaaggtgttatttaaccccaggtctcacggagatggagccttaaacacgaggctgcgcttcttgccattctcaagaaccactgtgagcttgtagtaatttcctggagttaaggcagtttccctagtaaccactatgaccccaacttcgtaggggggcaaggatgttattgagttgccgttaacatcagtaaaggctaggtttgcgggaggtacgatctccccgttgatgaagacctgaatggcgtcggatgtgaacgggatggatgtcttgccaatattcttgatgtaaaacgtatatgtgtacggcccagttcccgctaccggtatattggtgggatcgttgattatcgcgaagtctgtcctgagctgatcggcgagcatagcgcctctgtcgttcatgccgttagctatgtcggtggttacataggccagtgcccccgcgacgctccccgcgacgagcactgccaccatgaacattatcagctcgctcgctggtccccctgcggccatcatcccacctccgctggacaaccctcgctggtgccatcgagcaccacagaacttcccgtgtagtgccagctcatcctgagccaacacccgttttcaaacaccacggtgaggttgtgaacggtactatcactctttatgttcgtcacgttgatgggaacgctctccgacggaagcagatatggacgataatcaagcagaccaacgttatcgtcggagacgtcgtatatcgtggcatatttaccgtcgtaaatcgcgctccaacctgaaacatagagggtgtccccagagttctgaatgtagagcgtgacgttgtaatatccattagtgatggaaaccgaatactctccaaccgacgcgttcaatccaacgagcgtattcagctgggaaagcttcagctcgtaccaatcctcccgggcggcctggacagtggtgtaggtgttgtcccatgcagtatagagtgtgctggcggctattaaaaatgagataaagatgatcgctgcactcgctgacacgctgaaccccataggccgccccccgatttttgtgcctcagattccgtagaactcatcgagggtcttttcgagcatcttgatttccctttcaagcttgtcaaggactgccctgtttatcttgagacccctgagcctctcgatgaagagcaggcttatgaggtggtcctggacagttagcttctcggctggtttccactctgggtctctgtggtgcggccttgttcccctggcgtagttgaggagctggttaaggacttcctcgcttatccagcctatctcgtagtagaactccagcaccctctcaaggttctgtattccgaccctgtcaatcaggaagccgagccacttgagcgctatcatggtcgagactatgtcctcgggaagcttctcaagcctggccttcctcggctcctcctcgaagaggagactagctatatcctcgggaatctgaagctggcttgccatctcaacaccaccttcctccttcttttcttcctcaacaacttcgtgagcgggaacctcttcaaccgaaacctcttcgggggcttcctcctgcgggagggcttcaacttccatttccatctcgggagcggcctcttcggccgggacaacttcctcaggctgcacctccaaaggtgcttcctccgcttcgggggctacctcctcgacaccaacctcgggaacttcttctacagcctcaggctgagcttcttcaggaacaacctctgcggggacttcaacggtctcctccgtggggacctcctctatctccgcaggaattgagacttcctcactctcttccgccggaatcggtgcctcttcgatttcctgctcctcggcgcgggcaacttcctcctgggcctcggcaaccgccctctcggcctcagcgagctcttcctcgctgacctcttctccagcccgtattttctcctggagctcttcgagcctttcttgggcttcttcaagcttctcggcagcggtcttagcttccaccttctcctcaagctcctcgatcttcttgtggagctcttcgagcttctgaacaacctcagacggaacttcttccttctcttctccaccctcaaggatttcctcaagctttccgatcttctcgtggacttcctctaccttttcagagaccttctcagccttcttttcgtggacgtcaaactttgctgtttcaagggtctcaacgagcctggtgagctgcatgctgaggtcggtcagcctcttgccgagctcgtcaactctcttgctgagttcctcgtacttggtcacctggttgccgtaggtttccagcaccttcttgactatcttctccagctgctcgtaggtgaggttgtcctttctggctatgagcttctccctgagttcgttgattatgacgctgggaaccttgcccttcagctctgaaagcttggcgttgatgtctgcctctgtgacgagccttgccatctccatgcgtcacacctccgctaggacctcgtatatgatcgagtccagatcaacaccatatcctgcgagcaccttaatgtcgtttttgatctgtgctatttcgagcttgaggtcttcaagctcctttctgatgtcctgaatttcgctggagagcgggttttcctggctcatctgctccttgaacgggtttatctcctggcttatgacctcgtagagcatcatgacgtctttgatggtcttgtcaagcctgtctatctcgtccctcagctcctgcatctgcttcttgagggtgtcaatgcctatctttatcctcgggaggtcgttctctatctcgttgaccctctccataagctggttcagctgttcgttctcctccctgttctcgacggcctcttcaagttcctccaggtcgatgtgctcttcctcgggggcggggctttccgtctttttcttcttgaataaagatgaaaggaaatctagcgccataagcccacccccatcactggagttccagtatgttgtcagtatacgtcgatggtgttgtgaagtctatgacgccgcccgcaccgttctcaggtatgacctttccggtgaccttggtgctcggtggcagaccgaatccatcgatcggattgttgttatcatcaaacgggaacgtccacagcataatggccgctatgtcaccccagctgaggctggggtggttctcactgtcaaggctctcgtcaccgtcctgaacgaccgcaattccaaagaggagtttaccgtagtccttatcattattactggtcttgttgtaggcgctgtagaggttccaccagacggcgcttatgtcgatgttgtccgttatgtagaacttattgttggggtcaaacccggtggggtacttacctttatagtacggctcccacttctcataggcaaagacgttagcgatgtcccctgtgtagtggatgtaagctggctggatatcactgtttttgtcctcattggggtcgtagtaacgataaacggccatcctcttgccgtcgcttatgacgaccttaacgtgggcaaggtcaatgccaccggatccggcattcgggctgacgtagaggacgagtctggttatattgtgggcgccgggtgttgaaccgttgatgtagccgtagacgttgagcaccttaattccgctcgcgacctcctgggtggtctgcctgccggcgctcattgccttctgctggaggtagccgctggtgcttatgagcactccagcggccaccgcggcaaccagcaccatggcaatgaacacgatgagcgttccaatgcctattgctcccctcctcatctcacatcacctcactggagcaccatcacgttgtagctgaacgtggccggcgtggtgaagtcgagcacaccggcggcgcccctctcggggatgacctttccggttatcctggtgctcgggcctatgccgtccttatcctcgtactcgaacatcgtcgtccagacgcatagcgcgaccatgtcaccgaactcaagcgtcgggtgggttccctgcatctcgctgcctatgtcgttgatgacggctatgccaaagctggccgttccatttgtgctgttccacacgccaacgtaggtcatgttgaagaggtccttaacgctctcggcgttctggaagctacccgagtagttgtaaacgaccagcctccttccgtcgctgagaactatcttaacgttgctcaggtcgatgccctcactgcctgcgttgggagttatgaagatagccatcctctctattgtgccgttgctcgggggtgtggcgttggtgtagccgtagacgttgagcacctttattccgctggctacctcctgtgtggtctgcctgccagcggcctgagccttctgctcaaggtagcccgctgtaccgatgatgacccctgcggccactgcagcaaccagcaccattgcgatgaagacgatcagcgtgccgatgcctattgctcccctcctacgcatagcaccacctccaaagggttgttaaagaacgaaagggagaaagaagagccgctggaatcactggagctccatgacgctctgggtataggttgacggtgtggtgaagtcaatgacgccaggggcaccgtgctccggaacgacctggccggttatgtgggtgttgggcttgatgccttcgccgaagacgccatctggtgtgggtgagtatgcctggaggttaccgttgctgtcaacgtaataattgccaaccctgacggcgattatggcgatgtcacccttgttgagggtcggggtgagcggcttgagggagccgtcgctgtcctggacgactatgatgccgaaggtcttgtcgttgagttcgctccaggtgatgtactgatcgccatcgtaggccgttgtgccggtgtcatcctcaaacacgttgtcgggcatgccgacggcgaagacgtctttgtcaagcgttccatcactgtcagcgtccgaattgtcatacttcaacacggcctcgatactgccgtcgctgagtattaccctgaccttcttcatgtcgatgccggcacttccggcgttcgggctgacgtagatggcaagcttgcttattggcttgtacaccttgttgctatcgtcgtatggtgcatagccaacgatgctcgttacctttattccgctggctacctcctcggtggtttgccttccagtgctctggctcttctgctggaggtagccgctggtgttgatgagcactgccgcggcaactgccgcaacgagcaccatggcgatgaacactatcaaagttccaataccaaccgcaccacgcttcttaaggaacctcatctctcatcaccccctcactgaagctcgataacgttgctgttgaagctggtcggtgtggtgaagtcgatgacgcctggagcaccgaactctgggacgactttgccggtgatgtgggtccttggagcaaagccgccgaagattcccttgacgtcaagggtgagtaccgctatgtcgccctcggtgagggtcggggtggttgccttgaggcttccgtcagcgtcctggagggctatgataccgaagttggtgttggccctgagggcagcccacgcaccgttcgcgtcaccgaagattccaccgttcacattgtcgaagcccgtgaaggcggcgccgtagaggccatccgtgctgtcgatgacgtctatgttaacgtccttgatctgagccacagttccactaaaggcgttattctcttggccctgtgttccccactcaaagctgacgccgtttatggtcaccttgatgtagtccacatcggttccatcagcactattgcctttgtcctcagcgtatatatcaacaacgttcgggcccgcttttatcggaatcttagtgtctcctaatacaattgtagcgttctctgaagcgtagaatacagcatggccagtatagatatagtagtcggtaccactggatgtttggtcatcaactacactaaggtctaatgaaacaggtgtcggggtaccactattgtcctgaaggaacttaagggttactgtgtcgtcaccaccaagcttgggggtagtttcagaacccaagctgtagtctatctcaaacattacgtctcccgtgcctgagttggggtcgttgtagtccgcaacgttgattgctcccaaagagaagtcaccatctgaatcgagggtcacctggttgtttgtcgtaacgtctacaactgtaaccgtagtgcctgccttgtcaaggttctgcggaacaccccaggttatcttgctgtccgggaagtccttgttgtagatgacgaggtagtctatattgctgagtgagctggcatcaatgtcgtatgcctcaacgactatggtgttggcacctgccttgagcgggagctttccgacgacgttgccattctggtcgaagaggactataaccgcatcgtactgggagtagaggtagtagttactggcgctatcagtggtgaaggtttctttgtaatcgttggtgccgctatcaccatagtagttgttgctagtatcggttgtaatggtaaatcggtttatactcactgagttaccattaccatcagcaatagttaagctgccgcttgcatcgaacactatcttcaaaccagcagagaagtctagccctgttcccccgctggtccagtctggctctgaggtcgcaaatgccagcttcaatgtcgttgtcgtttcactcacgaacgttccgctctccggaacgtagtagttgtatatcgcctgcttgtcgccgttgctgagtatcactctaaccttcttcatgtcgatgccagagcttccggcgttcgggctgacgtaaacggcgagcctctctatcttgccgctggccggcgggtcggccgggtcgtaaccgatgaccttcataatcttaagtccgctcgcaacttcctgggtggtttccctgccagtgctggaagccttctgctggaggtagccgctggtgttgatcagcactgcagccgctaccgcggccactagaaccatggcaatgaacacaatcagggtgcctattcccacagcacccctcttcttcagtcccctaaacatggcctctcacctcctcaataatgtggaaaggaaatgacatcactggagctccataacggcctcagtgtaggtgctcggggtggtgaactcgatgacgccaggagcgccgaactccggaacgacctcaccggtgatcttggtaccggcggggattccctcgccgaagacgccctgtatggtatcagtagtatcgctattgccattaacgtcaatgtagtcgtacttggcgccaccagtttcgtagacagcattgtcgtcatttgaaggattacctgtgtactcctcaaggcttccaacgaggaccgtgaggactacgaggtcgcccttgttgagggtcgggtagtcttcggtgaggctgttgtcggcgtcctggatgacgatgataccgaagttcttggccgggtcgtggttggtacccgtgtagtagaggttcttccaagcggcgagaccactgtgctcattattccagttggtaccatctgatgaatacttaaagtacaggtcaaaaatgtcgttctggacgcccttggtgaatgcgtcgtaatcatcatccggtccaccagcgtacttgagaacggcctccttctcaccgttgctgagaatgaccttggtgttgctgaggtcgattcccgagcttccggcgttcgggctgacgtagatggcgagctgccttatgtaatcaagctccgttgaatcggatccaatgttggtatacgggaggtctgtcttaccgacgactctctcgacctttattccgctggctacttcctgggtggtctctcttccagtagcctggctcttctgctgcaggtagccgctcgtgttgatcagcactgccgcggccactgccgccactagaaccatggctatgaaaacaatcagggttccaataccaaccgcacctttccttgttctggtcttcattagccacgcaccccctaggggttctttgcactaatctttacaacgggattatataaaggccttttttgttgttggtagtgtaagtaggagtgtacctacatatgtaggtacacaaacaaaaaaataagaactcataatttttccagaagaagaacgctcctgctcggagaccttacactcactttgaagttcaaactggaaactatcccctctatctctgaaaccgagggaaaccctacaaagtccttgttaagagcctcaaaaaactccagcgctgggacgtacttaaacctgtcccggaagggatcaacgataacgagctttcccccttccctgaggccctcaagggcgttttttatggcccttttcctgttctggatgtactcaaggacaaagctcattatcacaacgtcgtaagagttcaccgggcgtataatggtagcatcaatctccttgaggacaacggggagggcctcgcccgcgattctggcccgggctatgtccaggagggcataagagtaatccaaacccagataaaagccgttgtagccaacgagcctgccgaaataagagggagaaaccgacccacagccgatatccaggaccgacatgccaggttttatctctgcaacttcggctatagccctacgatagaggttggaaaatgaggtgctcattctcatgtcccagaagtcggcgtccttatcgaagtccataaggatctggggatgagtgggggttatgaaagcgtagtcagccatcttgtatatctcctcaagaacggatgcccagtctgaaaccagggcaccgtaccgttctgccgcaacgacaaggttgtgagagaattccgccagctcaatgtgatcgttggtcgttttgaccatgcccagtctgtcgagggtcgccagaaagcgggaaaggagccttctgtttgggatcctaacttcgtccatgaaccttgaaagggacggccgctttgaaagcgctgaaaaaataccgcgctttaccccaagggagattataaaaaatagggacatctcggtcataaggtctaggttggtatcgacggcgcgaactagggaggtgggcatctctccacctcacaggaagcgccgataatagcggtggtactccctgaggtagtccacgaccctcttgccgtactctgtgagacggtagtacttgaagccgttcctgcttatctcctcgacaagacccaggtaaacgagggagctttcgttgttgtacctattcccaagacccaccagcgccccacggacgttggaggggtccgagccgattacccgagctatctcggacaggtaagttgcggatgggtatatctcattgagatacatcaatatcctctttctgagctcgctgcggtgaagggagcgcaatacctgtggttcgattactaccgagttcatcctgtcacctccggaaattctgtggctgattgtagcctgctgatattgactgagcatgttgccacagttttattagcggttgaaaagtatataactttttcgtatagactatgtcccttatttagccttaacgcccattaataagagaacatccagtcacattgccacccttcaacatagaattttattaccaatcagttgcaggatatccaacacaggttgttcgacaaatagattaagaaaaaagcaaaattctcaaagtctcttaatcagaagcccaaatagtacagccagcaggactatacccgccggcccacacgttccatttttgcccttgagggcactgacgtcaatcacgtagaactccgaactggcagtcccaacaacagctctgtcaccgagaactgcgatgctccttacatagccggtgttagagacacttccaacgacttctccgctctctgggtcaagagcatagagggaaccgacgctgtagatgtacgttgtaccgttctcggtcttctgctcaaacttacccacgccaaccaggaggagaccgtctgagtaggccatcactttggccctatatggaagctcttgctcccagatcacctggcccgacggaagcttcaaggacatcacactgccgttttgcccattgtaccccgagacataagcggtgtccccaaccacgaggatgtcctccacatagaaggcactccccttcatcagtacttctccattgggggacaccagataaatctcgccccttgaattgtcaaagcccgttcccaggagcgcactgccgttccacacctccatgtccctgacccagtggccgagggttatgttccataggggccttccatcgagggagaacgcgtagagcgacccaaactggtgcgagaaagaataccccgatgggaaccccgaggaggcatagatgaccccctttccaaccctcaccctcgagagcatgtcgtcaacggagacgttccatataaaagttagattttttccaaggttaacggcgtagagactgcccctgtaggttaccgaagagttcgggccggatataaagtagtcaccgccggctgcatagatgacgccatctttaaccgtgaagtcgtagagcttgcccatggtgttggccacggagaggattctgctggagttgtcaaagagtatcaatccacccagactgcccgcgagaacacccccatcgattggatggagcttgacaacgtagccggaagcattctcccacagctttgagccgtttaaggaatacgcatagagcgtaccaaggtagtacacccctatcagccccgaggagttcgcgacctggcggtaggagcaggcagcgtagacagtagtgttggcaatcgccacggcctcaatgctcttctgatactggacatcactgcacaccgaacccttccacagcactgggttttccgagcttgaaacggcagggagagtcagcattgcgatgattagcaacagcgctgaaacaccctttacctttcccatggttttcaccaagaaaaggtaatgaaaagattaatataaaaccttgccgatctctaccgtggtgggaagatggaaaaagagctggacctcagggaggtcctagcaacaggagaacagatacaggagataatagcacgggccatcatcgacagagagttcctcaaagaggtaatcagtctcctcgacgatgatctctggacggttcagaaaaacgcactcagagttatttctgcaataatggaggaaataccctcactccaggaagcccttgttacgaaactaatggtcatggttcggaagagtgaggccgttccactaactcaggaaatagcaagaacattcggcttactggcaaggattaaccccgaggaagtcagaaaagttgtgccgataatcttcgcaaactaccgccttggtgatccaaagattaagataaacatgacttacgtgcttgaagaaatcatgagggcaaacccatcactcctcagcggagttttcaaagacataggaatattgctcacatcaaagaacaatgcagacaagctcgccgccctcaacttcatcgcagcacttggggataacgggcttaagtatgtgactccgttccttccaaagctctttgcgctcctaaatgacaaggacgaggttgttcgcgcgagtgcagtcgagacccttgagaagctggcggagaaaaacaagaagcttcgtgctatagtcatcgaaaagctcaaggaaatgaaagacccaagcgacctagtaaagcacaaagtcgaggaagccctctcaagactcctcctccttgagaaggagtgattcctgctcagtgttctcgctcgaagtcctctcctggaggagcatcttaagggcatctttgagcttttcattctccctacgcagtctctcgttttcctcctttaaaacgtccatctccgccactgccgcctttacctctcccagaatcttctcaaacttcgagcgcggaatgaattccttcttgattatctcaatggcagaagaaacatccctggcaccggtaatctcaagcagctgcttttcaactgccttcattttcctaagctggacctcataggcgttaatcttttctcccagcttctcaacccgcatggtcatttcatccatcaatgccagtctctttctcagttcctcaagctccctctccttttcgagcagctctcttttcagggcttcattttccctggcaaggcccttcaacttgacgttttcctggacgagccgttcgtagtgctcctgaatctctttgagtgttcttgcaagttcaacacccaccgagagcgtctcctgctctagctccttcttaagctcctcaaccttttcggcaactatcttcctcatttcctcatcaagcttctgagaataggcgccctccagccttttatagagctcagcaggaagcccctcaagcttctcctcaagctcgttcatgcggggaattatcgcctccacgctgtccataaagagggttctctgttccagggtggaaatcctgtcctcaagctccttcaggcgcttttcaaaagaagtattctgctcccgctgggtgctgtggaagtagtcaagattagaggacagcctctctattctctcactaaggtgccccctctgaattttaagctcccggataagggcggctatggcctggagggatatcagatgataagctcctaggttttccgcctcgggaataatcgacttaatctcgtcccaattgtgtaaactcttcagttcctcaattatctccggatgattctgaactatgtaatcccaatcccccttgccccccttggatttgccgagcataacaaccgaccagaaacagtaacgtttcaaaatttaaatagcttttgtgtagataattacgacagaaggttagtggccggcggcgttcccggtttcccgccccctctcggagggcagtacacccgggaacgctggcgggcttaacttccggggtcgaaacgagaccgggtgtggccccgccgctatggccgccgtaccgagtattgctccaaagatgactttataaactttacggtcaagcgagtcacgatggaggagctcataaaactaattcaccttgagagaaagcccgcattaacccctgaaagaaaggttaaagacttccttaaaaccctgcaaaggaccaaaaatggagaggatatcagagttagaggattcattattctgagaaaacctccaaacgcgcccagagacgggatttactacctgctctctccactcgctccctccgagatgaaaagctaccgcgaacccagggcttacctcgtcgtcaagataaacgaggacacaagaatagacgcaaggatacaacctggtgaatacgtagaggctgagggaatactcgacgcttatcctttcggaactctgagactgctccacgcgaggagaatatcgcctgctgactactccgaatactggaaggactaccgttcgctggcgctgtcaaaaagcgaacttgagaacttagtctcggatactatctacgccagctacgagttagagagggcaattatgtattccatccttacagcaccttttgtggtgggtacgaactggcttgatgggttcacactttcagggttcaaaggactcgatggctcaaagaacgtcacgctttccctgtgggaggctctaaaatacatctactctcttcttccttgggagatgcagttgcggagggacagatggggagaagttaaggacgacggacttctcggaatagacttcaggttcacgcggccatcaagagcgggccccctttactatgtcccccacaacaagaccctgctagaaagtgaagttccagtcccgaagtgggctctgaaaacctttgagaaaaaggaggcaactttccttacgccgagagcagggataagacccgaggatgaagcagcgctgttggctgaaacgccgtttgtcctgacagagccagtaagttatgaaaaaaacagggagcttgaggagctgatcccaaacctgatagttaccgtaatgctcgccagggaaaggctcggtaccctaaacccctgggagcttaaggattatggaagaaaatttgagagttttctcgcaaagaacagacgggagtacggcgagctgttcgatgcgctcaccctctccgggaaggtcttcaacgcgaacctgcgctaccgtctgggagcgaggctgttgggttcaatggcccgtctggagggacggctctcaaagccgctgataactgacctaatcgggatttaccaggaactcaccgacctctgggtaaacgaactccccgaaagggagaagctgaggcttgtgagggaatatgagcggtacgtcgggagtgataagctcgccggcagggcactcggaatctttgctgacctagaggcaacgaggaaggacggcacagtttcgagggaagagttcataagtgcacttgtagagtacgggattgctaagggtaaggccgaggagatagtagataacctcctccgcgagggctacctttacgaacctctccagggtaagctcaggctaataaggtggtagcatggggaaaaaagacatcaggagaaaggagcagagggaaaagaagaggatagcccgcgagagggtggaaacccttttcacactcgcggagagggtcttcccgtattcgccagagctggccaacaggtacgtggaaatagccctttctgttcaacagaaggccaagataaggatgccgaggaaatggaaaaggcgctactgcaagaaatgccactccttcctcgtcccgggtgtgaacgcgagggttagactcagggacaagccctatccccacgtcgttataacgtgtctgaactgcggcaacataatgcgctatccatacctgagggagaagaaagctcggaggaagtatgcctctaaatcaaccgagaatggcaacggccctgactggacttcctgagccaccttctatcttcagcgggaacgctatgaacgtgaactcccttccaaggacttcttcaaggtttgccaagttctcgaagattggaatttcctctgagagaaagattgtatgggtcgtctcgtcccctatcgtcatgtggtcggttccaacggccttaactccctcggcaacgaggaagagggcaacctccggggaaagctccctgccgccggtgaggaacaggactatcttgccgtaatagccagagtcggggatttcttcaagcctgacagggccctccccaccacgtacatcgatgacaaaagctttgccgatgaacttatcgagtggaagctcatccacggtctttccgccgggaacaaagtgggctggggcatccacatgcgttcctgagtgctctcccatctttatgacgttcatgtagtagccgtcagtatctatgaaagcccacggacgaacctttatctccgggtcgccgggataaactggcgtctcctcattgagggaaagggaaaggtcaactatcatagacccaccactgaaattttgagctaatccatataaaccttttcggactattccttccgccgaacccatttgaggccgttctcaacgaccgcttcaagttctcccctgttgtagagttctgctattagggccctcacaggcacaaggttcagggcaagcttcttgggagtaagctcaacgcccaaagcgcgcatgatcctgaaagcaagctcgtcaactgtcagaggttctctgaggaactccaaggcaagcttctcagagtcttcgactcgtttgatattgaattcgagagtttcaatggcttcttcacccgagactgattttccgtgggatggtatcaggaggtagcctgagcctgcatactctcgcagagtctcaagggacttccagaaaagtccaacatccacgaggtacggcaggccaaccgactggaggagcctctcgccgaagaaggagtccccagcgtaaattaagccgttctcctcatctaaaaagcccgtcatgccaggggagtggccgttgagctgaactgcctttaagccggctatttcatcgccccactcaaaaactccgtgaacttttacttcctccggaaaagcataggccagaaacccctctggagcctttgagccaaatgtcagaatctccctgttgagagggctttcagctattgagaactcaaagcgatgggtgaggaggggagcgtcgatctttggacataccgagacgtggtcggcgtgcccgtgggttgcgagctggagatttacctcaagtccgagcttcccgacttccctcctcaggtccttgtgcctcccgcttccgtggccgggatcaacgaggacggcatttccctcatgaatccgaataagagtcgagggacttcctgggtagaggtaagcgctgtctccgagctttctaactcccatcgttttcaccaaaggggattgttttcaaagcagataaaccttcccggggagaggcttttaagctcctccgttgagttaagggcggtgaagtttatggactgcacgaaggattactgcgttaaggacatctccctggcaccgagcggggagaagaagatagactgggtctcccgcttcatgccggttctccagcacatcaggaaggactttgaagagaggaaaccgtttaagggcgttaggatagcagcgactctacaccttgagatgaagactgcctttctgcttctgacgctgaaagcggctggagccgaggtttcggcagctgccagcaacccactctccacccaggacgatgtagttgccgctctggcaaaggcgggggtcaaggtctacgctataaggggagaggacagggagcagtactacgagttcatgcacaaggccctcgacgtaaaaccgaacatcatcatagacgacggagcggatatggtgagcacggttttgaaggagaggcaggagctgattcccgaaatatggggggcaagcgaggaaaccacaaccggcgtcataaggctccgtgccatggagaaggatggcgtcctcaagttcccgatcatagcggtcaacgattcctacaccaaatacctcttcgacaaccgctatggaaccggtcagtccacctgggacggcatcataaggactactaacctcctcgtcgctggaaagaacgtcgttgttgtcggctatggctggtgcggcaggggcatagcaatgcgcgcgaggggacttggagcgaccgttatcgtcgttgaggttgacccaataagggctctagaagccagaatggacggattcctcgtcatggacatgatggaggcggcgaaggtaggggacatcttcataactgccaccggagacatcaactgcataaggaaggagcacttcgagctcatgaaggacggagctattctcgccaacgccggccacttcgatgtcgagatttcaaagcctgaccttgaggccctcgcagttgagataagcgagccaaggccgaacatcacagagtacaaaatggcagacgggaggaggctctacctcctggctgagggcaggcttgtgaatctagccgctgccgacggtcatccagcggagataatggacatgagcttcgcgctccaggcgaaagccgctgagtacatcaaggagaaccgcggaaggcttgagccgaaggtctacgttcttccgagggagatagacgagatggtggcgaggataaagctcgcctcgatggggataaaaattgaggaactcacagaagagcaaaagaaatatctggaaagctgggagcacggcacctgactccctttccatttttgaggtgggagtatggagttcgagcccctcaaaatagtccccctcggctacgtgagaaaggacgaggagcttcatgagacgttcattgaaatccttcccgagttcagaggggccattgatggtctccgtgagggggactggataaagctcgtcctgtggttccacgagagcgacacccctgccaggcggagggttcttaaggttcatccctacggcaacccaaagaacccgctcactggggttttcgcgacgcgctcaccgtacagaccgaacccgatagcactctacacagtcagggtacacagaatagatgaaaacaggctctatattgattggattgatgctcacgacggaacgcccgtggtggacataaagatattcgtcgagcgctacgactgtcccaaggaagtccccatagaggaacgggaagcccacatacgggagggcagaatgataggtgaggtgaacatcatcccgcggaggagcgaacatctggatgagcttgaggaggtctcacctggggagtacgatgccctcatccttgaaatcggcccgaagacaacaacgctgaccgccaaagagctgaaggacttgatagaggccctaaaagaggtctacgatagccttcccgttgagattaaggacaagctcggtgagctgaaatgctgaggggtgttatcttcgacgttgacgagacactcgtttattatgagggctacgacccaaaaaaatggttcgaggagtgggtaaagcgggagcttgaaaaacacggaataaaccttgactacgagctctactccaagaccgcccgtctggagctccccaggacttacgtgaagaaactcggcatagacccggtggaactgtggaaaatcattgacgcagcgaataacagatatcggaagaaaatgctcgccgagaggaagataaaggcttttcccgacgttttggcactcgaagagctgaaaaaactgaaccttaagctcgcggcagtgagcaacgcctcccttgggaacaccctcctcgtactgagggcctttgacctcaataagtactttgacctcgttctcgggaaggactactcgaatctcgacggggtgaagcccaatccgtatctgattcaaaaggcgctcagaatgctcaatctccggccagaggaggctatagttgtgggcgacagttcgaacgacgtcctagcagctcacggggctggagttaatgccgtaaacatgatcaggtttggaaaggttgaaggagcagactactacgtgaaagacctctgggagctcgtggagcttgttaaaggcatgttataatgggagtttaacagtcgtcataacgcctcggtttttcttttaaaatatccttaaaaactctaaagtcctttactaactatgagagtggtcaacatggaggagttcacttttaggtgtgagcgctgtggggcgccgcttgaggtttctcccgaaacgataatcgcggtctgtccctactgcggttatccgaaccatataagtggcaacataaagaccgagaacatctacatcgtcccctccctcgacaagaacgcgatagcccaatccttctggaagagggtcgagaaggacttcgacctgagaaggataaaggatgacatccagatagtcgggatagaagggcactacgccccctactgggcaggaaaggtgcacgttgagggaactgtaaggtacatgaagcgcgagcaggagtgccacacggattccaaaggaaatacccactgccacacggtcgagaggcactacacggagagggtgaacgagaacctttcactcctcggctcggccaggaggcaagtaaagagcctcggcgttgaagatatggtaaagcacttctcaaagagcaggccgaaggagaaaaaactccttgacctcgacgaggagagctggagcaaaataaagctcgaaatcctcaacacggagatggatgagctccacgcgaagctcatgatgagggaagacgccgtggacgtgataaggaaccgctttttagcgaaatccgacaggatagagcggtttgatatacacgcatcagaaccggagaacgtcaggctcatcctccttcctctgtggacaatctactacaggtacagcaactcgatattccagacggtcttcgcgggctgggatggaaaggcagtcgctgccaccgagccgatgaacctgttcagaagagccgaatacctggcaggggcaggggtcggggcgctgatagcggccttcggcggggcattggtctcaacatcgccggtcttcggaatactggtgatggttggtggagctgccctcggctgggtcgccggcagtaaggccctcgaagggcagagggttgaaagggaaggctccttgggggtgatttgatggaggtaacctgccccgtctgttcggcaactttcaaggttcccgacaccgtcacggtcgcgacctgcccctactgtggggcaaccttcaaggtcgagagcggcgagaaggttggggagcacttcttcttctcgcctatgagggaagatcccgccggaaagctcctcaagttcctctcaagacagtacggtgcccctgccgatattgtggacgcgagggtaactaagaaggagctccactgggttccggtctacttcttctacctccacgggagggacaagtacaaggagaccgttgaagaagtccgctttctcgggattccagcaggttcgcccttcaaaacgctcctgatgaactacccgttcccggtcagggggaagaagttcttcgacgaggccatagtgaagaaggggaagtactacgagccggagatgccaagggagaaggcggaggagatagcccgctcccacataacgacggcgttgcagcaggaggtgagggaggaaagcgccagaaccggtgagttcgagcttgaagtggtcttccagggtcttgtgcactacccagtctgggaagtccactatgagtacgatggccagagcttcgtcaacttcgttgacgggaccgatggaagggtgataagagcggagtatccgctgatgagcgaggccaggaagaggactactctcctcggcatcggacttatcggtgccggggcggtgctcggaatcatagcgtcggcctacgctggaacagtctggggactcatcggcggcctcgttggtggaggcgccggagccgcaggagtcttttcaaaaggctctgttagcaagagggttgttagcgaagttatggggataaagaagggcaacacctacttcatgcccgtttgaggtggtattatggggaaggaaacttcgatatgggaaaagcttgagctcgtcgttcccggcttccacggctacaagaagaaggagctcctgagggaggacgacaggcttgtgagggcaaaggtagcagagatactcgcaggggcaaggagagagctcgaaagggccctacagaggtgcgcaatggtgaactgcaacatgctcatggcgatagaggacatgaggaagaggctgatcatgctcgaagggaaggtcaagcacgccgaggcaggctacgccggcttttttgacagggtgaagataaaggagaaggagcttgagaagctcatcgagtacgacgcgaagatgatagagctggccgaagggatcagggataaggccggcgcaatctccggagccgttgccgatcctcaaagacttggtggggaggtcttcgccctcgatgacatgctgaggaacttcgaggaagtcctcgaaggaaggagcgcaatactgaggggtgagtgatatggtgcaggttattgagtgggtcaatccaggagaggacgagataatctggaggtacccaaacgaggtcataaagtggggcgcccagctggtagtccacgagtatgaagttgcggtcttcatgcgcgacgggaaggtctatgacgtcttcgggccgggcaggcacacgctgacgacccagaaccttccattgctttacaaactcgtcggcgggagcaacagcccctttaaagcgacggtaatcttcgtcagcaccaaggagttccagggaaggtacggaggcgagacgcagacgagagagctcgctcccataaagtactacggtgtctactggttcaaggttgctgatcctgtccagttcctgacggaggtcgtaggtggccagagcctctacgacacgagcgacgttacgaagttcatccgcgcttacttcaacgagggcatgatgaagcacctcagttcttattccatcgttgacctcttccagaacctcgacatggtcagcacgcaggtcaaggtaaagctcatggaggacttcaggaggctgggccttgaacttgtggatgtgaagatagagggcgtgaacacgacagacgagtggaggcagaggctcttctggataatgcagactggcaacgcccaggctgtaatgcagttagataccgcgaagcaggttgctgctgaactcggaaagagcggaagcgcctcggttggcacaggaatggttctcattccccagctgatgcagccgcaggccccggctcagcccgcccagcccaatgctggaggtggagttcctccggcaggataccagaaccagccggcacagcaacaagcccaaccgcaggcccaacagcaggagatatgcccgtactgcggcaagccccttccacctggagcgaggttctgtccctactgcggccacgagataaaacgctgtccgaacggccacatagttcctgaaggagcgaagttctgcccggtctgtggggccaagattgaatgagtcttccgcgttttcaaattttcaattttaaaagacgtggacggcacttgccttgaagcccacccacacgttttttccagcctcaagccccagctccagcaccgaagagcgggtaacgaatgctgaaagctccactccaccggcctttagccttacgcgtacgcggaccgagctccccgagctcctcgacgtcggcctggacttcggcctggaaggtgtttctcatcgagctcttcagaggttcatcagacagcacgatgtcctctggccttatcccgaccctgattcttccagaagcctcaatgggaagctctatcacgaggccgtttgcgcggagaattctgccctccgcgagcccttcaacgatgttttcaaagccaaggaatttcgcaacttcctcgctcgctggccgtgagaacacttctctaacagggccaacttgaacgagccgtccattgagcatgaccccaactctatctcctagactcacggcctcctcaaaggagtgcgtgacatggagggctgtgaagccaagctctttcctccaccttttcatttcgttaatgagtcttccccttgtctgtacgtcgaggttggcaaagggctcatccaagagaagaagttcaggctcaactgccagggccctcgctatcgctaccctctgcatctcaccgccgctcagggtcttcggctttcttttgagaaggtgggaaatgccgaggacttccgagagctctctcactttccgcccaatttcggctttcggaaccttccgcactttcaggccgaaggctatgttgtcgaagacgctcatgttcgggaagagggcgtagttctgaggtatataagcgagacccctcttctcgggcggcaggtcagttatgtcctccccgttcaggaatatccttccagagtcgggctctattatccccgctatcacttcaagaagaaccgtctttccagcaccgcttggccccagtattatgaagtgctctcccttctctaccgagaacgttacatccctcagatggaactcgcggtagtccttggagattccttcaaccataagaaccatgattctcaccgagcaatagcgtttaggaattctttcaatcccgactcgttcaaaaactcctccacgagctccctgttttccctgattagtttctcaatgaagtttcggtacagtcccgacatagagtctccaccatagttccgggcgattgccaggagatgcatgatatcctttggggtgagctttctccccaagtctttcctgagctgacttatagaaccctctagctttgagaggctgctttccttcttagctagaagagccattaagagttcaagttctttttttagatcgatgtcccttgcatcaaaatcaacttccccaattccaaatggaatgacctttatcccgtttatcatgagatatccatcttttacatcgggttcaaaacccccactctgcaaagtgcttttagcccagtttaagatgctctcctcggtatcaacgtccctcgcaatcccgatgatggcgggtgtatcctcaagcctctcaatcgctttgaaaatcaatttaagggcgttttttagattgtcctttccgttggcgtgccacacaaccaacctagtatcatctttactcaggcagattgcccgtgatagtcctttctttttcggaccttcttctaaaactggaagatcctcacatttggcctctttgaatccataaagctcttttatcaaaggaagaaagaaactaacatcagtccgaccttccaaaagcaaaagcctagtctccatgtttcatcccctcagatccaatcccagggtttcccttagttcttgcgattcttcaaaggtttctattgaggcttttacgtttccgttctcacgcttcatgtaaatcacccttccatcaaccttgctttctaagccatatttgattagcatgtcgataagctcaatgctgtgggtggttaaaaacacctggacatcgttttgctttgcccctttaacgagggtcttggacatgaccctcagggacttggggtgatggaaggcctctgcggagtctatgagaaggtatcccccctttaaaagcgatgccagaaacgctatgatcatcgcgtttttgaatccttctcccattaagtaatatggataaacaccatatttggtctcgacgtggagtatccatttatttgctttgaacaggggactaaacccctcaacctcaggataagcctcgttaaggatgtttatgctttcttttacaaccttcctctcatagccaatggagtagaggctctcaacatatccaaacttacggagagtcagaggagttatgaattcaaaattaagactggggtcaaattttgatgaaagcagggatatagacaatacattgttgtcaactagattatgaatctgaaatcccgcactaaactttggatgctcctcatcgatctgttttagcgtaactttaagggtgggcaatgcattgagtccggacatctccttttttagcacaagctcccatgaagcatctatcttcgtagatacaatcctagcaagttctgcctttgaatgaaataagtcctctatagcctgagaaccataccatccgcgccatatcaggatttcttgaagagcgctcttaactgactgaattcctccaaaagccgccaagaaaagagataacgcctcaagcacgctcgacttgcctgcgttgtttttacccgcaattacattaatctgaccaagattactcagattcagcttttttatgcccctgaagttctcaatctgaagagatgttatcatagctctcccctcttcgttatcgacgctactctaattaaagttttatcctcaagcgttcttcctccccaccagccagcggagtattacgaagattccgaggctcaggctcaccataatcactgctataggcctcgatgctcgcagtccgtagttgttgaagtactccaggatgagaacctgggcagttttagggtagtaagcgactatcagtatcgcaccgacctcgcttattgccctcgcccacgtcattatcgccccgctcgctatggatggaaacgccatcgggagtgaaatagacagaaacgcccgccagcgggaagcgccgagcgttctggcgacggcttcaagcttctcatcaaccgcaagaaacccatcccttgcggcgttgatcgtgaacggagcagagacgaagagcatcgcggctactatccccttataactgtcgaggattgagtttgagaacgtgacgagaagcattatgccgacgactgagtgcggtatgactatcggaacgtccaccaaagcctgaaccgcgctctttccggggaaatcttttctcgccaggacgtagccgagcgggacgccgaagagaagggctatcagggcggtcgcggtcgcggttagaagggagtttctgatggcctctatcacatacggatcgtggagggttttaacaagcatttccacgtcggaggcctgtttgaggaaaataaccgctatcgggacggctatgtaggctatcaggaaggtccccagtgctgcaaagaggtagagggtgtagtcccggcgcatcgctccaaagttggaggaatgcttatttaagagttgtgggtttgttaagctaaactgctttctccacaaagccaaatttctaccaaaaactatttagtgctccaagaatatatcagttttggtgagagcatggaagtagttgtgaagaggatagacgcgcagggaaggctccatctcccaaaggaactcagggaaaagctcggtgatgaagtaatcatcgttgatttgggcgacagagttgaggttctaccacggagaaaggccaacctgaagaagtttttcgacagcgttgaagtagaagagctgaaagagtgggaagaactcaagcgggagctgtgggagtgatgaggttcattgacgccaatgtcttcatctacgctttcttaagacccaagaaggaaccgccagagaacgtccgcatgatgaaggaggttgccaaggagatactcaagagagtaagcgagggagaggaagttgtcacaacagtagtacatctcagcgaagttgcaaacgtcgtcgagagccgtgcgggaaagaaaagagcggctgagattctcctgacgcttttaactatggaaaacctgaaggttcttgatgtatcctatggggactacctaaaggcaacactgatagcagaggagaagaacctcggcataaacgacgcactggcttacgtgaaaatgaaagaagaggggataggtgaaatctacacctttgacagggactttgaaaagcttgacatcagggttgtcctagagtaagctcccgaacctcgaccagcccctttatctcctcgggcacgtttccgaaggccaccggcgggttcaggaagtcctggtggttctccatgaataccttcttgccttcttctccgagcaggaacttgaggaactctatcgccagctccctgttgggtgcgtccttgagcactgtaacaccgtagacgatgggcttggcttttatagtcttcccggtcgaaccgagtgttatctcgacctgtccgtagtagtcggccttgctgaagtccttgaggttgatctcgtccggcagggtgatgtagctgaggttgtgctgttcggcgacgctcttatagatgaagaagtagtctaggcttccggactcgacgaggccagttaagtcggtctccttcggccttatgacgatcctgttgttcttaacctgaatctcctttggagcgtagatgtgcgtgccgttggcgtagatgttagtattcttttctaccagcgtctcaaagatgggcttgccgtagtagaggtcggcaagcttcataaccattaccgagcggtagccgcaggggtcctggttagggtctgagaagccgaaggaaacatcgtcgcgcgcgagtatctcgtaccacttctctggatgggccttcatctcgtcggcgtacttgctctcctctgtgaaggctatgacgatctcgttggtcgcgaagaggacgtagaagtccgtgtagttggggacgagcatctggggtatgagggtgtagtcggcggttgccactatgtcggccttcctgtgcaggtcggtgacctttctaactgccataacgctcccgctcgcctcgtcctggaacttcaccttgaggccgaggttcttctcagcatatgcggagaactcgttttcgagcccctggaaaggtatgctgagggaacccgcatggaaaactatcagggttgtctccttctcagatgtgttggcattttccgaagagctcgatatacagccggccgagaaaacggccagcagaagaaccgcggtcagcaacagtccgacctttctcatttgaaccaccgtaaagaggacagaagtgggtaatttaaacgttttgggtaaacaaaagaattaaagcaaacgcttttgttttctcatgtcttcgaggccgtcaactatatctttgaaatgcccgtagaactcgctactcctgaggttctcaaggacattccagaactcgtcgaggcctgaagccccggcggactcgtactcaagggcctggattagcatttcaagcttgtcggcgaacctgacgagccggccttccagcgtgctcccctcctcatactcaagccagagttggtagtattcttcgggaagcggactggttttcagaaggtcttcaacggcctttctttccgcttcggacttgtccacgtacttgagggccggctgggggatatctgttatcctcgcctccccaatgtcgtggaggagggctattcgaacggctttatcggggttgatttcaacgcccctctttttaagctcgtctgccaagaagaaagttatcaaagccaccctgaaagaatggtcggctatgctctccggatttggaacgcccctcagaacccagcctgtcctcttcagcttcttcaggttaccgagctcaatgaaaagccccagcatggtcattcctccgtggtgaagatggccctttcggtctcgatggcggtcgctattattccgtccccaacaaagcggccgtagactttcacggtgtccccttttccaacgcatggacttcccgcgaactcgacggagaacccatggatcttgaacgttgtcctccagctggggagctccatcggaaggaactccacgagaggcttgtcctccacgaccccctcaagaacgatgttttttcccctaaattttctcgttgagaggtcgtcgggggttacaacgtaataatagtgatgacccagcttgatcctcttcatgctcatcacctttatatcccgtccgctctaccactttatgggtggtggtatgataaaggttgcgattataggtgctgagaacgttggcaaatcaacgcttatgaacgctctcatcggtgggaaagtgagtgaagtcgagaacctgccggggacaacaaagggagtcatccggcggcgctttggaaagcttaagataccaaagggcatgaagaacccctacggtggggccgatgaattcgttctcatagacactgccggtctctttgacccggagagggagctcagaggaaaggttctgagcgaggagaaattccgcgaaataatcaatgagataacctcggccgacatcattatccacatggttgacgcgacggtcggccttcatagggggatggagaagctccaccatatgctgaagttccgctacgagaagcccataatagtggttatcaacaagattgacctcgttccccgggagcgcgtcgaggaactgagggaaatcataaagaagagacttgagcaggagccgatagcactctcgctggttacctacgagggctttaatgaactgcttgagaggatagcctacatggcccagtacgtgtaatcactcctccggaaactcggggcacgggcagaccatcacgtagacccgcctgtgcctcgggccgtcgagctcgacgaaaagaatcctctgccaagttcccagctggagttcggcctggtctatgggtatgacgacctccgggttcaggagcagggaggccctgaggtgggcgtgggcgttgctgtctatcctgtcgtgggagtagccggcccccttcgggatcagctccttcatcttggccttgaagtcctcgattaggccgctctcatattcgtttatcatgagaccggtcgtcgtgtggtgtgtgaaaacaaccgctatgccgtgcttcacctttgatttgtaaaccattttttgaatttcgtccgttatatctattatctggagcctctccctcgtcgatatgggtatttcatacagcatctcaatcacctcagctcctcgagaatacccttaaggagctttttcggatccatttcctctccaaaaaccgcagctctaaggagaacggctttttcatacgcgctggctagctctttgttcccattttcaatgacttcctccctcaggattgagtatatctcatcaacggcgtccttaaacagaacctcgttggaaaaatcaacgtcgggagaagccatgaaaactaccagatcgcgcacgaactcaaccttgtcttgggactttctcttcagcagacggataacttccatttcaggttccccccacgctcagtgccctaaccagtatttctgacattagtaaggaagcaaacttcctgtccctgacttcgagggcggcatctatggcctcttctattttgttctgtttcaagtaacttctggcaacgtccgcaagaactatcgagcggagcttgggattctggagtacaaccccgatatttctagccgtctcaacgtcccccagcagagtgtagtacctggcgacctttacccacatggcttctgatctaaccctcctcgccacggccttgacaacttcctcaagggcctttgtcggatgctcaaggattttatccatcaacaactttccaacgatacgtgcctcatcatcggagagaacttcaagaaaacccggaataaccgcgggatttttgtccagaacctcaagtgcaacttcagagatcacctgaactgaatcatcaagattgcggagcattccaacggcaatatccggtttcccagcaagcagaaaagcctctgcaagctccacaacaaaatcggcaccaaaacgcgagctgaaatcatccgccagctcagaaagcccgcttatgaacttgtctatgacgcccatcctgcccaaactaaaggtaagttccttgaaggcaaccttagcccaatctggggattctatttccctaatcgtggccagcgccctctcataactccccaccgcaataaaagcctttgccagctctatcagggcctttgagcgatatggctcgtcagttatatactcaagcgccagcttgattttcctgagcttgtaggccgcctttagggagctgtcctgaattaacctgctccccgcccggactatggagaagagagtggcctgtgcaagtttcttatccgaaatttccgtcgcgagtgttacggcctgtccgaggttcccgaggctcactaggtacctgacggcaagtgctaaaatttcgtctctaactggaggagataaagcagaggaatcttcaaccaccctcagaaacaccttgtagtacgctttgatcccagcttttcccatgtggtaccctatggctagggttgccctgagtagaagttcgggatcgtttatatcgttcaacgcgtcaaacgccttcaaaaacgcctccttataaaggggatccttcctgcgcacaagcgtctcacctaaccgggcgtaggttaccgcgcgcgtatatggatcaggtatgatgtcagctgatttaagaacctcaaccgtcagcataggtggtcaccgtggactcatgtttttgattaaatcccaattatatttacgcggaacctttttaaaagcttactcaaagcgcaatccatgtatggagtaatcttaggaaagaattcagagctcagccgtgctgaattttactctttcgggagaagattcggactaaaagttaaatcgattgaggaagagcataactggatagtctttgaatccaagccttcggtggagagatatttccggtggataggcggttctctcaagctcgtcaggatagttggggagggagaagaggctctggaggagctggagtactccaggctttttacggtcagtctctacgggaagagcgactggaagctctggcgtaagctcgggagcgagataaagaagaggttcaaagaggaggggtcagctaagttcttcaagcccgcaaaaacatatgccatgcccgcggagctcatcctcaagggctttccggaggttaaggacttcgtctttctgttcagggaagacgggagcttcctcgtcggcgagacgatcagagtaacggaccccttcgagctgaagaagctcgacgtcgagaggcccgtccagaagcccatcctctcgattccgccgagactggcaaggataatggtgaacctgacggaggttagaaaggggagcttcctggatccgttctgcggcattggaacggtggttcaggagttcgttcttcaggggcttactgcctacgggagcgaccgcgacgaggggcagatcagggatgccaagaagaatctcacctggctgaggaaagagttccggctcaaaaactcggctcacttagaagtctgcgacgccagaaagctgaagaagtgttttagacagaggttcgatgctatagtcaccgaaccctacctcggaaagcccctcaaaagacacccgagtaggggcgaggccataaagctggccaacgagctcgaccgcttctattattcggtcttcgagagctttgccgacgttctgaaaagaaacggaaaggttgtctttgtcttcccggcctacaagctgagcggcggtggaatataccggaaggagaggaagtggctcgtgaagctcggctttgaagtcctcgggaggtaccctgactacgaggagaggcacagggtcgtaagggacatccacgtgctgaggtacagaggataaaccgttataagcagagcggcgtagtaagagcggtgatagcgtgggagacatagtggtcaaggtccccccgagtgtggacgaaaagctggccgatttgatagcaaagactatcgcggagagactgaaaaccctcgcaaggctcaatgagatgctcaagaactccgaactctcagaagaggatgcaatagaactcggacggaaggcgaaaatgggaaggggcgagtaccttgagagaagatattcttctcgtagttaacacaaacgtgctattctctttcttcgggaaatcaacagtaaccagagagctcgtgttcttggtatcagggagacttataagtcccgagtttgcactggaagagcttcacgagcacagggacgaagtcctgaaaaaagcaaagatcggagagaaagagttcgaggaaatactgtccgttcttaaagagcatgtcatattcgtaaacgaggggttctacgccgagttcatacctctagcactcgaataacccccgacaaagatgacgctgactttgtggcactggccctaaaagtaaaagccccctgtggaacaacgacaagagactgaaggaaatagaggagattgacgtggtgaacaccaaagaactccttgagctccttggaattacccgataagcctctcgtgctcctgctttatgcacctgtgagcgactgctgtaaggcccgcttctttcgctttcctgaacgcctccctgttgtaggtgttgaactggaaccagaccaccttcgcacccttctttatcgcctgttccacgtagtccatagtgaactctggcctaacgaagaggtcaacgatttcaacctcatccgggatgtcaagaacgctaggatagcacttcctcccgagaacctcatcgtagcgcgggttcacgggatagacctcatagccgtgttcgaggagatagcgcatgaccctgttagcatcgcgctccggctttggtgaggcgccgacgagcgctatcttccggtactttgtgagaatttctcttacctcctcatcgctcagcctgtcaacgggcattatccgaaccatcttatcacctggtaacctttggaaaagggctttaaagaggtagtggaaaatccctcggtggtggccatctactccgagaccgtcaggagctggaagatgctcctcataatgctcccagccttcctaggaatgaccataggaataggagcttcatacctggcaggcgaagacatgacgtttctcctcgtttttcttcttccgtttgtggcaatagcccttgacctgatgcagctaaagattgaagtggatgaggagagactgaaaatcagaagtgccctcggtctcctcgccagaaagacgatccggctcgacgagataaagctcgtcagaatttcagagggctggatgagctgcagcgggacgatacactacacttacccagggaaggcctgcgttctcattgaaagaactaaaggctggagcatctcattcaccaccaacaggcccgaagagctggcagaggttctcaggactctgggcgttccagtagtaggaggttccccctgaatccaacgatcctgactttttctcccctcttggcccttccgtttaagcagacccctctccacagctcgttcccaactttgacgataccctctggagataggtcttcaacgaccaccgcctccatccctatcaaagcctcagggccagttaaaggcctcttttcgagtccgcctccgaggacgtatggggcgattaaaatatccttgaggagcaggagcaccaaaagtggaacggatactttcaagggcacatcaaccccaaatccggggagaactacaaagataaagaccgcgacagctatttcgtccgctgaaagaaggaggagctttaaaactcccttcagcgtcactcccttccctccagccaccgccagtacgggttcagctccagaatgctccaccacttcttcagctcttcccttgcggagcggtagtccgggtagaagcgggagacaaggctccagaaggcctttgagtggtttctgtgcttaaggtgagcaagctcgtggacgacaacgtactccctgagctccggcggaagggctatcaggcgaaggttgaagttcaggttgccctttccagaacagctgccccaccttgtcctctgcgaacggatgaagaccttgccgggggatactcccatttttcctgcgtatttttcaataagcccaaatatctccggccggagaagccttttcagttcttcccgcatgtcttcgggataaggggggagaacaacggtcctaaagctgtcatgaactttcgccctccttccgtgtatgaccttgtagaactcgccgttcaggggaaagcccgactctgcaagctctttcagaccttcaatctgggccagcttcccctccagccaggcggcgttctttgctatgaacttctcaacgttgaacccctcgggggcagtgacgactaccctgccgtctggcttcacttctatcctagcgtatttaaccgggcgccgccggatttctatcttcatggtctttccctaaagggagtttttgaaagggaagttaaagggttatccgctggaaaacaaatggaaaggtcaagttcccttcggcttcagccaagcactcaaaccaacctgtctcgtcttctggtagcgcaggtcttccttgcggtaaccgaaggctctcagaattctctcaacggctgggagaacctggttctcaatgtagtactcggcgtcgtacttgtgcttcgtcgggtcgaactcgtcgaacggtatcgccctgtcgcctatcctcccagagcccttgagcacgatgtagcttatcaccgttccagggcgtattttgactcctctcgcggccaacctcttggcaacggcaacgtggggaccggttgccttgtagtcctttaaatccctcgttatctgctcgtggatcaccagcttctccggcggaacctcgtacttgctcagcttttcggtaacttctttgactatcctcacggccttctcgacgtcaccgtcctttagcaaagcttcaagaaccctcgcctgcgtctctttcgctatctcgctccagtcacgcctcacaatctcaagtccgcgcgttgttatcttgccttcctcgtctatcaccgcatacttcttcttcgtgacgaagaagccgcgtttgtagaagccctcgtactcgagctcaagcgcgcccggaagtttggcgttgatatacttgaggaactccatagccttctttttgacggtttcagcatcggctccaggtattgtggcaaaaaatccgtcggtgtcgctgtagattaccttaaagccgtacttttcctctatctccttgatggtcatcgttatgtactcccttccccaggccgttacgctctctgcacactccttgcagtaccagcgcgcccttgcatagccgtagtaaccgtagtagctgttgtgagcatagaccaacccaaagccaacgaggaagttctcgttgtcctcgacgctcaggtcatagacataaccatcgtagtcttccacatcaacggactcaacgcggtcgagcactacgtccccctcaatgagccaggagagcctctgggccttttcgggatcgagtcttccgtcctcgaccatcttcctgaaggtctgaggactgacgtttttctggaaaaccttcccaaagacctcgctcaggacttccttggggatcacgtgtgagtagtaggcgttctttttcttgtccagctttacgaacgggagctcctcgtttatatagaccctgtaaacgccgctgtcgtgcccaagttttacagcagagacccccaccgagttcaagaggaggacgagctggttcgctaaaagctcgcttttcgttgagagcctgagtctcttgttcgggtggacgtcgccatcgccgatgaagtacccctcaaggaaggccagccgaacccctttcggggacgtgaagacgaactcgggaatcctcttgttctccgctaggacaccgcacatgttctcaaagagcaggtagccgatcttcttcggtatctcaacgtagttcctgccccgcctcaccttcccgaaaaacctgctggcgagtctctccatatcgtccagcacttcagggtcttcgttgtagagcttcacgctgtagctccagccgtttttgggattcctctgctttcttgcatagccctcgctcacgtagtagccgaggagctttgctaacgactcgtccacttcaatgagcgggctcattctgaagccgttcagcgtgccgatcttccactccttcagctcttttaggggcattatgccaactgcatcccggatggaattgaattcaacgaggtactccctcttgttgccgttgtatctgacgttctcgacaagcgcctcgtagagccttctgtagttcttaagtgagtcccagtcgaggacttcgtagccgatcttcttaagccggacatagcccagatcctcaaggtgcctgagatagcgtctcgcggttctgggcctcttttcctctccgaaaatccagcgcaaagtcctgagcatccctttaaagaagttcttcttacccttgactgggatcgtcatgacgatgtccaaagtttcttcttctggcgttccaaggagcagttcaacgaggttcagcacgtggtttctctcaggaagctccaatctccgcgggactgcaacgaggtcacctggctttagttcatcgcccgtaacttcaacgagctccccgtttctcacagagaagaggctgtggccagaggttatctttattctcctccccgacttcagtctgatggtgtagaccttgccagaataatcgtgcctaatcagggcctttactctcttgagctcggccttcttagttctcctgttaaaggacgggacttcaagcccactgacctcaagcacttccgtctcgccctctctctttactttcccagcattttcctccatcatccggtctatgagctctccaatcctgacgaagtgaacctccccttcctcgaggactggaagccattcctcgggtaggatgctgtttgccaggatcttgatggccctctgcctgtaatcgaggagcttcctctcgatcgggtcaatcgtggccttcatcttcttctttatcttctgcctctcctctaggaggtctccaagcaggctcgggataaatcctgggaagtccttgcagaagcggtggccgacctgtggggcaacgtcatattccttgcatccttctctgttgagcgtatccggcgagacgttgtgggtgatgatgattgaggggtacagggagttatgggtcaatatgccattggcaaagtagtagggagttccttcaagagttaagtcatagaccttgccctcatagtattccgtgctgacattgaattcactgagcctgtaaaatccattgttttccaagttgttcatttccctctgagatattgccttattaagcagagcgttctttctttcactgatgaatccaatgagtgtttggaacagtatcaatccgtcctttccagttatctccagtatatacctgctccgatctttcccattttcctgatactgatacgtgtacgtttgatgagggataccaagctgggagagcagttttgacaccagtttaatcttccactcgttctttgtaccctgggttgcaacaatactcctcctaaccctgtttactgaaccgtcgccttcgaagaatcccctgagaaccgagggggcatgtagggactctatgttgtccataatttccttgactttaagataaacattcttcttcgcaactttgagtgttactgcgttagttcctttcttctccgagatgcttggagtaatcccaaacaaacgctcaaaaatgtatgtgatacgatccctaaactcctcctcgtctttcccaatggttatctcaacacgatactggtgtgaaatcctccgttttttgcgggatgaatcaaagtattcaacgtctttcctcaagagcgttccttcagccaatagtatgccagcgagctctcccttgagaacctcttcttctggaatattctcacttgtcgctctgcctatttcatagaaaaggggagtggttattatcttgcccttaacttttttagtaaggaaagacttagcaagactgtctcttattctcgtttgtcgttcgttctttgtaacaacgggaagcttatgattgggcgtacactttaacccgtttatgtttacaagctcccctttgtagtcgtattcccatacttttctaactctctgccagccgtcaatcccaaggacatagtcaccttcctgaacctcgctgatgtttataatccccttccccttgacgacaaccttcgtatcggctggatggcatctaaaatctaggtacactatgttctcccacaaccctctctcgggctcttttacatagcctccttcatagctctgccgtcttctggccagctccttttcatcgggcttgttcggggccagctcattcctctcataggccttcctgaggaggaaccactcaacgaggttgccagtgctggagcgggagacgtcccagagggactggccgattaagcgagaaagctgggcctccatcggaaggaactccttcccaagctcgtatgtgaccttcgcatcttccatcgagtagcgggcgactctctcaaggttctcgccggtttcccaggctgtggttatttcctcagcgtaaaccttctccttcggctgaccgaagacggcttcataaacggcctcaagcgtgtatgtgggcaggtttatcgtccgtcttatcacaggatagagatcgaagtgtatccgtcccttcacttcgacggcaaacctgtcgcccatcctctgaatcttcggctcgcttccatcccttccgagggcgaagtttattccgagcttttcacagcgctttttcagataggcgaagtcgaagttgtcgccgttgtaggttatgagaacgtccgggtctttctccttcacaacacggaggaagcgctttatcatctccctctccgtcgagacgacgtcaacgtaggggagatccacgttcttccaagttatcaccctggccccttcctcgtcggcgtagcttatcataaggattggcccctcggcgaactcctcgccctcatggtagagagtttcaatgtcgaaggcgagcattttcagctcctcgtcgccttccattggcactaatcccttgtctatgaggtagcgcttggcgaagggtatgtcgtactcgtagatgtcaataactgctggatgctctcgtatcttgtcccttatcgctgggacgtcctgcggatgagtaaagtagagtttccagacctcaactggtctcccgaggaacttcttctgaaccttttcaacccgcttaaccgttacaaccgtcccgtgcctctcggcggttatcttcttgacttcctcaatggcagaatcgtccttcaggagggcgtagaagtagggttcaaaagtccggtcgtactcaatcttaaactcgccgttttccttcttgaaaattcttatgacaggctttccatcctcggttatgtagtcagtgtcgaggatcatt

SEQ ID NO: 1088 - protein, 239 aa, Thermococcus kodakaraensis KOD1
  misc_feature (321437)..(321437): n is a or c or g or t.
  misc_feature (527833)..(527833): n is a or c or g or t.
  misc_feature (527901)..(527901): n is a or c or g or t.
  misc_feature (527978)..(527978): n is a or c or g or t.
  misc_feature (960838)..(960839): n is a or c or g or t.
  misc_feature (960860)..(960861): n is a or c or g or t.
  misc_feature (960872)..(960873): n is a or c or g or t.
  misc_feature (960879)..(960879): n is a or c or g or t.
  misc_feature (960890)..(960890): n is a or c or g or t.
  misc_feature (1250239)..(1250239): n is a or c or g or t.
  misc_feature (1302432)..(1302434): n is a or c or g or t.
  misc_feature (1302471)..(1302471): n is a or c or g or t.
  misc_feature (1302488)..(1302488): n is a or c or g or t.
  misc_feature (1674836)..(1674836): n is a or c or g or t.
MTIKAISVDIDGTITYPDRRLHEKALEAIRLAESLGVPVMLVTGNTVQFGEAAAILIGTSGPVVGEDGGALSIKEGKLRKRVYLTNMDEEWILWGELKKRYPEALLSFSMPERKAGLVVLRTVPVKAVRELIKELGLNLIAVDSGFAIHIKKPWINKGTGIEKACEYLGISPKEVAHIGDGENDLDAFGVVGYRVAVAQAPESLKEKADYVTTKPYGEGGAEAIEHILRKFGYLPEEKT

SEQ ID NO: 1089 - protein, 121 aa, Thermococcus kodakaraensis KOD1
  misc_feature (321437)..(321437): n is a or c or g or t.
  misc_feature (527833)..(527833): n is a or c or g or t.
  misc_feature (527901)..(527901): n is a or c or g or t.
  misc_feature (527978)..(527978): n is a or c or g or t.
  misc_feature (960838)..(960839): n is a or c or g or t.
  misc_feature (960860)..(960861): n is a or c or g or t.
  misc_feature (960872)..(960873): n is a or c or g or t.
  misc_feature (960879)..(960879): n is a or c or g or t.
  misc_feature (960890)..(960890): n is a or c or g or t.
  misc_feature (1250239)..(1250239): n is a or c or g or t.
  misc_feature (1302432)..(1302434): n is a or c or g or t.
  misc_feature (1302471)..(1302471): n is a or c or g or t.
  misc_feature (1302488)..(1302488): n is a or c or g or t.
  misc_feature (1674836)..(1674836): n is a or c or g or t.
VVVMFKYKQVIVARKDLKLSKGKFAVQVAHGAVTAAIKAQKEKPEWFKAWFHEGQKKVVVKAENLEELFKLKAEAEKLGLPTALIKDAGLTEIPPGTVTVLAIGPGPEEVVDKVTGHLKLL

SEQ ID NO: 1090 - protein, 341 aa, Thermococcus kodakaraensis KOD1
  misc_feature (321437)..(321437): n is a or c or g or t.
  misc_feature (527833)..(527833): n is a or c or g or t.
  misc_feature (527901)..(527901): n is a or c or g or t.
  misc_feature (527978)..(527978): n is a or c or g or t.
  misc_feature (960838)..(960839): n is a or c or g or t.
  misc_feature (960860)..(960861): n is a or c or g or t.
  misc_feature (960872)..(960873): n is a or c or g or t.
  misc_feature (960879)..(960879): n is a or c or g or t.
  misc_feature (960890)..(960890): n is a or c or g or t.
  misc_feature (1250239)..(1250239): n is a or c or g or t.
  misc_feature (1302432)..(1302434): n is a or c or g or t.
  misc_feature (1302471)..(1302471): n is a or c or g or t.
  misc_feature (1302488)..(1302488): n is a or c or g or t.
  misc_feature (1674836)..(1674836): n is a or c or g or t.
MSEIKLEWKKALEEKDCEKLLELFDDYIDSIEDEETLRKELERLKEVALQCEDPYDLAHEIAHVYSHLGDVEAGIELYKKLVEMKKDDPEEYATALYYLADAYEHFGMPEKAIETYQKLLEHEEKVLKNEKEIALTLANLAVNYDEIGETEKAIELMEKAREIFERLNEEKNYLISLLDLAHFKYELGEYDEAEALIKEVLRNPRDDEIEINAKLIEAEIWAGRGDYDKAFKALREALVKAIDVSDDIFGIVFDTLIDFISGLFEEGSYEAVAKNMEAFAELFEDDTAYFFRAIGELARWKAGDDEAKKRFDELYEKVENEELKEILDEWKKPKLALGLSL

SEQ ID NO: 1091 - protein, 266 aa, Thermococcus kodakaraensis KOD1
  misc_feature (321437)..(321437): n is a or c or g or t.
  misc_feature (527833)..(527833): n is a or c or g or t.
  misc_feature (527901)..(527901): n is a or c or g or t.
  misc_feature (527978)..(527978): n is a or c or g or t.
  misc_feature (960838)..(960839): n is a or c or g or t.
  misc_feature (960860)..(960861): n is a or c or g or t.
  misc_feature (960872)..(960873): n is a or c or g or t.
  misc_feature (960879)..(960879): n is a or c or g or t.
  misc_feature (960890)..(960890): n is a or c or g or t.
  misc_feature (1250239)..(1250239): n is a or c or g or t.
  misc_feature (1302432)..(1302434): n is a or c or g or t.
  misc_feature (1302471)..(1302471): n is a or c or g or t.
  misc_feature (1302488)..(1302488): n is a or c or g or t.
  misc_feature (1674836)..(1674836): n is a or c or g or t.
MEVNIIKTRIKSIYTPSRIPRVDWTVNQYVGCAFACSYCYAKFLTKWKDYGKWGSWVEVKVNAPELARKRVKGSVVMSTVSDPYQPIEAKLKLTRRVLQYMDKRNELSILTKSPLVTRDIDLFRLFDRIEVGLTINGFRGREKRLFEPLTPVQEARINALKELKEAGLKTYVFVSPIIPEVTDISSIVEETRDFADYYFFEVLNLRASGREFQRLLQEGYPEIYEILTDDGKFGKFVEKLRREIKELGVKTEGIETHKRGWELVKV

SEQ ID NO: 1092 - protein, 70 aa, Thermococcus kodakaraensis KOD1
  misc_feature (321437)..(321437): n is a or c or g or t.
  misc_feature (527833)..(527833): n is a or c or g or t.
  misc_feature (527901)..(527901): n is a or c or g or t.
  misc_feature (527978)..(527978): n is a or c or g or t.
  misc_feature (960838)..(960839): n is a or c or g or t.
  misc_feature (960860)..(960861): n is a or c or g or t.
  misc_feature (960872)..(960873): n is a or c or g or t.
  misc_feature (960879)..(960879): n is a or c or g or t.
  misc_feature (960890)..(960890): n is a or c or g or t.
  misc_feature (1250239)..(1250239): n is a or c or g or t.
  misc_feature (1302432)..(1302434): n is a or c or g or t.
  misc_feature (1302471)..(1302471): n is a or c or g or t.
  misc_feature (1302488)..(1302488): n is a or c or g or t.
  misc_feature (1674836)..(1674836): n is a or c or g or t.
VVRMGNIKQTFIKRTARELFDRYPDKFTRDFEHNKKMVAELTNVTSKTIRNRIAGYITRLVRMKEEGKIL

SEQ ID NO: 1093 - protein, 273 aa, Thermococcus kodakaraensis KOD1
  misc_feature (321437)..(321437): n is a or c or g or t.
  misc_feature (527833)..(527833): n is a or c or g or t.
  misc_feature (527901)..(527901): n is a or c or g or t.
  misc_feature (527978)..(527978): n is a or c or g or t.
  misc_feature (960838)..(960839): n is a or c or g or t.
  misc_feature (960860)..(960861): n is a or c or g or t.
  misc_feature (960872)..(960873): n is a or c or g or t.
  misc_feature (960879)..(960879): n is a or c or g or t.
  misc_feature (960890)..(960890): n is a or c or g or t.
  misc_feature (1250239)..(1250239): n is a or c or g or t.
  misc_feature (1302432)..(1302434): n is a or c or g or t.
  misc_feature (1302471)..(1302471): n is a or c or g or t.
  misc_feature (1302488)..(1302488): n is a or c or g or t.
  misc_feature (1674836)..(1674836): n is a or c or g or t.
MKCLVVGHVVRDIVKKGNKVLERLGGGAYYSALALSRFCDVEILTSFSNLPEEWIKELESMAKLQVVPSETTTTYELTYLDGNRRRLKLLERASPIEELPDGEYDVLLMNPVAREVPPALVTSALKKFPFVAVDIQGFIRSSSPGEIQYQPIDGSFLKGVKILHADLGEYQYLQGFSPEFVDVLLLSNGPEPGKAFLHGREYTFEPVHVGVDESTGAGDVFLGAFTGFYSQCPFVQALKRAAAFTALFLKNRSVDFSMDDVNELAMKVEVKRV

SEQ ID NO: 1094 - protein, 435 aa, Thermococcus kodakaraensis KOD1
  misc_feature (321437)..(321437): n is a or c or g or t.
  misc_feature (527833)..(527833): n is a or c or g or t.
  misc_feature (527901)..(527901): n is a or c or g or t.
  misc_feature (527978)..(527978): n is a or c or g or t.
  misc_feature (960838)..(960839): n is a or c or g or t.
  misc_feature (960860)..(960861): n is a or c or g or t.
  misc_feature (960872)..(960873): n is a or c or g or t.
  misc_feature (960879)..(960879): n is a or c or g or t.
  misc_feature (960890)..(960890): n is a or c or g or t.
  misc_feature (1250239)..(1250239): n is a or c or g or t.
  misc_feature (1302432)..(1302434): n is a or c or g or t.
  misc_feature (1302471)..(1302471): n is a or c or g or t.
  misc_feature (1302488)..(1302488): n is a or c or g or t.
  misc_feature (1674836)..(1674836): n is a or c or g or t.
VMAMVPERAVILAAGLGTRMGRKPKGLVRVAGREILYRTIRLLQENGVKKFIVVTNERYAPLYQEFIERHGFDAEIIINPEPEKGNGHSLHLAKEKVSGKFALTMSDHVYSRDFIERAVRGRGLIADREPRWVDIGEATKVQVKDEKVWKIGKRLKEWDAIDTGFFVLDDEIFKVTEILENEKNGDYSLSEVMERAKVSVTFVDGLGWTDVDTPEEIKRARRMLVRTAVKGTGDGFVSRHLNRRISTRVSELLVEKVTPNQMTVVTFLLGIISALTTLVSLPLAGILYQLSSILDGIDGELARAQLRTSKLGGYVDSILDRYVDGSFLALLAYATINEPIWYFVALLALLGSVMVSYSTERFRGAFCRDAYKEVPALRKLPGKRDERVFLTMLFLLYQIAASIKALFLTLAVLTNFRVALTLYFVVKKVSHPKTI

SEQ ID NO: 1095 - protein, 382 aa, Thermococcus kodakaraensis KOD1
  misc_feature (321437)..(321437): n is a or c or g or t.
  misc_feature (527833)..(527833): n is a or c or g or t.
  misc_feature (527901)..(527901): n is a or c or g or t.
  misc_feature (527978)..(527978): n is a or c or g or t.
  misc_feature (960838)..(960839): n is a or c or g or t.
  misc_feature (960860)..(960861): n is a or c or g or t.
  misc_feature (960872)..(960873): n is a or c or g or t.
  misc_feature (960879)..(960879): n is a or c or g or t.
  misc_feature (960890)..(960890): n is a or c or g or t.
  misc_feature (1250239)..(1250239): n is a or c or g or t.
  misc_feature (1302432)..(1302434): n is a or c or g or t.
  misc_feature (1302471)..(1302471): n is a or c or g or t.
  misc_feature (1302488)..(1302488): n is a or c or g or t.
  misc_feature (1674836)..(1674836): n is a or c or g or t.
MVRVVILGQGYVASIFASGLEKIKAGKMEPYGVPLADELPIKIKDIEIVGSYDVDSNKVGKDLYEVVKSYDPDAPESLRGITIRKGVHLGSLRNLPLTPTGLDDEMTLKEAVDHLVNEWKELKPDVFVNVCTTEAFVPFESREELEKAIEENNKERLTATQFYVYAAAKYAKEVGGAAFVNAIPTLIANDPVFVELAKESNLVIFGDDGATGATPLTADILSHLAQRNRYVLDIAQFNIGGNQDFLALTDEERNRSKEFTKSSVVEDLLGYNAPHYIKPTGFLEPLGDKKFIAMHIEYVSFNGAHDELVITGRINDSPALAGLLVDLVRLGKIAIEKKEFGTVYEVNAFYMKNPGPKEARNIPRIIAHEKMRMWAGLKPRWL

SEQ ID NO: 1096 - protein, 213 aa, Thermococcus kodakaraensis KOD1
  misc_feature (321437)..(321437): n is a or c or g or t.
  misc_feature (527833)..(527833): n is a or c or g or t.
  misc_feature (527901)..(527901): n is a or c or g or t.
  misc_feature (527978)..(527978): n is a or c or g or t.
  misc_feature (960838)..(960839): n is a or c or g or t.
  misc_feature (960860)..(960861): n is a or c or g or t.
  misc_feature (960872)..(960873): n is a or c or g or t.
  misc_feature (960879)..(960879): n is a or c or g or t.
  misc_feature (960890)..(960890): n is a or c or g or t.
  misc_feature (1250239)..(1250239): n is a or c or g or t.
  misc_feature (1302432)..(1302434): n is a or c or g or t.
  misc_feature (1302471)..(1302471): n is a or c or g or t.
  misc_feature (1302488)..(1302488): n is a or c or g or t.
  misc_feature (1674836)..(1674836): n is a or c or g or t.
MEESRLILALDVYDRERALEIAECTADYLWAIKVNWPLIIGSGLKIITELKQVTGLPIIADLKLADIPNTNRLIASKVFEAGADYIIAHGFVGRDSVEAVMELGKTIIVVEMSHPGAKEFIQPVTDKLIELANELEPFGVIAPATRPERVSYIRSRLERGIRILTPGVGAQGGKASDAIKAGADYVIVGRSIYGSNNPREAARRLYEEILEVV

SEQ ID NO: 1097 - protein, 149 aa, Thermococcus kodakaraensis KOD1
  misc_feature (321437)..(321437): n is a or c or g or t.
  misc_feature (527833)..(527833): n is a or c or g or t.
  misc_feature (527901)..(527901): n is a or c or g or t.
  misc_feature (527978)..(527978): n is a or c or g or t.
  misc_feature (960838)..(960839): n is a or c or g or t.
  misc_feature (960860)..(960861): n is a or c or g or t.
  misc_feature (960872)..(960873): n is a or c or g or t.
  misc_feature (960879)..(960879): n is a or c or g or t.
  misc_feature (960890)..(960890): n is a or c or g or t.
  misc_feature (1250239)..(1250239): n is a or c or g or t.
  misc_feature (1302432)..(1302434): n is a or c or g or t.
  misc_feature (1302471)..(1302471): n is a or c or g or t.
  misc_feature (1302488)..(1302488): n is a or c or g or t.
  misc_feature (1674836)..(1674836): n is a or c or g or t.
MEEKRKKIRVLVGGVFDILHVGHIHFLKQAKELGDELVVIVAHDETVRMQKRREPINPAEDRAELLRAIRYVDEVYIGTPGTIDMELVKRIDPDVIAIGPDQFFNCEKLKEELRKHGINAEVIRIPYLYKSDRAKTSKIIQRIVETFCE

SEQ ID NO: 1098 - protein, 135 aa, Thermococcus kodakaraensis KOD1
  misc_feature (321437)..(321437): n is a or c or g or t.
  misc_feature (527833)..(527833): n is a or c or g or t.
  misc_feature (527901)..(527901): n is a or c or g or t.
  misc_feature (527978)..(527978): n is a or c or g or t.
  misc_feature (960838)..(960839): n is a or c or g or t.
  misc_feature (960860)..(960861): n is a or c or g or t.
  misc_feature (960872)..(960873): n is a or c or g or t.
  misc_feature (960879)..(960879): n is a or c or g or t.
  misc_feature (960890)..(960890): n is a or c or g or t.
  misc_feature (1250239)..(1250239): n is a or c or g or t.
  misc_feature (1302432)..(1302434): n is a or c or g or t.
  misc_feature (1302471)..(1302471): n is a or c or g or t.
  misc_feature (1302488)..(1302488): n is a or c or g or t.
  misc_feature (1674836)..(1674836): n is a or c or g or t.
VIPVTKSIHIARVDVHNVDDILGYLGSNVQLVSVECWRAVAFAAVLAERAVKRGTPHAKTLGGELLLRLAGTHQIREAIKEVGAKNGPNYLVVFGDNSEAEEILRSLGLEEIEIKDCSDEEVKRFFEKSALVEVL

SEQ ID NO: 1099 - protein, 121 aa, Thermococcus kodakaraensis KOD1
  misc_feature (321437)..(321437): n is a or c or g or t.
  misc_feature (527833)..(527833): n is a or c or g or t.
  misc_feature (527901)..(527901): n is a or c or g or t.
  misc_feature (527978)..(527978): n is a or c or g or t.
  misc_feature (960838)..(960839): n is a or c or g or t.
  misc_feature (960860)..(960861): n is a or c or g or t.
  misc_feature (960872)..(960873): n is a or c or g or t.
  misc_feature (960879)..(960879): n is a or c or g or t.
  misc_feature (960890)..(960890): n is a or c or g or t.
  misc_feature (1250239)..(1250239): n is a or c or g or t.
  misc_feature (1302432)..(1302434): n is a or c or g or t.
  misc_feature (1302471)..(1302471): n is a or c or g or t.
  misc_feature (1302488)..(1302488): n is a or c or g or t.
  misc_feature (1674836)..(1674836): n is a or c or g or t.
MEPHEFKLTEEGIKAVLPPMEAEIMELMWRFKVATAGQVYEELKRKHPEIRRSTVSILMNRLCEKGLLKRTVERGRGGMRYVYSITTTREEFEQKVVKSILDALMNNFREATYAYLSRMKK

SEQ ID NO: 1100 - protein, 259 aa, Thermococcus kodakaraensis KOD1
  misc_feature (321437)..(321437): n is a or c or g or t.
  misc_feature (527833)..(527833): n is a or c or g or t.
  misc_feature (527901)..(527901): n is a or c or g or t.
  misc_feature (527978)..(527978): n is a or c or g or t.
  misc_feature (960838)..(960839): n is a or c or g or t.
  misc_feature (960860)..(960861): n is a or c or g or t.
  misc_feature (960872)..(960873): n is a or c or g or t.
  misc_feature (960879)..(960879): n is a or c or g or t.
  misc_feature (960890)..(960890): n is a or c or g or t.
  misc_feature (1250239)..(1250239): n is a or c or g or t.
  misc_feature (1302432)..(1302434): n is a or c or g or t.
  misc_feature (1302471)..(1302471): n is a or c or g or t.
  misc_feature (1302488)..(1302488): n is a or c or g or t.
  misc_feature (1674836)..(1674836): n is a or c or g or t.
MIPLIVALEVLLLYLSLGAVGIAATLLAALALVTMYLMANRGGANSGLIPLDESEMKWLHEGIVEMSKKAGTKVPAVYLQDDYIPNAYSFGGNIVLSLGLFEVLDEDEILAVAAHELGHIKNGDTKLFPMVTYGRYLMLITTILLMIGGNLAVRIIAPLLYISYEASRISLMKKREFMADDTALRLLPTPMSLKRALEEMKYYEDLRADVKINALPSIEPSIERDQGPKWVSFVETHPSYEERITRITMYITNLNKRLQ
